United States Patent Application Publication US 2026/0191916 A1 - sequence listing, part 111

SEQ ID NO: 711 - DNA, 2509339 bp, Bifidobacterium dentium (residues 1,254,671-2,509,339 of 2,509,339)
  source 1..2509339: mol_type = genomic DNA
cgctactcttcagcgaccagttccagatacgaatcgttccacaaatcttcgtcgccatcgggcatcaatagcacgcgttccggattaagcgcctgtaccgcaccctcatcgtgcgtgaccagcacgatcgcgccctcatacttggcgatggccttgaggatctcttcacgggatgccggatcgagattgttggtcggttcgtcaagcagcagcacgttcgcgcgcgaagtcaccaaagtcgccaaagccaatcgggtcttttcgccgcccgacagcacgcgggccggcttcaacgcatcatcacccgaaaacaggaacgaacccagaatggaacgagcctgtgtgtcattcagctccggcgcgacatgaatcagattctccaacacagtggcatcaagatccagcgtgtcatgttcctgcgcaaaatagccgatcttgcagccatgaccgtattccacggaaccggtgtccggatcctccaaatgggccagcagacgcagggtggtggtcttgccggcgccgttgtaccccagaatcactacgcgtgaacccttgtcaatcgccagattcacgccggcgaatacgatgttcgaaccgtacgccttggagatatcctgcgccatgatcggcgtacggccgcaggccgccggctccgggaaccggatatcggccaccttctccttcttctgcgcctcggacgtgttctccagcagtttttcggcgcggcgcatcatgttctgcgctgccacggccttggtggccttcgcatgcaggcggatgccctgctgcatcaggcgttcggccttcttttcggcgacttcgcgttcgcggcggcgacgctcctcatcgaccacgcgctggtgcagatacgccttccagccaagggaatacatgtcgatttggccgagttgcgcgtccagatgccacaccttgttcaccacttcgtcaagcaactcggtggagtgggagatgaccaggaacccgccctcgtatttcttcaggtagccacgcagccattcgatggaatcggcgtccaaatggttggtcggctcgtcgagaatcaacgtatccgcgtcggagaacaggatacgcgccaactcgatgcggcggcgctgaccgccggacaacgtgcccagctgttggcccatcacatcctgtggcaggccaaggctcgccgccatcgcggtcgcctcggactgcgccgcatagccgccggccttctcaaaatcctgcatggccttgtcataacgattcatggccttggtcatgacgtccggatccggatcggtcatgtccctttcggccttgcggatgcgcctgatgatggtggcgatgtcgcgcgcgctcatcatgcggtcgagtgcggtctgttccggatccgcggcatgcgtgtcctgcggcaggtagccgagcttgccggaaacgcgcaccttgccggcagtgggcagcatatcaccggtgatcacgcgggtcaacgtggttttgccggcgccgttgcggccgaccagaccgatcttgtcgcctttggcgacatggaagttagtgggatgcagcagcgtgcgtgcgccgatctgaatctcaagctcctgcgcttcaatcgccatgccgtaacacctctagtctttcatgtttcttcaaatgccaatcgaacatcatagcgaacacccgcaaccgtttccggccgtctcacggttcatttccaaacagatgacgaaacaacgattcgcgacgatcgatgaaggtcttggtgattcgatagctgtccgtatcctcataatcgcagggatggacgccggtttcgtcgaatgacaggattcccgcatccggcaggccgagcaggatcggtgaatgggtggcaatgatgaattgcgatccgccgttcgccatacggtgcatgtgctccagcagagtcaactgtcgttgcggcgaaagtgcggattcgggttcatccataagatagaggccccttcccgtgcgggacaggagaatctccagaaaaccttcgccatgcgacatctcgtgcaaacgggacatgttgtcgtagccgcgaccgtactcacgggcctgcgtcgccaacgtgaagaagctttccgcacgcaggaaaaagctggatgggccgatcgcacgttgccggtataccgtcatcgcttcggagaggtctgacgtgtcgtcgtacgtgctgaaccggtagttgcgcgtgcctccttccgcattgaagccgcagacgacggcgatggcctccagcagagtcgatttgccgctaccgttctcgccgaccagaaaggtgacgttcttacggaatccaagttcgtcaagcgaacgcaacgaggggattcgactggcgtatgaatcggccagcatactccaatcgatgcgcagtcccgacacaatcagatcgtccatgctccctacgaaaccacacttccacatccgacagaaccaacttacagaccggtggcgtgactcgatgcacgcaacgactccaccagcttcgtatgtccctatagctctcctgcataacgcatacgccatttcaaattatatggcggtccgcagggaaggatgctgtattgcgttgccgcagcggatgaaacgaatcagccactcgcgtgagcgattcgctacagtggaaacgaaaccgttcaggaaggaagagtcatggcaagggctttgatcgtggtggatgtgcagccgacgttctgcgaaggaggcgaacttggcgtgcagggaggcaatgcggtcgccgaacgtatcgcggattatgtgaacgcacaccggagcgagtacgcatatatcgccaccacgcaggactggcatatcgaaccggggactcactggtccgagcatcctgacttcgtggatacctggccggtgcatggcaaggccggaaccgccaatgccgaactgcatcccgccatcgccgcattgaacatcgagcatcatttcaagaaaggccagtattcgccatcatattccggcttcgaaggcttcgaggacaacaccgaccgcatccccacccgcgaggaagtctccaccgccatggccgcgagcaagacacttgccaacggattgaagaccgcaggcatcacacgggtcgatgtggtcggcctggccgaatcgcactgcgtcaaagagaccgctctcgacgcaaaaaagctggggttcgaagtgcatgtcatcgaaaacctgaccgaaccggtcagtgaggaactcggtatcgcagcccgtcggcaaatgagcgaagccgacatcatcctcgactgatcggtcccaatcagcagatatcaatccgacttccaaatactaggagggacgaccaatgaaaatcgaacgaaaaatgcccacacccgagcaattcgaggcgatatatcgttctgtgggatgagatgcacctggattggaacagatcagggttgcattgaatcactcgttgcaaggattcatgatttttgatgatggcaagcccatcggtatggccagactcctcggtgattacgccatggcatatctcatcaaagatgtggcagggcttctcgagtatcaatataggggagctggcaccctacttatactacgatgggatacgtcaaatgttttaaatcctcccatatgccaagagggttttcgggaaagagaaacggaacattgcgtatctaacgagcgacggataccgtcggcagaaccgtgcgcgttgaagcgcactgccgcgtagcttactcgtatgcacatttcacggttccgtattcgttcgctttttcgcaatgaagacccgcagtgcgcctgtatgagaaagaagcccatacatggcccggacaacaatgctcacgcttactgatatctcttacacctacccgtccacgcccgaaccactgttcgaacacgtgtccgcatctttccaacaaggatggaccgctgtgctcggcgacaacggcctcggcaaaacgactctactgaacattgccatcggaatgttgcccgctgacaccggcagcatcagcccggacccgcatagactcaccatcgccacctgcccacaagacaacatagtgaggcctaggaacctcgacgacttcgccacggactggtcacccgaaaccatgcgtgtacgcaacgcgttacgcatcggcgatgactggccctaccgttatgaaacactttccggaggtgaaacgaaacgattgcaggtcgcttgcgcaatcacagcgcgtcccgatgtgctcgtgcttgacgaacccaccaaccacgttgatagtgaaatacggaaagccatagtcgaagccatgcgccaataccagggcataggcatcgtaatctcccacgatgtcgcactggttgacgctacatgtgcacgatgcgtcatattcgaacgacagcacatcagtgggcgtaacatcaccgtcatcagcacatatgatggcggatatacacaagcacatgagcagatgacgtccagactgcgtggagacgaggagtcaatccgtgcggcacggcgggaagtcacacgactgcggtccgcacaggcacagcgacatcaagacatgcaaagcgcatatgttcgcaaacgcagcggttggaaaatcgaccgcaaggatcacagtgccctcgatcaccacaaatggatcgaaaaacagaccgataccgctttgggtgccgcataccgacaaatgaacaagcgtcttgaacgagcacagcgcacgctagattcactaaccgtagcggccaaacgctacgacggcgacatctggatcgacatacagccaagcaacagaaaggagctcctgcatctcacggagggtattatcatattcggcagcggcaggatgaccagctcgaacgataccgcaagaacgccaacacaatccatactgcatgccgacgggcatcaatggaaggtcgtgcatagtccagagatgagtggtgaaaaaccacagatgccgggcatcgccataccaaaactcagcatcggaccgcaagaccatatcggactgaccggtgccaacggactcggcaaaacaaccgtgattaacgcattgctggacagcatgccggaagacgtgccacatctgatcatccggcaacaaacgggagaagccgtgttctctcaaaccatgagacgactcgccgcattacagggcaaggagcgctcgcaggtgctggccgccttcgcccagctcaacgccgatccggataagttgctttccaatgaagcgccatctccgggcgaactacgcaaactcatgttgtgtttgggcattcttgaccggcctcagctgattgtcatggacgagccgacgaaccatcttgacttggaatccaaggtggctctggcaagatgtcttgccgactatccgggagcgttgctggtggtcagccatgacgagtggttcctcgaccaagtagtcagataggccaggcgacgaccatgtcatcgaaggcgggtttgcgctccgcgcgatcaggacgcgtaagcccgcctttcatcaatgccaggcctcaaaaccaaatcatgcctttaatagcgtggctcccactgaatatcgtgcaccgcagccgccatgtcggtctggtcggtgcgcgacaggccccgttcctgagccttacaggcaacggcctcggcgattctggtggaaacccgcctgacatccctgaacggaggcaataccggagctcccggctgggtcgcatcgaccatgccacccaaggaatgcgccgcggcggaaatcatctcatccgtcagcaagctcgcttcggaagccaacatacccaacccaaggcccggatagatcagcgcattgttcgcctgcccgataacatgctcaacaccctcataagtcacactgccggccggaatgcccgtggccaccaacgccttgccctccgaccagacaatcagattctgcgcggtcgcctcggcaagttcagtcggattgctcagcgggaagatgatcgggcgctcgcaggtctcgcacatcaacctgacgatgttctcggtaaaagcgcccggctgcgtggacgtgcccaccagaatggtcggtcgtatcgtacggacgatttcttccagatcggtcagttggtcggcgttcttgaagtcggagcgtttcctggcaaacggcctctgttgcggtgtgaggtcatccatgtcgtcgaacagcaggccctgccggtcgaccatatagaaatggttcagtgcttcctcacgcgacaggccttcgcccatcatttcgtccatgactcgttcggcgatgcccgcacctgccgtaccggcgccatagcacaggtacttctggtcggtcagcttgcctccggagatgttcagcgcaccgagaatgccggccagggtcacgatgccggtgccttggatgtcatcgttgaatgtggcgatggcattcttgtatttgttcaagatggttgcggcgttttctcggccgaaatcctcccaatgcaggtacagccgcgggaagagccgttcggcggtccgtacgaaccggtcgatgaacgcgtagtaccgttcgcccctgatgcgttcgtgccgtgttcccagatacagcgggtcgtcgagcagttgccggcggttggtgccggcgtcgatgacgatgggcagcactgaagcagggtcaatgcccgccgcagcggtgtacaccatcagcttgcctacggagatatcaacgccgttcgttccccagtctccgatgccgaggatgccttccgcatcggtgaccacgatcaatcgaatatgccgatcgcccgccgcattcctcaacgtcgcctcgatattctcgggatgctccacatcaaggtatgccgcgtactgcgattgcacgtacagatgactgtagttcttgatggtctcggcgatttcgggatcgtagacgatgggattgaactcgtcgaggtgatgggcgaacagataatagaacaaggtgcggttcgtattgaagatttccataaggaacaaacgtttctccagattcgtccctttcgactgaaattggagatacgtttgctgctcctgctcctcaatcgtctgcacgtaaggtggaagtacgcctacaagacccattttttcgcgctcttcaagcgtaaaggcggtgcccttgttcatgaatgggtcatttaatatattctgagccgttgccattaacaacctcctacaatacctgccgtccgccagatggtatccttccgtaatcagggggattggcggaacggcgaactgtgaatcgaactatatcaaggttgtctgtgccatatcagggttgtttggcgcaataatctgacagcctaaccgtcatggccgagccgccggggtcgttcctacgaacgtgccggatgcgacgtatacgtctattccctgtgggagttcctcttcaaggttcgaagatacgacttccgttcagcggtgatgcggcgtgactcacaagctttttgaatgcttttgttgtgggtccagtcatccagacgcagttcgcccggagcgtccgggaagagcatgactatggtcgcatcccattgtttggccaaagccgttgccacataccatgcacggaccatgttgacgtaataatcgtcggatcggataccggcgacgagctccaactgttccggatcgaaacgtggatcgtcaagaaagtccttcatcagaaggtcaaccgcataacggatcgtgtacgtgtcgccgctgcccgtccaagcattgattttgcggagaatggcatgtgaatcagcctttgaggagtggaacgccctgacgttaagtgcgtcgcaaaccgcccaattgtccacatggggaaggaaccggtcaagcatcctgaatgcctcatcggcggaatgcacagtaaggttaagtagcatcgcgtgaagcatgttttcctcgaacagggtgtgggggagtgcttcgaggaaatcctcaacgacatgggtgccgccatccatgtccgatcgcagcagttccttggcatagctacgcaactggggaacacggatgccgagcatcgtctccggagacacgtttgggatcaacgcggcattgaaggccttgtaggaggtatcggccaatgcgtgcagatggccggctatcacttcatgtcccacgattgccaccttgtctctgcctatccgtcgcatgccttatatgagctgaagaccaattattctccgtggcattgattaaccgcggcggtacggggcgccgaagatggttcaacggttgcggtccgtgaccagggcgagcgaacggatgcgggcggggaacctaaaccgacgattgatgcagttgatgatgggtcctacgcataatgcggaaacgatggttcccacgcctacgccgcaaagacctccgaagaacacgaaggaaaggacggtggcgatggcgatcagcgttgcgtcgaagatgattttcgtggtgcctagcttcattttggtaacggtggacagtgcatggacaacaccttcgccgggtaccatgagcacattgggggaaacttcgaccacgatgccgaacgccaggataatgcagccgatcgccacacatagcagtcgctcccacagggcggtcggattaaggaaacccagcaggttcatactgacgtcaatcatgaggctgaacaccaggttgaccgccacctgcaacagttgaacagggcggaaattatgccttagcaaggcgacctgcatgatgatgaacagcagattgaagatgaacgtggccgtgccgaaactcaacgggtacttcaggctgaacacgtatggcacactggagatctgcgaggttcccatattgcctttggtgatgaaggcgatggcgaaggagttgattaccactcccaaaacgaaatacaggtaacgacgcggcagatggttcatatgatcctttctctcagtccttcggatgcatgtggtggcgagaccttgccctgcgtgcgtgccgggccgatgtgcggccgaaaccgaacgtaagcaaccgtctcgacaccgatgcccatgacgtgtttccgctgatttcatccagccgattgggttcacgccacgttgaggagtcgtgaaatattccgatggctttgggtgcctttgccctgcggatagataaacaccccttcactcactatctggcagtcatgcgagcgcaggatgccattcaaacccgtttcgccttcgagtatcagggagcctatcatggccgggggaatcagtggctttccgatttggataggcgcgattacctgtccgggaatgactggcaactgctggagccatattccagaccctctcagatgccattccaggggtatgcatgctttaatgcacacatgggaagagggttcgaatgttgggcgtcttcgtcaattgaacgtgcatttttgggtgaatcgaaaacctgagttcgatggaggcgaaaggcatggtcgaactcatacctgggaacgagaggggacgtggtcgattagctgaaaactgaatctgacgaacgatgtcgaaaagatgattggttcgcctatcgtaaataccggaaatgcgaatcgcatgagaaacgtgaaaaaagaagatagaggtaatccaagatggcgttcatcgaaagcttcacccggccgttcatgctggcggtcatgttgtggccgttcctgtcgttcgtgttgacgttgccggtgctcgcactgctgtatcatcgggacaaccgcatccggttcacgtcggcgttgaccgcatatctgattgtgctgtacctgctggcgcttgcatgcttcaccacgtatccgatgccggaggatcccatggcctattgtgccgtgcatcacttgcaaccacagctgaacccgttcgaattcattcatgacatccggtcggccggcatcgtcggtatcctgcagatcatgttgaatgtcgtattcttcatacctcttggcttcttcatgaaacgcaccttccgatggaggcttgttctggcggcgccggtcgcgttttgctgctcgctgctcatcgaaaccacgcagttgacgggcgattggggcctgtatccttgcgcttaccgtctgtttgatgtcgatgatctgatcaccaataccgtcggtgcgctcatcggcttcgccttggccggactgttcaacagaatcgtgccggacgagcgcatcgaaccgaatgtcatcactacccatccgggttttctgcgtcgttttgtggctttgatgattgatgttgtgctgattgaggttacggcattgtccgtgagcctgctgacctatatgctgctgcgcactttcgaatttggctccgtagaagcgatgagcgtcagcgatactttgtatgccactgtcgtcatgtacgtggtcttcgaggtgatcattccgtggttccgtgagggacgtacgcttggcggggggttcacccgtatgacggtcgagacgaccatgcggtgcggttggcggcgcgtcgccttctatgcagtgcgtgcggcggtgttgtactgtgcggtgttcggggcgacggtgcttggtccctggcagctgttggtggtcgtggctttggcgattttctggatcgccaaacgatgcatgccatatgaccttatctaaataggggcattccgaataaaggcatcggagacttaagcctcgcaatacggcgacacgccggagtttgcgcccccgttggagctcgggtatattactaactcgttgctcaccacggtgggaacgcatgcggacatagcttagttggtaaagcgcaaccttgccaaggttgagaccgcgggttcgagtcccgttgtccgctccaaataaaaagctccccttgcagggagcttttcttgtattccgggatatcccccgtcaggcaccgatattgttgcgtgccggcgtgatcatggtcagcatcatgatggacggttcctccgcatataccgcatgcggaattcgggtagggaagtaggccaggccgccgggaaccagatccacggtcctgccattaccggtcactgtgagacggcccttcagcgtctgcacgaaaacaggcatggcggcggtatgctcgctgagttcctctccggcgtcaaaggagaacagcaccacgttgccgccttcccgttgcatcacagtgcgggaaacggtggacccctcctgcacgctgatcatgttttcgagactttcgatgaatcccagttcgaccggctcatgtccggatgcctgttcaacgctcatattcgctcctttgagatcggatacgcccatagtagcggcaggcatgcgtgtttgaacatgaattcatacgtttggaggaaatgcctttgccatgggccgaccacgatgtgaataccctcttgaaaaagacgatgcggcatcggacactgatgaaggttatgcattcgacaacgatgctgaatcgcaagccatggaggttgtggaaatgaatgagaacattgatttcgtgccggatgattccgcaagccatgtgtggacggaacgtgacagcgaactcgtcgagcagtatgccgcacaactcatgagtatgaacatcgggtgaatggccccaaccttgcatgagacgtcccacaccttcatcccatgatgcgggacgcatcccatgccgatcgttcttcacgattctttctgcggccactgcactatgccttccccttgcctcttacccggggacggccccacatgacatgcgcaggcccgtatccgaccgccttccgacactccgcggcccgagcaaactctcgcctacaatggagactcggactatccggcactgaaatatggaaggcgaatcgccattggctgacgtgagacgagaaatggagcggctacggcccgtgtacgagaccggcgtgctacgactcctgctacgcggcaattcgatgttatacgtcgcattgctgcgttcctcgttcgatccgctcaccggcgaactgccacgcgatgtattggaggagcgtatctcacgcagcctgtcgcggctggccgaaaccggcgattatacggtgaaagacgaccagacggtaagacaggccgcgcatgcgatcctgctcgaactgtcccgtgaaggcgatgatgactacgcctggctcgccaattcactggatgtcgcctcgcaccgttacctgtaccgtctgacggctcgcgcacatcgtgcgattgaagcgttgcatcgactggaagacaccacgcaggcgttatccggcgcgcaagccaacagcatcatcatggaaatcgaacacgcacgcatgcagctgaccgccgacccacgtgaacgcatcaaactgctcaggaaggacatcgaggaacgtcaaaaagagatcgacgagcttgaacgcaacgaaaccatcgaaagactgacttccgagcaggtcggcgacatcatcaacgtcatccacaacacgcttcggggcgtgccgatcgatctgcgtgaactggcgctcgccgaacgtgacaacggcgacgcgctgcgccggcgcatgcagtcgggtgccatgagtgtggaagacatccttaccgcctatcatgacgaataccgtaaatcgttccgtgaatccgacagcggcagacgcttcgaggacgccttccaggtgatcgtcaccgacgaaggacgtcaggaaatcgacgatgccgtacgtgacatcgccaaaaacccgtatctggacggtgagccgggcgcgctgctcggtcaggttcgtgccgaactcgaacgcatttattcgggcatcgaggatgtgcgcaggcagacccgcgcctccgatgaggcaatcagccgactcgtccgccagcagaccgacacccgctaccgtaccatgctggccacattgaaccagctgtttgccaaaaccaacgccgaagccaaggcgaatccgaacgccacggaccggccatatcacactgatacgggtctgtcacagattgcggtattgcccaccaagccggccaaggccatgatacggaacgccaccgcggcactgaatgacagcgctccaaccgtcggcctgcccgacctcaaagccatgatcgaagtgtgcggaccacgtctgcgccacatggtcgatctgattcatcgcaaccccgtcatgtcacatgacggcacgcgcgtggacttcgcggcaagctttaaccgactgccggccagcgaacgccgagaaagcgaaatcatcggcttcctcagcgcgttacgcaccgaaaacgacatggcatgcgccacctggaactgcgtatcgctcgacggcacccccagaacatggcgaaccagaccgatactcgctaccgcacagacgcttgatgacatcatcagggaaggctgaacgcaatgacagacgaacacagcgaaaccgtcggcatcgaacggtctcttccaaccgtcgaacaacccgccctcttcgacggcgacaccggcgacatgaccgccgatgcccgcatggccgccatcgcgctgaaacgagaacgctacatttccggagaactgttcgacctggtcaaagacaacgtcgaagccgtcgaacgatccctgaacaacgacatgcttcgcctcgtatccaacgataaataccacgtcatgtacgcggcacccgtcagcggcatcgaatcgaacatccgttcgttgaaaacccgtgcgagtctcagccgtgaggatgcggccatgctcgcattcctgcgcatccacgtactcgaatacgagaaccagaaaaccccggtggccgactggcaggtcagccgcgatgaaatccgtgccgcgctcgccacgggcgccggctatctcgcgggcggcaatgatgaggaaggcacgacgaagaagatcgccgccgccatctcccgtatgacgacctacgggtatctcgagccgaccgatgacgacgagatgcttgcgatcacgccgctggtaccgattgtgcttgaccggcagctggccgacgagtggctggacatgaccacgccgtccatgacgcacgataccgatgcgggaatgttggatcccatatccgaagaaaacgaaatgaccgacgaagaggagcgatgatggcgggagacgatatgaaaatcatcgccgatcgatggatgatggaaagccgacagatcgtcaactggggttcctatgacggctaccaggaattcagaccgtccatcgacgccgaatcgccagtcaccctcctggccggcgccagcgaatcaggcaaatccacgctcgtcgacgcgcagatttccctgctataccccaatggcacgccctataacaaggcgtccaatgcgggtcgatccgagcgcaacgattacacgtacctgcgcggcatgatcggcatcagtgacggtgataacggcgaaacgccgatcttcctgcgaggacgtgacgccaatggcacgccacaggccatatggggcgccatcgtcgacacatacgtgaaccgtaccaccggaagtacgctctcctgcggcaaattcctctacctgcccgccggagacggcaaagacgaggtgcgccgtcgctacattgcatggaatcgcaaaatagatccgcaaatcatggaccggtaccgtgatacgccattcacccccagcatgttcaagaaagcgtatccggattgcagcatattccccaatgccagcgcattccacgcatacatctggcaagagatgggcctcagcgccgaagcatgccgactcctgcacaaaatacaatccgctgacgccccgtcgcgactcgacgacatcttcaaacaaggcgtgctcgacgtgcccgaggcgctcagactcgcacaggacaccgtcgacgactacgatcggttcaacgccaacttccatagcatggaagacaaagccagacgcgtcgccaaactccaagacatccaaacccaatacgacgcatacgccaaacacctgacccaagtgcgtgaatacgaagccgtgaaccccgaaagccagcagggcctcgaaaccctgaccctatggatgcgttcgcgcatggccagcgaagtgcgagccggactgcccgccgccgaacgcaaggtgaagcagcaggaatgcgacctgcacgaggcacaggagcggatctccgatgtgaacaggcaacgcgaagccatcgtcgaacgcatcaaaggcattgacggcggaaccttgcaacggctgagcgatgacctggaacgcgcccgacgcgacatgcaggatgtgcgctcgcagcgtcaaagcatcgtcgagaaattcgagggcgtcgaaggtgcattgccatccgacgagacgtcctggaacgcgaaacgtgacgcattggcccgatccatggaaacgttcgacgaacgcatggggaatctggaatccaagcgggatcgtctgatcggcgagcgcaccgcagccagtcaggaatgtgcgcagttgcgccgggactatgatcgcaaacgcaggcagagaacccgcatcacccaggcgatggatgaggctcgtgcgctgatcgcgaaggcggtgggcctgagcccggacgaattgccgtatgcggcggagctgatggatgtgtccgagagcgacgaacgttggcgcaccgccatgaacgtcacatatgcgccgattgcgcagaccattcttgtcgacagccgccacgagcggggattcgcggcgaagatcagcgcgatcgatccggcgctgatgatccggcgcacctggcagttcgtggatgtggacaagagctatgattgcacccgcaatgacggttggatgtcgtcgaaattgcagtatcgtgaggattcgccgtttgccggatggctgaaggaacagaccgcttcggcccgtttggacgcattgtgcgtggagactatcgacgatgccacacacgaacgccgtcaggtgcaggctgatggtcagatcaagtccggcgtgcacggtttccatggcatcaaaggcatgaatccgatcatcggtttcgtcaatgaaggctatctgacggaattgaagaaacagcttgacgaagcgcatcatagattgtccgataccgaacgtcgctgcggcatggtgcgcaagagcatcgacctgatgcacgcggaaaagaatcttgcggatctggtcgcgaatatgacgtggaacaaaatcgatgtggtcggtgcggaaacgcttgtcgagaatctgaaaaggcgaatcgaacagattgaagacaatcctgaaatgacgcggcttgccgagcgacgcgaggaaatcgacaggctgcttgatgaagcgaatgcccgcttctaccacgccaaaagcgaaatgcaatcgacccaggcggcggtcgatgccgaacatgcgtggctggaagcatatgagggcatcgaatttgacgatgatgcgctatccggcgatgtatcgaacatgctggccgacgtatatgagggatgtttcggtggtgtggtccatgccgaggacagaccgaagctgatcgccggcgggaacgatgagatcggcgggcattcgttcgagacacgcgtcggacacgccatggaacgcgccatgcgcgaacagaacgcggcattgggcaaacgtgcaggggagttgcgcaccgtcgtggaacagagtatggcctcctacttggagagatacgctcccgacgatgattccgcgacaggcggcgttgaggattacaggttctatcttgaggagctgcacagtctgcagatgctcgtcacgcgagaggcgaccgacgaagaatacgccaacagcctcgacaagctcaccaagaatttcctgcaactcaaccgtgcgctcaacaccgaccaggaaaacgtcaaggaccagctcgaacgcatcaacggcatgctcgccgggcagaaattcggcccgcgcggcggcaggctgtccatcgacgtggaattccgccccatcgaacgtgcattcgtctcatccttgaaggccacgctgaacaagctcgacgaatggttcaggaacgacaaggacgatcctgatgccacacgcaaggcattcacctcctgcgccacgttcatcgaacgtgttcgtcgggaactggaacaggtacgcgacgtgaacggcatcagaagctacggcgcacgcaacctcgacccgcgtgcacgaagcacgttctacgccatcgtgcatcatgacgacggtcctgacgagcgcatcagctccaccggcggcaaatccggcggcgccctgcaggaactgacatcgttcatctacggcgcggcgctcatctacctactcggcggcgacgtgaccggcagccccacctatacgacgctgttcctcgacgaggccctcatcaaggccgacggccgctacacgcaacgtgcgctcaacgtgctgcctcgtctcggcttccaagtcatcgtatccgcaccggaaagcaagaccgccgaaatcctcggcgtatccaccaaagcgtacgtggcctacaaggatccgtcggtaggccgttcgttcctgcaggagcttacctccgaagacatcgcccgtcaggaagccgagctccacgatgcaatcgacgacatgccggcggccccgaacgatatagggcccacaacggccacgattctcgaacaggtgttctaaaacactccgaaaatgcggtatccttaaggactgaaacccggaaaaacagtgagcggaggatcgttgtggctgcgaagcggacgaacgcaacaaacggcgaagtcgtagtggaacgcgtcatgaccagtgacgcgttcctggcacgagaaatcaaaaaagcgccgatgaaagccgaaaacggttcgctggtagctgacttgaaacacctgcccaacgatctcaaaatcgtcatccaaggcgctcgcgagcataatctcaggaacgtcaatttggagtttccgcgaaaccgtatggtcgtattcaccggtttgtccggatcgggcaagtcctcgctggcgttcgatacgctgttcgccgagggccagcgtcgctatgtcgagtcattgtcggcgtatgcacgtcagttcctcggccagatggacaagcccgacgtcgacttcattgagggactgagtccggcggtctccattgatcagaagaccacgaaccgtaatccgcgttccaccgtcggaaccatcaccgaagtctatgattacctgcgactgctgttcgcccgtaccggtattccgcattgtccggaatgcggttcgctggtcagcgcgcagaccccgcagcagatggtcgacgcattgttgacgtatccggaacgtacgcgattccagatacttgcgccggtggtacgtgggcgcaaaggtgagttcgaggatctgctggagctgcttcgcggggacggctatgcccgtgctctcatcgacggtgagatgaggcagctgtcggatgatatcaagctcaccaagcagaagaagcacactatcgaggtggtggtggaccgtctggtggtcaaagacggtatccgacagcgcctgaccgattcggtggagaccgcgttgaaactcgccaagggcgtgatcgtcgccgatttcgtcgatttggatgagaaggatccggaccggcgcaagccattttccgaaaaacgggcatgcccgaacggccatcaactggaactcgacgagatcgaaccgcgtaccttctccttcaacgccccatatggcgcatgcccggtgtgcaccggcatcggatacaagctggaaatcgatccggaactggtgattcccgaccccgataagacgctcaacgagggcgccatcgaaccatggggattgaccaagggcaccggcgaatattatcgtcatgtgcttgaaggccttggcgatgagatgggcttcgatctggacactccgtggaagaagcttccggaggaggtccgtcatgccatcatgtatggccgtgatttcaaggtgcaggtctcataccgtaaccgttggggccgcatgcgcgagtattcgaccggtttcgagggcgtggtccgcacgctcatgcgccgccatgatgaaaccgactccgaccagatgaaacagtactacgaatcgtatatgcgtgaagtgccatgccagacatgccatggtcgtcggttacgtccggaagtgctggccgtcaccgtcggcgacgaatccatcgcggacgtgtgcgacatggcggtcgaacacagtcttgactggatcaacaatctgcagctcgaaggctccgccgcgcagatcgcgggagaggtggtcaaggaaatccgtgcacgattgggctttctcaacgatgtcggtctgaactacctgacgttgtcacgagccgccaagacattgtccggcggcgaggcgcagcgcattcgtctggccacgcagatcggctcgggtctggtcggcgtgatgtacgtgctcgatgagccttccatcgggctgcatcaacgtgacaacgagcgtctgatcaccacgttgcatcatctccgcgacctcggcaacacgctgatcgtcgtcgagcatgacgaagacaccatcacgaacgccgactgggtgatcgatatcggtcccggcgcaggagaacatggcggggaagtcgtatattccggccccgccagaaaactcaccgacgcgccgaggtccatcactggcgactacattgccggacgtcgtgagatcacgatgcccgaatcacgtcgcaaggtgcgcaagaccaagcagctgcgcgtggtgggtgcccgtgaaaacaatctcaaggatctgacggtgaactttccgttgggagtgttcacctgtgtgacgggcgtttccggatcgggaaaatccacgctggtcaaccagattctctatccggtcctcgcggacaagctcaacggcgcacgtatcgtgcctggcaaatacgcccgtgtggaaggcgtcggtcagtgcgacaaggtgattcatgtcgaccagaatccgattggacgcaccccgcgctccaatccggccacctataccggcgtatgggacaagattcgcaccctgttcgccaaaacgcccgaagcgcaggtgcgcggatacggtccgggacgattctcgttcaatgtcaagggcggtcgatgcgaagcctgccatggagacggtacgctgaaaatcgagatgaacttcctgccggatgtctacgttgactgcgaggaatgtcatggcaagcgctacaaccgtgagaccctcgaggtgaagtacaatggcaaatccgtcgccgacgtactcgatatgcccatcgaggaggccgctcgattcttcaaggcgtatccttccatctcgcgttatctcgatactttggtgcaggtcggcctcggatatattcgccttggacagccggccccgacgctgtccggcggcgaatcccagcgcgtgaagctcgccactgagctgcaacgccgttccaccggcaaaaccgtgtacattctcgatgagccgaccaccggcctgcatttcgaggatgtgcgcaaactgttgctcgtgctccaaggattggtggacaaaggcaacaccgtcattgtgatcgaacacaatctcgatgtggtgaaatcagcggattggatcatcgatctgggacccgagggcggtgacggcggcggcaccatcgtcaccgagggaacgccggagcaggtcatccaatgcgagcggtcctggaccggcaagttcctcaaaggcatgctgcgggcatgatgatcgaacgacatagtccggaggtttggaggaaaacggctgcgagtctgcgggatgacgcttcatatgccatggaaggtgatggcaggggagtgaacaggaacggagctcccctgttgggagacacgcgtgacctgttcaggccgaaaccatcggatattccggcacggccgggcgtctataaatggcgtgacggagaaggtcgcgtcatctatgtcggcaaggcgaagaacctgcgcaaccgtctggccaactacttccaaccgctctaccaattgcatccgcgcacgcagaccatggtgcttaccgcacgtagcctcgagtggaccgtggtcggcaccgaactggagtcgttgacgctggaatacacgtggatcaaggagttcgatccgcggttcaacgtggtgttccgtgatgacaagacgtatccatatctggcgatttcgtcgggggaacgggttccccgcgtatggatcacccgcagccgcaagcgtcgtgacaccagatatttcggcccctatgcgaaagtatgggacctgcggcacagtctcgaccgattgttgaagacgttccccgtacgcacctgttcgcagagcgtctaccacaaggccgaagtcacgaaccggccatgtctgctggcctccatcggcaaatgttcggcgccatgcgtcggacgcatcggcgtggatgaacatcgtgcaatgagcgaacagcttgtcggtgtgctcaccggtcgaatcggcaaattgtacatcgcgcagcttacgcgagagatgaaggcggccagcgccgaactcgaattcgaacaagcggcccggttgcgtgatcagatccagatgttgcagacggtcatcgaacagaacgccgtggtgttcgactccgacgtcgacgctgacatcttcggcatcgactccgacgaactcgaagcttccgtgcacgcattcttcgtacgcgccggctcgatccgaggcgagcgcaactggagtgtggaacgggtggaggatattggcgacgaggagctaatcgccgacctgatcatgcaagtgtattcggaagcgacgggagaggccggcctgaatattgagcatgagacgatgacgcagggtaccgtcatctccgaacggcgcaatgccatcggatccacgcagtccataaccgccaccgacgccattgcccgggcgcaggccacccgtgagcgtaacgaacggcaggagcagaccggccgggccgacctgctcgctccgattgcgccggtgccacgagaggtcgtcgtaccgatcgaaccggcacggcgtgaagacctcgaacgatggttgagtggcctgcgcggatcggcagtgaccattcgtgtggccagccgaggcgacaagaggcagcttatggaccgtgccagcgacaacgccagacaggcgatgcagcgcagcaagatgagccgcatcagcgatatgggcgcgcgtaccaccgccatgaacgatgtagccaaggccctgggcctcgaacaggcgccactgcgcatcgaatgctatgacatctccaacaccgtcggaggcgccttccaggtcgcttcgatggtggtgttcgaagatgccatcgcaaagaagtccgaataccgcaggttcgccatccgcggcgcggacgggcaaggtgcattggacgatttgagcgcgctgtatgaaacgctgacccgccggttccgacacggcaatatcgcgggcgataccggcgaaagcatggacaacgaacaacgggaggcacgaacatcccggacctgcgaaaataccgacccgggcaacgttcccgtccggcagaacacggaccgtcgccacttcgcgtataagccgaatctcgtggtggtcgacggtggcaggccccaggtcatggcggccgcccgcgccctggaggattgcggcgtcgatgatgtggccgtctgcggtctggccaagcgtcttgaagaggtgtgggtgcctgacgatgactatccgatcatcctcaaacgtcaatcggaaggcatgtatctgctgcaacgtgtacgtgacgaatcacatcgtttcgccatcacctatcaccgccgaacccggaggaagggagcattgcgatcggtcctcgatgatattcccggtatcggcgaatcctatcagaaacgattgctcaatcatttcggctcggttcgtgccatgcgtgaggcgagcgtcgaggactttgaacaggtcaaaggcatcggacgcgccaaggcggaatcgatataccatgccctgcatgcgcaggaccaggaccgggaacgatccgagaacattccgaaggatggaacgaaataggaccatgcaacgcaaaacggcggcggagttgttagcatgagggtgaacgtcaaggaggggaacatgccgaatgcgaatcatcgttgcgccgttctggggaagcccatcgcgcattccctttccccggtgttgcacaatgcggcctatcatgcgctgggacttgaggactggttctacgacaaacacgaagtgggggaatgcgacctcgaggattttctgaagtcgcttgattccggttgggcgggactcagtctgaccatgccgctgaaaagaacgattcagccgtacggcgaaccatccaatatatgggcgaaggaactgaacgtcgccaataccgccatcttcgactggacccgttctcatcaagtcggagatgcggatcttccatacatcaagttgtataacacggatgtgccgggcatccagatggcattcgagcatgcctatcggatgcggaaccagaatgcgcccgcgaatcatgcagggaacgccgtgatcataggcaacggcaacaccgccacctccgcattggccgcgtgcacggccatggcgggaatcagtcatatcacagtggttgcgcggcatcccgacaagaatgcggaattggaacctctggcgagaaaattcctttcgggcgagcatcccatcgacatcgtcaccatggatgatgccatggatgcgttgagcgaagcacgggtggtgatcaatacgattccggggctggccgccgacggtatcgccacggccttggcggccagcggtcttgaggtgaatggcacattgctggatgtcgtctacgatccacgtccgaccaagctcatgcaggcgtggagacggcagggcgggtatgccatcggcggtgaggaaatgctactgtatcaggccatgattcaggtgctgctgatgaccggcatgtgggatggggatccccctacgaacgctgccgtcgatatcaagcaggacgaacgattggaacatgcgatgcgcatggcgctggaggaggcattgtgatggcacaggacaatgagatcgacaggcagcacgcaggcacacatttcagcgcagccgcgccggcggagggcttcgaggtgctgctcatcaccggcatgagcggggcggggcggtcccatgcggccgacagcgtggaggatatgggctggtacgtggtcgacaacatgcctccgaaactgttggtgccactggtcgacatgatgaccaccgccgggtcgggcatccacaaattggcggccgtgatcgacgtgcgttcccgtgactacttcgacgatctgtcggcggtgctgagccatctggacgatttgggcgtcaagacgcgcatcctgttcctcgatgccagcaacgaagtgttaatcaagcgttacgaatcggtgcgcaggccgcatccgttgcaacagggcaaccgcctgatcgacggcattctcgaggagcgcgatctgctggagaatctcaaggaacgtgccgacatcgtcatcgacacctccaaactgagcatccatcaattgtcgacgaagctgtacgaggccatgctcggatccggaccgaccaccgtttccgtgcacatcttcagcttcggattcaaatacggcattccaatcgacgccgatttcgtggccgacgttcgcttcctgccgaatccgttctgggtgccgcagctgcgttccatgacaggcaaggaccagccggtcagtgattatgtgctttccagcgatggggcccaggaattcctcgatgcctatgaacgggccatcgcagtcgcgatcgaggggtatgcgcaggaggacaaacattatgtcaccatcgccattggatgcaccggtgggcagcatcgttccgtggccatgagcgaggcccttgccaagcgtttgcgtacgagaggtctttccgtcaccgtctccgcacgtgaactcgataagcgctctgcggaaaaatgaccgtatgatgagaatgtaacgtccgaacataacgaaaatacactgtgattgtccaagatattcggtatcacagtaagccgtggcagtgcggatttaccccgcgactcgcctgaaattttgggaagaacaggaaagtaggaggttggctcttggctcttctggatgatgtcaaaagcgagctggccgcaatcgacaacgaattgcccatcgccaaaaaggcgcaggccacttcgatgattcgattcggcaatggtttgcacacggtggatcatcatgttctggtgcaggctcagcttgactccaaggatgcggctttgtggctgcaggacaccatcaagaatctgtatggccatgaaaccacgttgaccccggtctccaggcagactccgacgggcatcgttcagcgctacgtgattcgagtccccaaagggagcgcggctcttgtgctgcagaccggtctgtatagccgctataccaaaaacatggtgctcggactgcccagcgaaatcatcaacggcaagatcacccagatcaaggccgcttggcgtggtgcctttctggcgaacggtcgcctgtccgaccccggcaaggcgagctaccttgagatcgtatgtccgaaccatgaggccgccttggccttggtatccacggcgaggcgtctgggcatcacggcgaagtcccgccgtctgcgcagctcggagcgtgtgaccctgcgtgatcccgatgcgatcgaacgcatgctcattctgatgggcgccccccattccgctcgtgaatggaccggtaaacgttccgatggtgaagcgcggggcaaggcgaatcgtctggcgaatttcgatgacgccaatatgcgccgtagcgccaaggccgctgccgaggcatgcgacaaggtgcgtcaggcctttgagattctgggggatgacattcccgacaatctcaagtccgcgggacagttgcgactcgaccatgccgatgcctctttggaacagttgggacgtcttgccgagccgccgatcaccaaggatgccatcgcaggccgcatccgtcgactgcttcagctcgccgaaaagaccgagaaggcacgacgacaggacgcctgaacgacgaaacgccatacaaaacaccatgcacgttttcgaacggcatggtgtttttgttcgtttgggcttgtatgattcagaagtggcaatatggccattccatgcttattgcggctaggaaaggaaatacatgaagacacttaaggatcttggagatctcaagggcaagcgcgttctggtccgcgctgatttcaacgttccgctggacggcaccacgatcaccgatgacggtcgtatcaaggccgctctgccgaccatcaaggccctgcgcgaggaaggcgcaaaggtcattctgatggctcatctcggtcgtccgaagggcaaggtcgtgccggagctgtccctcgcaccggtcgccactcgtcttggcgagctgctcggcgttgaggtcccgctggcctccgatacctatggtgaggacgcccaggccaaggtcgccgcaatgaacgacggcgatgtcgtactgctgcagaacgtgcgtttcaatcctgaggagaccagcaaggatccggaggagcgtgccgcatacgccaagaagatcgccgcccttggcgaggccttcgtatccgatggcttcggcgttgtgcatcgcgctcagggctccaattatgacgttgccgccgatttgccggccgccgcaggtctgctggtcgagaaggaggtcaaggccctgtcccgcgccaccgtcgatccagagcgtcctctgaccgtcgtactcggtggttccaaggtctccgacaagctcggcgtgatcgagaacctgcttgacaaggccgatcgtctggtcatcggcggcggcatggtctacaccttcctcaaggcgaagggcctcgaggtgggcacctccctgctggaagaggaccaggtcgaaaccgtcaagggctacatcgagcgtgcggagaagaacggcgtcgaactcgtgctgccgaccgacatcgtcgtgaacccggtcttcccgaagtccgatgaggacatcgctccggaagtcgtggccgccgacgccatcccggccgacaagatgggtctggatatcggcccggattcccagaagctcttccacgacaagatcgtcgactccaagaccgtcgtgtggaacggtccgatgggtgtgttcgaggttccggccttcgcagccggtaccgaggccgttgcccagggtctggtcgacgccactgcggccggtgcgttcaccatcgtcggtggcggtgattccgcctccgcagtgcgcaatctcggcttcccggaggatggcttctcccacatctccaccggcggcggcgcctccctcgagttcctcgagggcaaggaactgccgggtctgaaggtgctcgactgattccacgaatcatgaagggtgctctctcatcttccggtgggagggcacctcttgttttgttcatcgttgcgcatatcttgaacaatcgcttccacagtacaggcagggaataggatagtcatatgacatcacggcgcattccgctggtcgcgggcaattggaaaatgaacttcgatcatctcgaagccacctatttcgtacagcagttggcctggaaactgcgcgacgtgcatttcgaccataaacgctgtgaaatcgccttgatgccatccttcacttcattgcggagcgtgcaggtgctggtggaatccgacaacctgaagattcgttatggggcgcaggcggtgtccgttacgtcgcagggggcattcaccggcgacgtctccgcggatatgattgcgcatcttggatgttcgtatgtcatcgtcggccattccgaacgccgcaaataccatccggaggatgatgcgaatatcgtcgatcaggtgcgtgcggtgctggcggccggcatgcagcccatcctgtgcgtgggcgaaagctatgaggagcggcgtaagggcattgaactcgatttcgccgtcgggcaggtacatgacgttacgcgtgatctttccgatgaggaagcctcccgactgattgtggcctatgagccggtctgggccatcggtaccggcatggttgccacgccgcaatccgcgcaggatgcggcgaaggctatccgggatgatcttacggcgacgttcagtgccgcggttggcgatacggtgcgcattctctacggcggatcggtgtcttccaagaatgcggtcgagctcatcggagaaccggatgtcgacggattcctcatcggcggcgccgcattgaaggtggatgagcttaccaaaatctgccgtttgactctcgaagcgaccgcctagagaggtgtattcgccttcatgatccaataggtgtggtcggtattcgattttctcaacaccatgcggtattgttggcaacagtgtttacgaactggaggttcactcgtgtccgctatggccatcgtcaagcttgtgctacagattgttcttgttattttcagcttgttgctcaccctgctgattctcatgcacaagggtaagggtggcggcctgtccgatatgttcggcggaggccttacccagaatgcaggttcctccggtgtggccgaaaagaacctgaatcgttggaccgtcatcatcgcgttgctgtgggtggccatcatcatcgccctcggtttgatgacgaagttcaacctcatctgaaacgtttgcatggtttcggcccatgatcggcatacggtcatgggccgaaattcgttctgcctccccacgatggataaaggactgactgacatggcctcttcgaaaaccggacgcgctcatgcgactaccatggtcgtggccgatcttgacggtacattgctgcatgatggcaagaccttcgaggaacgtttcctgacgcaacgttccatcgacagcatcaaccggctgcatgacgccggcatgacgttcgtggtcgaaacggcacggcccgtcagtaccggattgcaattcgtggataagctgccggtcgatgccgtcgcctatctgaacggcgccctgatcgacttcaaccccgccgcttcggattatgagatgcttacttccggcatacctccgaaagacggccatctgatgaaaatcggcttctcttcgcggcgcgcttgcgaagtgtgcaggtatctgcttgaggagctgcccggcatggaagtcggcatcgtcatggatgatgttcggtacacgaatttcgatgtcaccaaatattggaagacgcagacctggaggtataccgacttcaatgatgtgcctgaaggcatcgccgacaagctgatactgtttccgaatccggaacaatggaatcgtgtgcgtgaactcattcccgcggattttgacgtgcatatttcggagggatcgctgtggatgctcatgagcccggacgccaataaggaacatgccttgaacattctggccgatcatttctccacgccgttgtcacagacggcttcattcggtgacgatttggtcgacatttccatgttgcagcagtcgggcaggggagtggccgtggctaatgccaatcccgatgtgctgaggatcgccgatgagatttgcccgtcaaataacgatgacggtgtggcgcagtggattgagcgtcatcttctgtgaaccctggcggattgcaccgtaggacgagctatagattgaacttccagatgatccggttatcaagaagacacatcgcagattgaactttgaaggtttttcttctgacgtggtgctagactttgaaccagtgcttgattgaaattgaactggaaggatcggcatgacgaatacatcattttccgtccggctgagcagcgccatggcgcttcgcagggtgaagcaaattgatttcgtacacgcagctgaaaagttcaatatcaagctcggaaaaagccacatgagccagtatgtgagcggaaaaaccgtgccccgtgctgacatcgcccactttcttgcggcgttcctgcaagtgaacgagcaatggttgatgggagaagacgtgccgatggatcaagatgtcaccgctttgcctgagccggttcctaccggtacccatcatgatgacgccgtgccaacgccaacgcaatcagcagaaggaagaaccatgcgtacctttactaaatcccacaagcttgacaatgtgctctacgatgttcgtggcccggttgctgacgaggccgcacgcatggaagccgctggaacgcatattctgaaactgaacatcggcaatcccgctccgttcggattccgcacgccggatgaggtcgtctacgatatgtcgcagcagctgccggacacggaaggctattcgccgtcgaagggtctgttctcggcgcgtaaggccatcatgcagtatgcgcagctgaaaagcattccaaacgtgtccatcgatgacatctataccggcaatggcgtcagcgagctgatcaatctgtcattgtcggccctgcttgacaatggcgatgaagtgctggtcccttctccagattatccgttgtggacggcctgcgtaaatctggccggcggcacagcggtacattatacctgtgatgaggaatccgaatggtatccggatattgaggacatacgttccaagatcaccgatcgaacgaaggccatcgtcatcatcaatcccaataatccgaccggcgcactgtatccgaaggaaattctcgaacagatcgttgaaatagcgcgtgaacatcagttgatgctcttctccgatgagatctacgatcgtttggtcatggatggtctggagcatatctccatcgcatcgctcgcgccggatttgttctgcgtgacgttttccggcctgtcgaagtctcatatgatcgcaggttggcgtgttggctggatgattctcagcggcaacaagcgcatcgccaaggactatatcgaaggtctgaacatgctggccaacatgcgtatgtgctcaaacgtaccggcacagtcaatcgtgcagaccgccctgggcggacatcaaagcgtcaaggactatctggttcccggaggacgggtccatgatcaacgcgatctcgtctacaacatgctcaatgagattccgggcattacggcagtcaagcccaaggccgcgttctatatcttcccaaagatcgatgtgaagaagttcaacattcattcggatgagcagttcgcccttgatctgttgcatgacaagcatatcctgatcagccatggtggtgcgttcaattggcaacagccggaccacttccgcgtagtctatctgcctcgcatgggcatgctgagggaaaccatcggtgagcttgccgatttcttcggtacatactatcaggactgatattgcaacggtccgaatagcaattggcccccaccacaatggatgggggccaattgctatctaccggatgaacggagcgtcagcgaatgagttcagccgttgacgcggtcgatgccggcctggacgtcggtgaggacggaatcccaggacttgatgaaggcggcaacgccatcggcttccagcttgtcggtgacggccttgaagtcgatacccagctcggcgagcttggccatgatggcgtgggactcttcgtaggtgcccttgatggtcggagcgccgttgccgtggtcggcgagagcgttcagggtcttctccggcatggtgttcacgatgaacggagcgacgagctcgtcaacgtagacgcaatcggagtaagccgggttcttggtgccggtggaagcccacagcggacgctgcttcttggcgcccttggcctcgagggcggcccaacgcggatcgttggcgaacttgttctcgaacagttcgtaagcgagacgagcgttggcgatggcggccttgccttcgagagccttggcctcgtcggagccgatctcctcgagctgcttgtcgacggcggtatccacacgggaaacgaagaaggaggcgacggaaccgatgtggttcagatcgtggccgttggcgtcagcctgggcgatgccctcgatgaaggcgtcgatgacctgctcgtagcgctcgagcgagaagatcagggtgacgttgacggagatgcccttggccagggtggcggtgattgccggcaggccttcgagggttgccggaatcttaatcatggcgttcggacggttgaccttctcccagagctcgacagcctgcttctcggtggcttcggtctcgtgagccagacgcggatccacctcgatggagacgcggccgtcaacgaaatcggtggcttcggcgacctcacggaagatgtcggtggcgttgcgcacgtcggtggtggtgagctcgcggatagcggtctcaacgtcaaccttgccgagttccttaagctgggcgtcgtacgggccgacctggctcagagccttctggaagatggacgggttggtggtgacgccaacgacgttcttgtccttgatgagctcctgcaggttgccggactcgatacgggtgcgggacaggtcgtccagccagatcgagacaccggagtcagaggtgcgctgagttgcttcagtcattgttgtttctccttgatacctatttggatcaaatcttgtgttgttcggtgaaaggggagggatacgggcttcgtatccctccccgatgcgtcacttggcggcttcgacttcggcgatggaggccttggcggcttccaccacatgctcggcggtgatgcccagatcgatcatgttctgagcgccatcgccctgcaggccgaactgctcgatggaaacgggcttgccgaaggagccaaggtacttgtaccacggcatggcaacgccggcttcgacggagacacgggccttgacggaggccggcagcacggcttccttgtactcggcgtcctgctcttcgaaccactcgagggacggcacggacacgacgcgggccttgacgccttcaccggccagagtcttggcggcggcaacggcccactgaacctcggaaccggtggccatgatgatgacatccggagtgccttcggtgtcgatgagcacgtaagcgcccttcttcacaccttccttggcctttgccgcggtctcggcgaggaccgggacaccctggcgggtcaggaccatggcggccgggagggtgttcttcttctcgaagaatgcacggtaggcttcggcggtctcataggcatcggccggacgaacgacctcgagctgcgggatggcacggaaggatgccagatgctcgatcggctggtgggtcgggccatcctcgccgacggcgacggagtcgtgggaccacacgtacaggttcgggatctccataagggcggccagacgcacggccgggcgctcatagtcggagaacatgaagaaagtgccgccgaacggacgggtgtgggagcccagcaggataccgttggtgatggtgcccatggtgaactcgcgcacgccgaagtgcagctgacgaccgtacttgttgcagttcggccactgcttggtggcgcactcctccggagcgaaggtggcggcacccttgaggtcggtcttgttggagccaccgaggtcggcggagccgccccagagttccggcatgacggcggcgatggcgttcagcacggagccggaagctccacgggtcgcgacacccttgccaacttcgaaggtagcctcgaggtcgtcgatggccttatcgaagccttccggaagctcgccggccttgatgcggtcgtacagggcggccttgtccgggttggccttgcgccatgcgtcgtacttttcgtcccattccttatgggcctcgagaccgcgctcggcgaccttgcgggcgtgagccagggcttcttcgtcgacgtggaaggattcttccggatcatagccgagcagcttcttgagaccggcgacggcctcggcgcccagcttggagccgtgggaggacggatcgttggtcttgcccggggtcggccatgcgatcagggtgtcgaccttgatgagcttcggctggttcggggcggcggcctgggccttggcgatggtctcggccagaccgtcgacgtcctccttgtaggagccgtcgggctggatgaagctgaactcatcggtgtaccagccgtaggcctggaagcgcttgagcacgtcttcggccagcaccaggttggtgtcgccttcgatctggatgcggttggcatcgaagatcacggtcaggttgcccagctgctggttggcggcgagggatgcggcttcgccggagatgccctcttcgatatcgccttcaccgcagatgacccagatgttgtgatcgaacggggattcaccttccggagcctgcggatcaagcagaccgcgctcgaagcgctgaccgtaggcaaagccgatggcggaggcgaagccctggcccagcggaccggtggtcatttcgatgccgggggtcaggccgtattccgggtgacccggggtgcgggtatcggcgccgccgcggaagttcttcaggtcgtccagggtcaggccgtagccggagaagtacagctgaacgtattgggtgagggaggcatggccgccggaaaggatgaagcggtcgcgaccttcccacttgggatcattcggatcgtgcttgatgaagtgctggtacagggtgtaggcgatgggcgccagggagacgggggaacccgggtggccgtgtcccgcacgctcaaccgcgtcggccgacaggaccttggccatcttgatggcgcgctcgtccagctcggtctccttgaattcggtcataggattactttccttccaattggtcgggccgcgtatccggcttgtgccgagcgcttgacgccctcacattgcgtatcccatagtagcgatgcgcgatgacgtagcagtgatattttggcgtgttttggtaagttgtgttctgttagcgttcacaatgaacatttccgtgcatttgcactgttcgcattgggaatgcgccggttatttgagaagaacggctgcggagacgcagcggggctgtactctcgaagcgaacgattagcactcccggccgaggagtgctaaaacaataggagtgtcgtaatgatgaggcggtgcgtttcgatcccgttcggccgtgccgcgcacactcatgtcttatataccaagggggcgcgcatgacgcagtcgagacgcatgctggtgttgcgtgccgtagtcgaggactatattcgctcgcaggaacccgttggatcgaccacgctgaccagagatcatgatctgggcgtgagttcggcgacggtgcgaaacgatatggccgcactggaggatgagggctatctgattcagccacacacttcggcgggcaggattccgacggaaaaggggtaccgttatttcgtggatcggctggcgaccgtcatgccgctatccgaggcgcagcgtcgaggcatcaacagctttctgtcgggatcggtcaaccttcaggacacgttgcagcgtgccgcacgtctgctggcacagatcaccgggcaggtggccgtggtcgccgcgccgtcgttgtccaaatcgatgctacggcatgttgaaatcgtgccggtctccgtcaatacgttgctggcggtggtcatcaccgacaccgggcgcgtcgcccagcatattctaaacgtcgccgaactgccggatatgaccgtgctcgctcatctggtcaatgagatcaatacgcaatgcgcaggggtctccctggcccagaccgccgactacgtacgccgtatggggccgcgtgatgcctatcgttccatcagcgccttgacggagacgctggcgcaggccttcgacgacatggcggatgatgagcgtgcgggtgaactgtacatggctggcacgtcgcggctggcgcatcagcataccgtcgccgatctggcgccgctgttcgacgcactggaggaacaggtcgtgctgatgaaattgatgagctcgttgagcgagaccgcgcaatctgccggggtgggcgtggccatcggttcggagactcatacgccgggactgctgcacgcttcggtggtcaccagtggctatggccgtacctccgccggcaatgcaggtggtatgggcactgacaatcgcagtgaaatcaacgatttcggcgacgaaattcagacggaacccgtcaccgaaccggtggcattcgtcggatccatcgggccgacgcacatggattacgtgactaccatggcggccgtcagagcggtcgcccgttacctgacggcgtttcttgcgcacgatgagcgccataccaacgactgaccccgccttatggcacaatggcacgcggaaccaatagggagaaagagcgactgtgacggattactacgaagtactgggcgttgaccgatctgccagtgatgatgagatcaaaaaggcctatcgcaagatgagccgcaaatatcatcccgatatcgcaggtccggagtttgaggacaaattcaaggaagtcaacaacgcgtacgaggtgttgtccgacccgcagaaacgacagatgtacgatgccggcgtggacccgaacgatccgaacggcggcgcaggaggcttcggaggcgccggtttcggggatatgggtgacttcctgaacatcttcaccggcggtgccttcggcggtggtgccggagccggcccgcgtccgcgtacccaacctggtcgagatgccttggccagtgtgaccatcgatttgaagacggccgtgttcggcgacaccgcgcatgtgagaatcaacaccttcggcctgtgtcaggaatgcgccggtacgggttgccagaaaggtacccagccgacgcaatgccccgaatgccatggcaagggctttgcgcagcgtgtagtcaggaccatgctcggccagatgatgaccaccgccccctgcgagcgttgcgagggacacggcaccgtcatcgaaaatccctgcccctcctgcctgggccatggtcgtgtgcgcaccacgcgcaatgtcggcgtctccattcccgcaggcatcggcaacaatacgcgtcttcgactcgccaatcagggcgaggttggcgagaacggcggtgtcgccggcgacttgtatgtcgatgtgcgcatctcgtcggatgatacgttcacccgtgacggtgacgacctgcattgctggattcaggtgcccatgagctgggccgtattggggcatgaccttgaaatcgacacgttcgacggaccgcaatccgtcagcgttccggccggatgccagccggaggataccgtgaccctgaagaatctcggcatcacgcatatgaacggcaacggtgaccgtggcgaccttgtggcgcatgtcgtggtgcagattccgaccaagctcagcgacgacgaacgttccctgatggaacagttcgcagccagccacgatgctggcgcatcccatgtgccgcagagctctcgtccgaccgtgggcgcgaagaagggcttcttctccaagctcaaggatgcgttgcgctagacgatcgctccgcttgagacccacacatcgtcagggtgtttcgaatcatatgcttcgaaacaccctttttcgttagttcgtcatcgcacggctaccgcagcagggcacggcacatggcgcgatattggctgacatatccgccgccgaaaaagacgcaatgcccggcgatcggatacagctgccataatgtggtacgttcctgccaacccgccttgagcgggtgtaccgactggtagccgtccagaatttcggtgagataggacatgccgaaaagattgagcatggcgagatcctcttcgcgatggccgccatgcgcggcgggatcgatcagcacggcttcgacggaaccggaatcggcggtccacatcacgttgccactccacaggtcaccatgtacgcgtgcgggcttatccgcggccgcacgaccgagaatctccgggagcgcctgaatcacctcctcggtcaggtccatatcggcatcggtgagctctcgtcgacgaatgccaagttcgaccatcgggcgaagacggccttccgccagataagtggccggatcggtccacgtaccgcaatccataggcaccggatcctgcagcggtccgaaatagcaggtacccatgtaaccggcgggagccgaaccgaagaactccgcaccggaatcatgcatgcgggccagtgcggcgccgaaatcgtaagcggccttgggagtgggggaacaggagttcacgcgttcgatgtcaagaaagtccctgccccactcatagacctcgaccacgcgggggccaccctgggcgtgcgctgcgccaagccattgaaggccacgaccttcgcattcgaagaagccgtccgggctgaatgccctgctcttgcgatatttctccatgtcgtgctccttggtaccacattgcttgtgattgacggttcccattgtgtgcgcggattgagacaaccctgtgaaatcgatgagaaatttaggcaccattcgctacgctggtgctcggaaaacagacgaacacataaagagggttcatgaatttcttccaagcgattttcctaggactggtgcaggcattgaccgaatacctgccggtttcctccagcgcgcatatccgcatcgtcggtgatctgatgttggggtccgaccccggcgcggccttcaccgccattatccagatcggtactgaactggccgtaatcctgtacttccgccgcgacatcattcgtattcttggcgcctggtttggctccctgttcggcaaagagggcaaggacttcaagagccgtatgggcgcgcataaccgtgacacccagatgggctggttcatcatccttggcaccatgccgatcctcatcgccggcgtgttgttcaaacatgtcattgaaacttcactgcgcaacctgtggatcaccgtgaccgtgctggcactgttcggcgtgctgctgtgggtggtcgatgcccgcgccaagcagatcaaaaccatggaggagatgacctggaaggacgcactggtcttcggcatcggtcagatgctcgccctgattcccggcgtttcccgttccggaggcaccatcaccttcggccgcgccatgggctatacccgtgaggccgccgtgcgcgtgagcttcctgatggccattccggccgtattcggtgcgggtattctcgaagccgtctccgcagtcaaggatgtggctgcgggtgatgcgggcatgttccccggctggggtgccaccattgccgccaccatcgtggcctttgtcgtcggctatgtggtgatcatcggcttcctgaagttcgtgtccaccttctcatacaaggccttcgccatctaccgcattgcgcttgccgtggttgtggcgttgctgctgatctgcggcgtcatctccccgttggagatggccgcagcctgatcgtaccgcgctacgattctcggatacgggtgggtccctgccgtcctaacgatggcagggacccacccgtatccgtatccttcgccattacgaatggcgaatcagtgttcggcgaaaggctgattcctgagaaaagcctcggcctcctgaatcagctgctcgcatgcgggagtgccgttcgatgcgatttcccgggctttgacgttgagatcgtattcgcgttcaagttgtctgatgtaatcaccggtatgcatgttttcgaccatgtcatcggcttctttgcgccattgcatggccttattggcgagttctccctcattgaggggttgtttcagcagaatggacagcgcgtgaaccagctccaacgtgccctgcatgcattcgacgttattgaaatattgcggcactgatacccacattgacgtggtggagaaaccgttgtcggcggcgatcgcgtcgaggatgttgggaatgccgatcgggccattgtacttcttgtcgagctcgcattcgcagtcacccttggagatgtccaacggaagaggtctggtatgcggacagtcggcgaacatggaacctagggtgacgatttcgttcacgtcataatcctcggctatgcgcagcgtcttccggcaatattcctcccaccggtagttcggttccggagctatttgcgcgagaaagtgcgtctcaggggaaatggtgatgtcgtaaaaggtggtttgcggccagatgatacgcctgcggccttgtaccgaacagatcatcggacgggcgacctgatagtcgtagaaaccttcgtcgttgatatgccggatttcctgcgaatcatatcgtgagaccaggtgtcgaatgacgttcgtagccgcttggcatgcatcgttccatccctcgaatgcggcaagcattactgtcttaggcattgttggctccttcacacatagcattaatgtagcgcgaaatcgtggggtgacgaaatgcttatgccatcggtgaatagcctgaaatgcaaggatttgcgattcttgatcatgccgtgaagggtggtattagggatagcgggtttcggcatacgacacgctgacttgcaaatcacacggatgtggttatagtagatactcgtgctcaggcagtgatactgccggtaacatgcggacatagcttagttggtaaagcgcaaccttgccaaggttgagaccgcgggttcgagtcccgttgtccgctcgaaggttccgaattgatgtcaacctttatggtgggttagccaagcggttaggcagcggcctgcaaagccgtatagacgagttcgactctcgtacccacctctcatgaaacagaatcgtatgttctgcggaatggtatgacccgggcggttggcgcagaggtagcgcacttccctgacacggaaggggtcacaagttcgaatcttgtatcgcccactggagtttgactccatataaaccaacatgggtgattggcgcagcggctagcgcacttccttcacacggaaggggtcataggttcgattcctatatcacccaccatgaagccgtccgtatggacggtttttttgttattggattgcccgaggcccgtgacggggcgtgaccatacggcagcggcgatgccgacgcaggcctccacgtcgccgcgagtctgtggaacatggcggtcaactgatatctggataacgagccagttttgcgcaatctcaagaataaccgatgaaaatacaagaaatcgaacgaggagaccatgactttcactgagcgggcctctatagtggacaacgtacacaacagaagatagcaggacgcagggtgcgtcacagaataacagcaagtaaggaaacaacatgaacgacaacaagattttctccgccatcaagcgcggcttcgaaatcaacggtctgatggcggtcaacactccgtccgcaggcaaggctctgcacgagctgctcaacaaccgctgatcaggccccgcgagcaaagcttcgcgacgcaatcgctatcgttaatcgcaaacaacagtctttataggaattgaggaatacaacatgaataagaacaagattttctccgccatcaagcgcggcttcgaaatcaacggcatcaacaccctgtccatggccgcgggctctccgtcggtcaacaaggctctgcaggagatgctggatcagcgctgaaactaagcgcaccacctgttaacaaacgcctggcggcatattttccatgtcgtcaggcgttttttcatggtttgccatggttggtgacattagaatggacgattatgaacgaatcgttgaatctcaaccagcctgtcaacgccatggggccgaatgaattggaggcctatgccgcattgggagacagacagcatgatgaggcgaacaaggagctggaacgccgttggcgtagctatgacgatatgctgccacatgacgaattcgtgtcgatcatagacaaagcccacgcatgaaagcagtgtatgattcgtgaccatggccaagacaataccggctatatgcaaagggaatgtatagaatggcgaatatgactgatccgattccaagcgcaggcgaaacgaccatcatcggtcttcctgcaattactgtaccggtaacctccaccggagaccgtcctttgacgaaggaggacctcgatacgatcatgcgtctgtccgatggcacggcgctgttgatctcgactaggggagcggtttccggttcgcgttatctgctcgacgaagatgagattaccgtgggacgtgatccgcgtgcggacattctgttggatgactccacggtttcgcgttcccatgccgtgttccgcagggtcaatggtgcatattccgtcattgacgccggtagtctgaatggcacatacgtaaatcgtcaacgtgtcgatcagaagcagctgaacaatggcgacgagattatgatcggcaagttccgtctggtctatttcaccaactccgccgtcattgcctgatattccgcatgatgcgggatagactgtgaacagcggcatcgcgcccatgggcttcgtatgaatctcatgggcgtagcagttcatagggagaatacgatgagtgatgcggagtcaacaatgcagttgcatctgcgcgcgccccaagcggtgcagggggagttgtttcctgcaaccgacacgcagaacgttacacgaggctatcgcggtaccgtggcgtcgaaagttgccggcatcacctatagacagcttgattattgggctcgtaagcagatcgtagaaccatcgatcacgccttcgcatggatccggttcacggcgtctgtattcattcaaggatgtggtgattctggcggtctccaaaaaactgttggatgccggcatcaatctgcagaacgtgaccacggccattggattcctgacacagcgtacgatcgagcagctggaaggcatcaccatcatgtgtgacggtcaggaagtgcatgaatgcaccaccagcgaacagatgatcgaactgttgcaaagcggcaaggcgatattcggtgtgtccgtaggctcgttatggcgtcaaatcaagaatgcgctggatcatgaggaatatgtcgacctgacgaaactgcagaccagtacggatggcaagcgaccgattgatgacatcgcggccatgcggatgcggaaaaaacttgaagcgcagcgtaaggccagggccgccagtggcagataggaattgccgggagtcgtgtaagaccgcgtgtgtaggatggcatcctaggcgatcgaaagttaatggaataatcatcaggggagtgacgcatgctcgatattctgccggtcttgctttgggtcatcgccgccgtcattgcagtgaacatatgttcgatctgttcgattcgtggaggctttttttcgcataaggaacgtccggtatatccggtgcgatggtcgatcatcggattgcacttcgcgtcattggtgctcggagcattgccgtatccgctgtattccttgttcgaggaaagtatgtcgatgcgattccggcgtttctacgagcatatgggatggccgtcggcggtggtcatgatcgtgctgatagccgccgagctggtgttcatgtacctacaggccagaaaaggcatggcgagcgaaatggaacgcaaactcaaccggatcggcgagtctgacaacgagtccgaatgatgatgactacgaccgtgaggccgaaatcgaaaaacgcccggttatgccaggcgaagcccaaaaggggcgggccgatataaccgggcggcgttatgtcagggcagacggaaattattttctgacataacgtacattatcgggagtatgagttgaagtattcctcaacggcctgcgccaactcgtccacggtatcgatgatgcgatacacgccatgctcctgcagttctccggattcagcgtaaccccaaccgcatcccaagcaatccaaaccgcatgccttggcgccgtcggcatcggtccagcgatcgccgaccatcaaggctttgtctccggcggattcgtcgtaaccgatatgctcgaacgcccaacggattacctgatccttgtcgagacgcgaattgtccttgctggctccataaatgccatcgaccatggtgtcgagatggaaatgctcgcaaatcggaatgcactggtactgcggcttgcagctggcgataatcagacgatatccgtccgcacgtagcctggcaagctgttcgggaatgcctttgtagatggtgttgttgagacgtcccggcactttctgccctgggttgttgggatcatcgaatacggcttcgtcagcgtagtatttgcgatagacggtaacggccttatcgagttcgtcgtccggaacgccgttacgttgcatggattcgctgatggccgggccgatgaaacgttgcagctcgtcggcatcgggaactggatatcccatttcttggaaggccttgaccacgcatccgataatgcccggatcggatttggtcagcgtgccgtcgagatcgagcagtacgacttttttcggatgttcagacatgaggtttgttctcctctgattccttgatttcatgtgtgataccggaaataattatgcccggtcgttatgaccgggcaagatgttcatgtgttgttcagcttcaggtcactcgtaatccgggaaccagccgtcacgatgcatctgcagccgcttctccaacagggtcttgagctcgtcctcgctacgacgttccaacagcatatcccagtgggtacgggtcggtttgctgatttcatcggcctgacgatcctcatcgccttcacggtgcgccacagcaccgcaacggcactcccattcgtcaggcacttcggcgccttcggcgaatggcagaatggttcggtgacctttcggacatacgtatgcgatgtcgttgcgtgccgcgaaatccacgttgtcatcggattccagcgattttgcgccgatgctcatgcctcgcagactgcgttctgccatttgcctttgcctccttggattgttgctctgtctacgctacagaacagttcggacgtgtcgattattccaacaaccggtatgcaaacgggcgtcagtcgacccctgaatacgcgacgacgccacgatttacggcttccatcgcctgtttggccaccagcgccaacgttccggcacgtttcgtcagatatggttcggcgacggcgatttgctgaagtacatcggccaagcgcttgcaattacgcacgaaatcgcctccggtcagatcggtgccgtacaacacgcgcgacagactttcaccctgagcccattcgtaaacgatgtcagcgatgccgaaatcaagctgccggggctcttcaagggcatggtcctcgcacatcatggcgatcttcgcgtgtacgccgcgcaactgtgccgcgcagacggcaacgttgccttggatgccaccggggtaacggcggggctctcccccgcttcccccacgcgcttcatagatgagcgacgacaggacgctggccagttccggcgcgtcaagcccgtcgaaggctccttcgtcgatcgcttgcgccaacaccagatcaagttcgctgtacagatgacgcaacagttggccgcgctcggtcagtaggtaatccgcatgccgtgatttgtccgaatcacgttccaaataaccaagttcctccaatacggtgcaaatatggtcgaactgccgtgccaccgatccggtgcgcgattcataacgatgccgcacccgttccagttcgcgcatttcacgcgaccaacgatgcccccatttgagatgctgctgcagatcagtgcatttacggcatggatgattgcgatccaattcacgcattgccgcgattttttcgtcaagatccatgaacgcctggctgcgttcgctctgcgtgcggaaaacctcatgcttgagtcggcgccgttcattcttttccagctcgcttagccgcatacgcagacgcatgaaatcagcaaaatcgccgaattcacaggtaaaggcatgttcgtacccctcaagagccttcttcaacgtatccatctgggcttcgagttgccatgccgattcattggcctcccattgcgcgaatgaatggtcaagggtgatgcgggccgtttcatagtcactggaattcagcaggttgacggccatgttgaaagtcggacggaagctggaatgcaacgggtacacacgtttgctggacaatgcggcggcggtggccggcacgaaaccgcgatggtcgacaaccacggcatggccgatggtgtcgatgccacgacgtcccgcacgtccggtcagctgggtgaactcccccggcgtaagcccgacgtgcccggtgccgtcgtatttctcaagtttctcgaccactacgcaacgcgccggcatattgattcccaaagccagtgtctccgtggcgaacaccactttgacaagaccttcctcgaacaaacgttcgacaatctgacggaacaaggcgatcatgccggcatgatgcggtgcaaatccttcctccaaggcaaagcggaactgcgaaaaatgcagagccttcaaatcctcttggctgagctgtccatcgatcatctcatcgacaatgcgccgaatgcggcgcacctcaccgttgctggtcagctccagaccggcgttgatgcactgttcgacggcctggtcacagccattacgggagaagatgaaatagatgccgggcagcatatcgagaaagttcagctcgtccactacggcccagcgtttgggagtatgccgctccaccttatgtgaggattcccggtcatgccacgggcccttccccttgcccttacgtctctccggacgttgcgccctttgcctgcgtgctgcctgacgatcgagctgatcaaggcggctcagcagttgcgcattgagcttgactgtctgatcaccatgcgcatcacgacggtacagatcaatgagctccggttcggtgcggtcatccgcctgcacaagtacatgttgctccaacggaacaggacgcttttccgaaacgatcagtttggtgtcccctcgcaccgagacgatccaattggagaagtcctccacattcgacaccgtggcggaaagaccgatgattttcacgctttgcggcagatggatgatcacttcttcccataccggtccacggaatcggtccgcaagatagtgcacctcatcgagaatcacgtaacgcaacgcttcaagcgtcatggagtgttcgtacaacatgttgcgcagcacttcggtggtcatgaccacgatatcggcctcggaattgatggacgtatcgccggtaagcaggcccacccgatcctgcccatactgatccaccaaatcatgatatttctggttgctcagtgctttgatcggcgtggtgtagaacgccttgacattacgttcctgcgccagatagatggcgaaatcggcaacgacggtcttgcccgcacccgtcggggcggcaaccagcacattgctgtcggcttccagcgcctcattggcttccatctggaaatcgtcaagctcgaatggcatggattgcgcaaatcgcgtagcggccataccctgcttgcgctgagtctgcttgaacatggcgtagcgctgtgacggtgacggttccacggtcgcattggtgctggtgacatccatggaaccgttacgccggtgacgatgatgagtcatgattccttaagggtattgttcagtcgttgaaatgcttccagcgtctccactgagcggcatgacgctcgcgtttcgcctcacgacgttcgatgacctgggcatgggcgtctacatagcgatcggcggcgtctcgcaacggtctggtgaagaacggtgccgaattcgcctgttcaacgggcaacgtgtcccccatggctgcgaaacgttctccggcgcggcttcccacttgcgcaatgtccttgaacgcatgatagccgtgcaacaccacgtagatgcagccggcgacaatcatcgacaacatgaacagggcgagcagaagccaaatccaccaaggcatgtcgctctcctatcggtcttcgctctcatgatcgctgacgctaagctcatgctgggctcgcgcgatgatcatcgtacgcagggtttccggcgcgaccgcggtgatatggcgagcgtgtgaaatgcagaaagcgacataccaggagtcggaagagacaatcagatgcaccttcttgccatcgccacattgctcgacggtggcaccgggaagccgatcgatgaacggcagatcggcttggttggtgatgaacacggccgcggtgccattatcaaagctccacttgcgcaactcggacaccggcacgtcgggaatgtcgatcttttcgaccggctccaccagttcggccttctcgatacgggagatgcgcaacacctgccagatacgaggtttgccgttggccttgttgatcgtagtgtctttcttgacgaatcgctgcctgtccttcggtgcggcattggccacgtcggtccataccgcaacgaagtacactccttcatcgacgaagatcttatcgggtgcgacaagcttacgacgagtgttccccgcgccatcggtgtactccatgtcaagaagggctccctttgagatggcgctcttgacgatggagaagttacgcggttccatctcatagccggtcagactgagccaaggcatctgaccgggttcaacatgctgacgcaggcgatgatacagggattcagcttggccgcgctgcttatccggcaacagcggcgaatgggccagatagcttaccgaagcggtcagcatgctcagatattgctgggagatgccggcgagacgctccagaccgagcgaattcgtggcggacacgatgccttcggcgtccagcagcgaccagtcgatgtcgaagaattggctacccgccatctcgccatcgtccgaaaccgtggtaagagtattgatgtccttatggatgacgttaacgtacttcttcatctcatcgtcggacttcggcttgccgatgaaacgttcggccagctcctccaacgaatactcctcgccaagatgcgccgaaaggaacagcatcagacgcagtctgcgatcgacctcgctaccggtctggaacgaggaattcttctttgggcgccccttgccctcttcggaatcgtcatcatccgtgttgttacgattgatttccggtgagatgacggcggaacggttgttgccagcggactcatcggccggttggaactgtgtcgcggcgttcaaacgccgattgaacgcgtcaacggcctcttgagggctgatgatgcatgcgcccggatggctgagcacgaacatggccaaatcgtccgaatcggtgtaggcgacattgagatgttcaccgtcgacatccacggttgcggcgaagcgacgctgatcgaccaccttgacgagttcgtcgggaatggactgggtgccaaggcccggcgcgatggaatccagtccaagaccaggaatcggggtctgaggcacacgcggcgccgtacgggaggtatgttgcacctgttgcacgggggccgaggagatcgacatggaacgagccagataattcgctgcggcgagaacgggaagatcctcctgcgcaaagcgcagtcgaacacggggctcatcgcccagttgcagacgatatgaggcgaaatcctggccctcagacttcgaagaatactccggttggcgggattcgatggcgatgcccatggctgccagcttggcgcgatcgcgctggaattgcttggcaaacgccgccttcgccgcctgatcggccagttcgccataggaatcggcgtacgccttcacgcgctgggcgatctggcgggaggtaagccattgcgggaaagctgaagacagcacagccaatacatcgagctcgtgcttgccccacttgtcggaaaaacgccgccttccgttactgccctctgccattagtcctcacgtctcgttaacgtttcgttgtaagtgtgcggcttaatgccacacctcattccatgatagagggttttcgcgagtatcgcgttcaatttacgaaaaaacggtgtttttcgtgttgggcatagcttcgtttcagacccaatcatccggctcgacgccttgcggcccaacgtattcaccgtttggcacataacttggctcatcctgatcgggaagccgcgcgtcgccgaacatcatgacatccctgccgaacgtccagtccccctcgatggttaccgaattggcggcggcaagcgacggcacggaatacgggaaccgcgtgtcgaaatcatggatgttcttgtaatagcgtgcgtcgagatgcaccgtggggaaaatgtagttgccatcctccatctcatactgatcggtcagatggaaacgatcggaacgcatgatgaacagatcatccgtggtcttgaccggcaggaagcgcatacggtccacacatacgcaggttgcaccgtcgaatagcgtgacggccgcacccatggccgtttccagctgaatgaccggctcgctggccgaatcggtgggatcaacggtcttcttgttgcgaatcaccggcagaggcaatacgccatcgtacgcggcaagcttggctttcaacgcatcgatgcgcacccagatgctgttggtgttgaagtacggatgcttgtcgatgttctgggcgtcatccttgtcgtcaggatgcacctggctcatctcgcgcaacatgagacgtccggtcaccttatcgcgtacgatatggccgcccttgcggtcagccggcgtgcgtttggcgacctcgatcatgaatggtgcgcccgtgttctcgaagtgttgggcgagcgtacgggacggtcgcgcacccagattgtcggagttggaaatgaacagatacttgaagccccgctcctcaagcctgtcgagcaggccggactcccaaatggtggagaacaggtctccatgccccggcgggcaccactcgagttcgggattcgaggggaaggaaaccggaagtccggttttggcactgatcttcggctcctgatgttggatgatttccatcggaatctcgtcctgatggaattttttgttggaacgcagcaccttcatggtgtcgtcggacgtacggaaggaattcatcagggtgagcggaagttctacgcccagacgagtgcgggcggtaagcacctgaccgatgatgatgtcgatgaaacgcatctggcgcgccttatggcggcgtacgggcaacaacgacttggcgcaatccaggcccatggaggtgccaagaccgccgttcagcttcaggaaagcggtctgtgcgaaggcgtcgaccgccttgtcatggttgatggtctcgtacacatcatggaaacttggcacgccggtaagtggctcgacctcttcctcacgaatccaactgctggcctcctcgttccgccagacctcgtataggcgtttgaactgggcaacggccatatctgtcattccgtgctcacgcatctttgcggcggactgttcgaatatgtcctcagtcaatgtggctccctttcgcatcgggcatcggtctagtaacaacagtgtagtcatcttacgacattctcggttcatgatgccggttgaacatgcaacggggggcgaattcatcacaaatgccacacgacgacatcagcgcgacacgttgcgtttgaaaatcatcatgagatatgctagatttctcattcggtgcctcgcaccgttcggaccatagcgcagtttggtagcgcacttgactgggggtcaaggggtcgcgggttcaaatcccgctggtccgaccaaaaaccccggaatttcaacggtttcggggttctttcatgcgcaaacttccgtacacatacgtaaccgtttacgggtgtttttcagagtcctttcgtgttcgtagacaacggcatcggcaacataatccatgtccatgaatcgttcctgatagaataaaatccgaaaacttcgggtttttccgtgcccggaagagaatatctgcaatgagaggtgattgatttggggccgaaggagaggcagccgcaattcgatgacatcgacgatctggcacatgttttcgacgaacacgtccaacaggaagacgaatggaagattcgattgcccaaggagcttggcatcgaggctcgcgaacgggcgaggcatgacggcatcacgctcaccgaactgacccgcagagccttggaacgggatgatctcaatgcgggtgacgacaaagtacttttgggacgtatgccgaagaacggcgatgatcgcgagcaattgggcgatgagtggaagatccgactcccctatgatctggggctgcgtgcgcgacgtcgcgccgaacgggatgccatctcattaagttcgttggcgcgtcgtgccgtgagcggatacttggaatctcgcgatgaggaggaaacgccgttgttctgaccggagaacagcatgacggtatgaggaagttcgcatacaacatggttgtccgcctcatgtgaggcggacaaccattcgtttacttgcgctttttcttttcgcgaatgttcaccgaaatctggacgggtgagccatcgaaaccgaactcctcacgcagacagcgttcgatatatcgacgatagccatgctccaagaagccggtggcaaaaatcacaaagcgaggcgggcgcgtcgaagcctgcgtggcgaacaggatacgcggctgcttgccaccacgcaacggatgtggatgcgcggcttggatcttgcccaaaaacgcgttgagcttaccggtcggaatacgcttgtcccaagattgcaacgcaccgcgcatggcattggcaagacggttggtatgccaaccggtcttggccgacaggtttacgcgttgcgcccaagtcacacggtcgaattcggtcttccacaggcgttccatgcgctgacggtcgaattcatccataagatcccacttgttgaacacgagcacgatggcgcggcccgcatccacagcctgactcatgaccttcagatcctgatcggaaatcggttgcgaagcatcgaacaataccaacgcgagttcggatcgttcgatggcggcctgcgtgcgcagtgacgagaaatactcggcaccggacagcttgtgcagacggcgcttgatgccggcggtatcgatgaacagccaatcctcgccatccacggtcacgacttcatcaaccgggtcacgggtggttccggccaaatcattgaccacggaacgttcctcatgtgccaactggttgagcagcgaagatttgccgacgttcgggcgaccgaccaaagccacccgacgcaaatgcgacggcgtaaggaatccggaggtctttttcgccttcttcaacgactccaatgcgacatcgagcaattcgccgataccgcgcccatgcatggcggagatgccatacggctcgcccagacccatcttccagaattcggcggtcagatattcgctttcgcgatcgtccaccttattcaccgccaatgtcaccggtttgccggaggcacgtagcatcttcacgatacgttcgtcagtggaggtgagtcccacctgcccgtcgacaacgagtactacggcgtcggccaactgcacggccatctgcgcctgcgaggcgatggcggattcgatgccttcaacgtcagcttcccagccgccggtatcgaccaatttgaaatcggtgccagcccattctgcatcgtagcttacgcgatcgcgggtcacgcccggcgtgtcctccaccactgccgcacgacgaccgagaatacggttcaccagtgtggatttgcccacgttcggacggccgaccactgccagcacacctacaggcttcggaccggcctgaagatcgcctccaacgaacgaagagccgtcaatcagaccttcgtcgccctcatccagctcataatcgtccaggttggcaacatattggcggtattcctgctcctcgatggcatcgtcaacaatgcgcacgagcacgtccaacgtctcgctgaactccaagtcggaattgtctacggtgagcacgccttcagccgcggaagtgaaattagtgaccttggaatcggccttgtcccgtgccgcgacgttttcgttgccaactccggaagcggactgtcctgcgcgacgggcttgacgcacctcttcacgagcggtgagcaggattctcacttctgcgtcgggggccaccacggtggtgatgtcacgaccttcggcgaccacgccgagtcctctcgagaaggagtccgccgaagcttcgcgtgcgatataggcacgttgcgccgcaatcagcacatggcgtaccggaataacattggacaccttggaaacatgggatgatacctcagaggaacgaatttcggcactgatatcaacgccatccgccgtgaccttcggattatccgggtcgacactgatgtcgaaatgcccttcagtaaagaactcccctacggtttcggtgatgacctgttcgtccacgatgtcggcatccagatcaatgcccttatgcagacaccaccaagtgcaggcacggtacatggcgccggtgtcgagatatgcgaagccgtaatatttggccaaggctttggaagtagaggatttgcccactcccgcaggaccatcgatagctacacggatcacagtcccaccgccttcgacagggaacgcacctcgacctgcgaaagcacccggtacgtaccggacttcaaatcgccaagcttgatcggaccgatctgcgtacggaccaaacgcctgaccgggaagccgattgagccgaagatacgacgtacgatgcggttcttgccggaatgcagcaccactttcaccaatgtgctgtcacggctggaatcgagaatggcgcaacgatcgagtttgatccacccgtcgtcgagctgcacgccggtagtgaccagacggcggcagaccgtgccgctgatacgaccgtcgagggtagcgatgtaggtcttctcgacctcatacttggggtgcatgacatgctgactgagttcgccgtcgttcgtcatgagaatcagaccctcggagtcgtaatccagacgccccatgtggaagatgcgctcgtacttgtcgccgacgatatcgcgcagggtgtaacgtcccttcgggtcatccatggcgctcagcacacgcttcggcttgttcagggcgagtgtgacatgattgggattcacgcgaacgcgggaaccatccactcgaacctcttggtgcttcggatcgactcgggtgccgagctcggtgatgagttcaccgtcgatctcgacgcgtccgtcggtgatgatttcctcgcatttgcggcgggatccgaaacctgcctgtgcgagcagcttctgcaggcggataccttcattgttgttatcgtgcgccttggcggcgcgggaatatgcgtttggcatcgttctcccaacgtggccggataataatcggatttcggtgccatgcaccgctcttgcaggagctgctggtactatggcagtcgtttggtaggacctttgcgtgcctacaaccaattgactatatgacagaggaaagactatgacagctgctgaggcaatgccagtacccgaggaatccaaaaaacaaccgttggccgtacgcatgggcgccgagctggtgggaagcttcttcatctgcttcgccatctatacgatctgcacgctcgatgccattgtttccaacctgaacatggcgttcatcgcattgatgactggtgcggcatacgccgtgatgaccttggttttcggcaagatttccggtggacaattcaatcccgccgtttccattgccgcgatgctgactggcaaaacgcacgtgcttgacggcattctctatatcattgcccagttgctgggcggtatcggtgccggcgcggccctccgttttctgctgccgacatccgaacaggttccttttaaaagctggctgtcgttggccgtcaacggtttcgacaaagcctccatatcctactccaccctgtccagtctcggtctgagtttcggcatcaccctggccgtcgtcgtcgagctgatcgcaggtctgatcattgtcgccaccgccatgcgtggcatgggtgagcgtggtgcatccaacaccaagcatgccattgccatgggcttggcctatgcggtgggaaccaccatcacctatccggtgacgggagccgctttgaatccggcacgagccaccggtattgcgatcttcgctcaaaatcaaggtcttaacgaggaaccgctgcagcagctgtgggtgttctggatctgtccggttctcgctgcagccgtcgtggctctggtaatcatcgtctttaccatgatgctctccccgaacaagaagaacgccaaggccgatgaaggcgatgacgctcagggagaggaatcatccgaaaccgaggaagacctacatgccgacggggaacaggatgagcaggacaagcagtccgattcccagagcgatgccgatgaaggcatcgaaaacaactgaccgcactttccacggactgcgttcgcgcaataccagccgaaccagtcccgtgatcagagccgtcaccgcgataaccacggtggcggcttttgtgtacccgagaaacgccgacaatgcggcaaccgccacgctggctgccaccagccactcgaaccaaggcttgccctcgtgatcttcggaaacgtaaggatgcttcatcgaccggtgcaccttcctcgatgttcataaacgtagcgcagcaatcataacaaagtgtggcgtccgtcgtcttcatgaccacggacgccacacgctgtcttcatcagagagtcctgagaggttcctatcagtggaagaaatggcgggtgccggtcacatacatggtgacattggccttacgagccgcttcgaacacctcttcgtcacggatggatcctcctggctgcacgatggccttgacccctgcattgatcaggatctcggcaccatcggcgaacgggaagaacgcatcggatgcggctactgcgcccttggtgcgattggccccatcagccagcgtgttggcgcgttcgaccgacaggttggcggaatccacacgattgacctgtcccatgccgatgccgacggtcgcctggtcgtgggcaatcagaatggcgttcgacttgacgcaacgaatggctcgccatgcgaagaccagatccttgacggtttcggcgtcggccggttcgcccgacaccagcttccaagcatccggatcgtcgccagaggcgtcgatgagatccgtggactgcaccagcagacctccgtcgatctggcggaactgggtcttggacttcggcggctcggcgaccttgaggatacgcaggttcttcttcttggtctgcagcagttcaagcgcctgcggatcgtaatccggagcgacgatgacttcggtgaagatcggacggacgctttcggccatttcgagggtgaccttgctatttgccgcgatgacaccgccataggcactcatcggatcgcatgcatgggccttcttatgagcctgtgcaacggtggcgccgacggccagaccgcacgggttgttgtgcttgaccacggcgacggcaatctgtggggcgaaatcccaaacggcacgccaggcggcgtcggcatcgacgtagttgttgtagctcatcggcttgccaccgagctgttcggcatgtgcgaagccattctggttcaacggatcaagatacagagctgcttgctgatgaggattctcaccataacgcagcacatgggcccgatcccaggtacgagtgaaggctgccgggaacttgagctcatccaccggagtctcatcctctgcgaccggctgttcgacggaagtcggcttcggacaatgcttggaggtccattcgttgatggtcgcatcataagcggcggtatgtgcaaacgccttgccggcaagccaacgacgctcttcaagcgagaagccctcgccgtttgcgatgcgagcggctaccagagcgtaatccttcggatcggtgacaatggcgacggtggcgctgtttttggcggcgccgcgcaccatggaggggccgccgatatcgattttctcgatggtggcggcttcatcggctccggagcgcacggtgtcggcgaacggatacaggttcaccaccaccagatcgaaaggcttgatgccgaaccgttccagctgggccgcatggtcggcattggtcatgtccgcgaggatgccggcatgaatatgcggatcgagggtcttgacacgaccgtcgaggcattccggaaaaccggtgatctcggatacctcggtcaccttgacacccagctcggcaagacgcttggcggtggaaccggtggagaccacctcggtacctgccttgatgaacgcctcggcgagtacctcgatgccttccttatggaagacggataccagagcccgtcgtatcggtcgattcgttgttgtcaccctgctcctccttgttgttgatggtcgaattcaccgtgcggggaacgacggtggattcacgcttgatggtattcggctcagaggacgcgcctcttgcctcacggacacgccttatgagccagcgtatcccgaaaacagcagccataccaaccaatatgatgagccatgccgagaacagacccaatgcggttggctgaccgaccttgcgagtggatgcaatcacctgcacgccgatgtgcgcgagatgcttcgttcccaaggctccgtttgaaagtgcgaatagcatgctggacaatacggcgaccaaggcgctggcaatacagaatgcgcctgcagggtaggcgaatccggcaatcaggcggctgacgtcaattggctgatccggtttgttgatccgtacggcaaagccgcgatcgaacagcatgactgccaatcctgcaagcagtcccgtcacgaatggaatgcatagcagggcgatacggatccacggcgtggatacggcctgtggaagtatgccgaatgccggcaaaccgggcaacgcactcccctggccactccacatggtgaaggatgcgaggtcgcctatggcgaaaccggaaccgaatagccatgatacggcccaaatcatgacattgggcagccaggcgatgaccgcgacggtcgtgagtatgcgtgaaccggtttgcatgccggaaagctcatagagtttcaccaccgcggattggttcgcgaagcaccagtacagcacggcgaccaatcccgcaataagatagatgcccgtcaacagcatgcccaggcccgtgccaattgacagggtcctgcgtaccggtgcggagacatgcgtccgcaccttctccaataacgtactcgtcagtttgcttcgtgggattgcggcgacggcatatcccacgatgaacaccagcgccgatttccacatcacaccgggcaactggtccagtaacgtcacttccacgctatgggcgaagaagacgttcatcagctcccagaacaccaatccggaaacaaaccctctgatatcggtaccgaatcgtgtagcgaaagaggcgatcagcgcaatcaacagcactgtcagcagcagaggaagtattgtcagcgtaatcgcaccggcttggaagccgatgccctggctgagcaggacaaccgcctcagtcagaggtacggagagggcggaaaggttatctccgccctcctccatggagatgaccagaagcatcagcgcaatgtagcaaccgagggcaacggcatagacaatcatggacgttgcggcgacggcaagccctttcaaccaatacttcaggtgagtcatcatagcgagttggccgcaagcacctctcgcatgatttccgcagtttgtcctggagtacgaccgacacggataccgacggcttccagcgcattcttcttatcctgcgcggtgcctttgcccccggagacgatggcgcccgcatggcccatctgcttgccttccggtgcggtgaaacccgcgatgtaagcgacaaccggcttggtcatgtgttcggatgcccacctggcggcatcctgttcggcgctgcctccgatttcgccgatcatgacgactgccttggtggcctcgtcattctcgaaggcttccaaagcctcctgcaaggtggtgccgacaatcggatcgccacctgcaccaaggcaggcggtaaacccgatatcggacagttcacccatcagttggtaggtcagtgtgccggacttggagaccagaccgagtggcccacgagagacgatgccgtccggaatgatgccgagattgcaaccgttggcatcttcgttcgacggcagcgtgagcagacccgggcagttcgggcctacgatgcgtacgcccttgcgcaaggcaagctcgacgaagtaggcgctgtcagcgaccggaatgccttcggtaatgaccacgatcagctcgatgccggcttcgatggcctcgaccacggcatccttggcgaaacgaggcggaacaaagaccacgctggccttggcgccggtggcttccttggcttcggcgcagttggcatacacgtgaatggtcgcgtcctcgccgctacgggcatcggggaatacgacatcaatcccggctttgcgtgcattgacgccaccgacgatattggtgcccgctttgagcatacgggccgtgtgggtcatgccctgatgtcccgtcatgccttgtacgatgaccggcgcaccatcttcaatgaacagcgtcatatttagcgaacctccctgccgttggccgcaagatgtgcggcctgctgcgcggcttcttccatggtctgggcgacatgcagattggcgcgatcggcccgtgccaggatgctcaggccttcagccgcggcattgccatcaaaccgaacgacgagcggcttggaactgcccagtttgtcaagtgcttcgagaatgccctcggccacctgttcgcaggaggtgataccgccatatacgttgacgagcacggattcaacctgtgggtcggacaatacgatctccagactgtcacacatgacctgcgcagatgcgccgccgccgatatcgaggaagttggcgggcttgacattcgtgccctgattctcgccggcgccggacactgcgtccaaggaactcatgaccaggcctgcgccgttgccgattacaccgacggatccattgagatgcacatagtgcagaccatgctcacgagccttctgctcaaatggatcgacatgcaccggatcggcgaaacgcttccaaccgtcatggcggaaggccgcattgtcgtcgagtgagatcttggcatcgagcgcgcacaacgtctttgaggattcatcgtcgggatcgccgatcttggcgagcggattgatttccacaagggtggcgtcgttctccttgaagcaacgccacatcttcagtagaatctgtgccgcctgatcgacgtcggcatggtagaaaccgatgctttcggccattttggtggcggcttcgatatcgaagtcctccaaggcgtcgatatgcagacgcttgacggattcgggatgctcccgagcgatttcctcgacctcggtgccaccgtttgccgtggcaaggacgtcgaaatcacgtgaactacggtccacggaaatggacacataatactcgtgcagaatgtttttggcttccgccacgagcacgccgctgaccttgtgcttgtgaatggtcatcggcagaatgtcttcggatgccagaatggcttcgtcgcgcgtcttggccagtctcacgccaccagcctgaccgcgatgtccgatcttcacctgggccttgaccacgcaaggatagccgattccctcggcagcttgggccacctcatgagaattctgagcgaatacggccttcggggtcgcaatgccctgctcttcgagcagttcccttgcctgatattcatagagatccatgaacttcttccctttgtgactgttgattgttggtaatgatggtaatgtcaggcgggcatggtgaccagcgaactggtcggatagtttcctaaggcttcgatgccgtgaatgcccaatagttccatgacaaagctgaagccgaccactttgccgccgcatttttcgacaagctttcgtgccgcgttggcggtgccaccggtcgcgatcagatcgtccacgatcaggacccggactccatccggaatggaaccggtttcgatttccacggtggcctgaccgtattccaggtcatagttctgttttacggtttccggagggagcttgccggccttgcgtacggcaacgaatcccttgcccaagcgtgccgcaagagcgggcccgaacaggaaaccacgcgcttcaagtcctgctacaaggtcaaaggatcctgcatcgacgggaagcgcggcctcaagtgcgttcatgagaatgccgaacgcgcgtgcatcagcgagaacaggcatgaaatcacgaaaaatgatgccctctttgggaaagcctggaatcgaacgaatcagcgagacgaggtacttggcatcggtttcacccactttggccaagcctgcgatttcgatatccgattgtgccataacggtggttttccttctccctaggtttgtggcaattatatgattgcccctgaacgcaaacggcgaaaatcccaaaatcgagattttcgccgttcatgatactgctatcaggcgttcttcgactccgcttcaacctcttcgacgacctgtgcaggttcgccatcctcggcctcgatcggctcctgagcgacctgatcggtctcctgcggcagcgggttgccatcctcgtcaacctcatcgtcgtgcacatacgccgggcggacgtactcacggctgatggcattgaaagcgaaacgcagctgggaaccgtcggaatcgatgacgatctcttcatactcggtatcgacggagacgaccttgccgataacgccgccgatggtgatgatttcggtgcccggttgcagattcgcgcggaaatcctggcgttcggcctgctgctgcttggccttgcgagactgcaggaacatcatgccgaacatcatgacgacgataacgattagaattgcgtattccaaagcaaaactccttgaaggtggggcactctatgggaccgttcgtccagaacacagagtctatgccagcttactgacatcaagctgagaatcatcaggtctgagaccgagatgttcccaagctttgcgcgtcgccacccggcccttgggagttctgatgaggaatccttcacgtaccagatacggttcgcagacggtttccacggtctccgattcctcgccgaccatggcggataggttgttcagacccaccggaccgccactgaagttggtgacgatggccttcagcacggcaatgtcgagccgatcaagtccttcggtgtcgatctgatacagtgcgagggcctgcttaacatcttcgggatgcaccgactcaagatcatgcacgatggcccaatccctgacacgacgtagcagtctgttagcgatacgcggcgtgccgcgggagcgcatggccaactggtgggccgatccctcctcaagcaggacacccagtacggccgatgaccgctcgatcagtttttcaagctcgtcatgcgggtaaaaatcaagatgggcggtgaaaccgaagcgcgcgcgcaacggtgaaggtagcatgccctcacgcgtggtcgccccgatgaccgtgaatcgaggcaaggtcagcggaatggatgaggctcccggtcccttacccaccatcacgtcgacgcggaaatcctccatggcgatatacagcagctcttcggccgcacgaggcagacggtggatttcgtcgatgaacaacacctctccggcatccagagaactgagaatcgaggcgagatcgccggcatgctggatggctggtccggaggtgacgcgaatcggtacgccaagttcgttggccacgatcatcgccaatgtggttttgcccaggccaggaggacccgcaagcagaatatggtccggcgggacttcacgcttgcgtgctgcgtccaggaacagttgaagctgggccttgaggcgtggctgtccgatgaagccatcgagtatgtgtggacgcagctcctcgtcactgaccggctcattgccgacaggtgaggccgacaccatacgcaaggattcctcattggcaccggtattcgactgctcgaatgcggagtcgttcgtcatgatgatttcgttcacctacctcgatccagcgacgtcaatgcgagcttcaacacacgtggtacatcttcattgctcaggggtgttgcgatgtcgttgctcctgcatacctcctgcacggcatgcagggcgtcttgctgacgccagcccaatgaaatcagcccctcgaccacctgttcggaaccagtgtcctccggccgactgataacggacgccgccgtctcgatctggctgagatcgatggaacccttaagctcgagaatgatcttctgtgcgcctttcttgccgagtcccggcgccttggcaagcgcggtggcatcgccgtcggcgacggcatgggccaaacgatccggaggcagcgtggacagcagggaaagcgccactttggggccgatgccgctgaccttctgcagctgtagaaacatgcgtttcgaagcgggagtcagaaagccgaacagggtgatggcatcctgcgaaacgtttaacgaagtatagaccttgacttcctgccccgcgtgcatggacgccaaatccgcggaaggcatcctggtctcgtatccgactccaccgacttcaatcaacgccgaggacatatcgacggattcgacccggccgtgtaacatgcctatcactgtggtgtctccttcgtcagcgtatagaacatctgttcgatagtctacatgcctctacggacgccttgcctatgggcggccttctgggcggccttggcccactgtcgttgcgcgtcagtcaggtgttgctcgcgttcaccgccttgcaaggcgcctgccgggcgtagtgcgtggcaaatggcaatggccaacgcatccgcggcgtcagccggcttgggcagggtattcagtcccaacatgcgtgcgaccatgcgttccatctgaattttctcggctttgccgttgccggtgatggccatcttcgattcggttggcgtatgcaatgccacggggatgccccgctgtgcggctgccaacattgcgaggcctgccgcctgtgccgtgccgagcacggtattgcggttctcctgcgcgaacacacgttcgatggataccgtatccggggcgaagcgttcgatcttctcgaccagaccattgtaaatggccaacagacgcagatcctgtgacatcttcgggtcggaacgtacgacatccacgtgaataaacgaaagccggcggtacgcgccggcttcgatcacgccgaccccgcaccgtgtcagtccggggtcgacgccaagaataatcacgttcgactactccgcatcaagctgggccatcacttcatcggaagcggtccagttcgaatagatattctgaacgtcatccagatcgtcgaggttgtcgatgagcttggagaccttctgggcatcctcgaggctcagctcgacctcgttcttcggcatcatgaccagatcggcggaatcatagtcgaagccggcatcctgcagggccttgcgtacgtcaatcatctcagaaggaccggtgacgacggtgtagacttctccgtcttcggtcacgtcttccgctcccgcttcggcggccttttcaaacagattatcgaaatcgacgccttcggcgggaacgataatctggcccttgcgctcgaaattgaagctcacggaaccggtggtggccagggatccgttgcccttggtcagggtggaacggacttcggcggccgcacggttacggttgtcagtaagacactcgatgatcaggccaacgcctgcgggagcatagccctcatacacgatgtcttcgtagttggcgccaccggcctcttcaccggagccacgcttgacggcgcgcttgatgttgtcagccggcatggaggccttcttggccttgtagatggcgtcatacagcgacggattaccgtcgggatcgccgccgcccatacgtgctgcgatttcgatgttcttaatcagcttggcgaagagcttgccgcgcttcgcgtcgatggcggccttcttgtgcttggtggtcgcccacttggaatgacctgacataatgctcctaggcaggttgcggatgtttcaaacgaaatgattctaaagcggttctacgacaatgcgcgggcatagacatgcagaacacggttcaccacggcattccagtcgaaatccttcgaccttcgctcccctgcgatggcaagatcggagcgttccccgtcatcggacaacagatggcagatgacatcggcgcaggatgtcgcatccccgttggtgaacagcgccgcgcttcgtccgtcctggctcacggcgcgaaacgcggccagatccgaagacaccacagggcatgaggcgctcatggcctcagccaagaccatgccgaagctttcaccaccggtctgaggcgcgacatacaggctgagggaacgatagaagcgagccttgtcgttgtccgaaatacggcccaaaaattcgaaatgcgtcagcagatcccccgaagggtccagtcgcttgaccatggcttcgccgtcattgtcgccatctccggcgcacaggaaacgtgcatggggatatcgcctcagcacctgcctcgccgcggcagcaaacacggcgaaacctttgcgctcctcccccatacgtcccagaaatccgatggtcggggcttgcgcggtgccggtccaccgtgggtcgggcacggcatgggcgaatcgatcatgatggatgccgttaggtatcaccgtgcgcctgacggattccggcagataatgttcggccgtttgccgagccgcgtcactgacgaaaatggcttcgtcaaggggcttgagatatcgatgcaggtagcgttcgaacactttcaggccgaaaggatatggatcgatcgcagtgtggaaggttccgaccaacggcggatgacggtgcatggtgaacggcttatggctcagcgatggcgcctcaggctcatgcagatgcagcagatcgaaatgaccttggcgaatccaacgtcgcgtctgcagtcctgcgatgaggaaataactcaggtgcgctacggaaccgttgtatggaacggcgaatgacgaaccgttggtatgcacccacagcggcatgtccttggttcgtcttcccggggcgaacacttgcacgtcatgtccccggcagatcagttcgttcgcgaaatccctgatatgggattgcacaccccccggcgtttcaaacgcatatggcgagatgatgccgatgcggagcctgcgtccgtgcaggaaatcgtcaacatgttcatcttcatcagattcagccataccctgcattctctcattgtccaagggaattgtcagccatccgcgaacacggctcatcggcatcctgcagacgtgaatggtcgagatcctcccagaacagcggctggagcatgtgccaatcctgcggatgggctgcgatcccctgtgcccacagatcgacccatgcctgcgaaatcgcatgcagtgcctcttgacgaggcatgtcatgaaacgcatggacatcgatggggccgctgatctcacatacatatccgtatggcacgcccgcctgctcttcacgccgtccgctgagtttttcgcgatacagattcaccacgtacagagggtttccggtatcgtatgccaacgctgccggcccacgggccacacgaatcacggaatcgaaggcatgcacgaagacgccgtgtctgctcaggtcccggtcggccagcagaggaacgacaaccgtggaatcaagcaggacgttgcgtaatcggccggtaagatcatgctgaccggtgagcaggatacgcatgccaagacgttcgcgaatatcaacgaaggtgtggagcaattcgtcgttggcgagtctttcggcgaccgtcaccaccggggcgacctcgagtcgcgcccaataccccgcgtaatcccaattgccttgatgccccatcgcgatgagcgacgatacgccttgccttgcatcgcgaacgatggaatcgaatccgctgcccgtcccccggatgcgtgcccgaagctgttgttcgctccttgcaccaacggtcatcgcctcgcaaaaatacgcgaagtacgagcgcatgccctgacgtgaacagtgacggacacgacgtcgtagttcacgattatcgaccgatccatgcgatcggcgcatttcactggcgaacacatgcgtaagattacgttccagttgtcggacccctcccacgcggaacacccatgcaatgtcggccgcgcacgtgaaaaaccctctcaaaacggcctccgggattcggtcggaccttttggccgcggcgagaagaaaccggtcagacacgatatgtcttcttgcctacgcgcatttgtcttttcgcctcgaaaatacgctggaaaacggtgatgataccgagcgccgcgagtaatgccatcgcaatggccagccatagtccttggtgggtcagaccggtaatggccatacccaccagaatgatgaccagccgatcggcccgcgtagcgacgccgttcttcacttcgaagccgacggattccgctcgtgcgcgggcataggaggtgacgaaagaggtcatgacggagaccattgcggcgattacgccgactcggctcgtgtaatcggggaaactggtgtttgtgctgtcataccaccagtcgctatgcgtcaggaagaagatgatcacaccggtgagcaccgcccaatcggcgatgcgatccagtgtggaatcaaggaaagcgccgaattcggtgccgccggtggtgagcttggcaatggaaccgtccaatgagtcggccaacaccagaatcgtcaggaccaccgagccggcgaacaggtggccggtgacgccggtggcgatggcagccacgatggtgccgatagcgccgattatcgtcaccgcattggcggtgagccccatggcaatcaacgccttggcgatgggttcgatcagttttttgaatgggtcgcgaagatgctcaagcattacgattcctgttcgatctatgggaaagcggcatacggaacggcggaatcgctccgctgcttcgtatgccgctcccagtcatgactatggcgtccgtctaccttcaatcggcgatggcggacttgaaatcatcggcgctgttgacctgaacgcgcttcctgagcaccgtcatgatctggttcttggcctcgtcgactggtacgccgttgagctggctgccgtcacggaaacggaagctcacggcattgttgttcatgtcttcctcgccgacgatgaggatgaacggcaccttggatttggatgcgttacggatcttcttgccgaaacgatcgtcggacatgtcgatctcgcaacggacggtctcctcttccagacttgcgatgaaccgctgcagatgcggggcgaattcgtccgcgaccggcacaccgagtacctgtaccggggcaagccatgccgggaaggcgccggcataatgctcaagcaacacggcgaagaaacgttcgatggagccgaacagtgcgcggtgaatcatcaccagacgctgatgggtaccatcggcggcgatgtattcaagcttgaaacgttccggcagattgaagtcgagctgaatggtggacacctgccaggtacggccgatggcatcacgggcctgcacggagatcttcggaccatagaaggcggctccgcacgggtcgtcgaccagttccagaccggattccttggcgacttcggccagcgtgttggtagcctcttcccagatttcgtcggagccgacgtacttgtgaggatccttggtggacagctccaggtagaagtcgtccagaccgaagtccttcagtagtccaagcacgaaggtcagcaggttcttgagctcatccttcatctgctcacgggtgcagtagatgtgagaatcatcctgggtcaggccgcgcacgcgggtcagaccgtgcacttcgccggacttctcgtagcggtacacggtaccgaactcgaacagtcgcaacggcaactcacggtaggagcgctgacgggacttgaagatcagattgtgcatcgggcagttcatcggcttgaggtagtaatcgaagccctgcttgatgatgttgccgttctcgtccttctcctcatccaagcgcattgccggatacatgccatccttgtaccaatgcagatgaccggaagtctcatacaggccacccttggtgatgtgcggggtctgcacgaagctgtagtgatgcttgcggtgcatttcacgggaatagtcctccatggcgttgatgaccgcggcacccttgggatggaacacggccagacccgggccgatctcatccgggaaagagaacagatccatctcggcgccaagtttgcgatgatcacgcttggcggcttcctccagacgggtctgatacgccttcagatcctccttggtggcgaaggccgcgccatagatacgctgcagcatggggttcgcttcgttgccacgccagtaggcggcggcggaacgttcgatcttgaacgccttgatgtaacgggtgttcggcagatgcggtccacggcacagatccttccagaccacattgccatcacggtcgacgttgtcgtagaagctcagctccttctcactgatctcagtggcggcttccgggtcgagatgcgcttccttgtctttgatgagttcgagcttgtacggctggtcggcctcttccgccaaggcctcctgctcgctcaccacacggcgacggaaggattgggaggatttgatgatgcgctgcatgcgcttttcgatgtccttgagatcctccggggtgaacggctcgacaacgtcgaaatcgtagtagaagccgtctttgatgaccgggccgacgccaagcttggcatccggacggatttcctgcacggcctgggccatgacatgggtcgcggaatggcgcatgatggccacgccgtcctcgctgtcgagtgcaatcggctccacgacgtcaccgtcatgcagttcggtataaagatcacggggttcgccgttcaggcgcaccgcaatgatgttcttgtcatccgcgaagagctggacaccggtctgatccgcagccacctccttcgattcgccgttgagtgttatggagatggtctgttcagccatgggttgtcctttgctatcggggtccgcgttaccaatgtgcaggcctggactttctgtatcaacgatgaacaagataggaacgagtgcagacatcgacgcgcggcgacggtgaattccatgccaacggcgggtgaccgttcatcctactgctcgatgacatgcgcgtacgtgtactgtggtgcggaacgggttgcagtgatttccacgtcctgagaggatttgaccgagaccgttgctccgtatttcacttccagacgcgatccgacgcctccggcgagattcaccgcattctgtaggttgtcgctgtcccctatcgccttgatgacgaaaggggccttcaatatggttccatcacagtcaagtccgtcactggcattgctgatataggtgctggtaattacacgcacatcgttgatttcaatgacttcggcaccactgttgcgcaactcttcaagcaaggtgaacaatatggacgcatcgatatcttgcttttgcccttgggagatacggatgacgactccttcgccggaagctggcagacggccggaaaggatgccattggattcggcgttctgcttggcgatttcagcggctttggcgttcttgtcggcggtatccttcaaagagttgagctggctggtcaactcgctttttcgttgctccagtttctgcacctgcgaactggtttcgctgataagccgggtcagttcatcctcgctcatcgtctcatacgtggaattcgtattgttgagctgaatgacgtagccgaatcccagcaacgcgcacagcatggtgaccaacacactcgaatacagccgtgcccgtgtcgatttcgcattcaacgacacacgtttcggcttgcgccgaatcaccggaaacgagccggtttcagtgctgtcattatccttgtccttggcgatctggccgtgcagcttggccaacacatcaggcgattcgtcggtatgccgtgtcatcgtgcatcaacccttgaagatgaagcggcgaagagacgacacattggtgaagatgcggatgccgagcacgacgatgacggccgtctgcaattgggatccgacaccaagctggttgccgaggaatacgagcaaggtcgcggtgatcacattcgagaagaaggaaatcacgaataccttatcggaaaagctacgttggaaatacgcccgggcggcgccaagcaacgcgtccaatgcggctacgaccatgatcggcagatatggctgcagttcaacggggatgtccggctgcacgaacacgcctatgaccacgccgatgataaggcccaaaacagctgccatctacctgtcccttctcgcgtacgtcacctcaccggtcaccgccgcttccagtgtaagcgatgtgcttttgctgacctgcgggtagatgccggcttccttgaatgcactgtacaacgacttctgtgttttttcacccaccgcgtcggcaagtgcgttcctgttgccaatggcttcgattttgtaggggctttgcacggagctgacaccaatcagaatcgtggatcccgcagtacgtatcgaggtctggaccccgaggcgattcccgttgatggcaatcgcctcggcgcctgcctgccacagcagggagacgagtgtctgcaggtcggaatcggtgacgacccgaatctgattgccgcttttttcatgggacaatgaggaatcggtgttatcgtcaccgaccgatagagggtttgcgatagtgagcgtgatgccctctccctggaccggaagcacgccattgatcatttcatcgtcccgcgtggtctggctcaacgaccagttcgatatcgatttcgattcgctttcgacctgggaacgcagggagttcacctctttggtcagggacttgaccttatcggtctggtcggcaagctgggatgagagctgcttgcgcacttccttgcgcggatcggtgctgagctgacgcacgaatacgcttcccgccacaccgacggcgatgcagatgaggaacaccatgatccgcgtggaccacaccgaaataagcgacggcgatttggtggccaatctcgaatcggtgtacagcacatccatgggacggttggtcaggtcatcgatcaagcgtagcgaatcatcttccgaatgacgccttctggcatggccgatcggttgcgaatcaggttgcacgtgatgtgattcaagacccgcaaaggaggctgagaacacggcacgatgcttcatcggcgtgttctcgggcgacactgggaatgacgcgtattcggaagcatcatgcggcatggaaggtgtccccgtcgttcctcaacagcccgatgccttggcgaacgtagatatatccggccaaccagtacaggcccacaccccaaatgccggtggcaaggccgcacaagtgcaatacatcagtggctgagttcgaccagatgtcggcgaaaatcagcgcaacgatggcgatcaacagcatggccgttcccgccttgccgacgaaatgcaccggtagcggtccataatcgtgctgcgccagaaccagcacgagaaccgccatgatcaggtcgcgcaaacccacgacgatcaacatccaccacgggatgatgcctgcgatgccgagcgcgagaatactgcagaaaatcagcagacgatccgcgatcggatcgagaatctgtcctattttgcttacttggttgaacgaacgtgcgatcagtccatcaagaccgtcggatactgcggacaacgccaagaccacaagcgcgctcaccatctcatgccgggccaccaacatggcgataagtggaatcgaaatgatgcgcagtaggctgatgaagttcggaaccgtgaaatagatatcccgcggttccggactgtactgtttcttgatgatcagtttgctcatactgcgagcaatactacattctcgaggcctgcaatgcggtgacgattatgccacgagcaccaattccgtacaactggtccatcagctggttcaccttggccttcggaaccactacgcgtacggcggcccactgcttgttatgcaacggcgaaatcgtcgggctctcgaatcccggggtgacggacaccgcggcggagaccttctccacgggaatgtcgtaatccatgagaacataacgttgtgcggtgagcacgccctgaaggcgacggctcagaatcgtcagtcggtcatcatcctcgttgagacgcggagagcggataagcaccgcctcggagtgcagcagcggatcggcgaagatacgcaggccggcattgcgcagcgtggtaccggtggaaacgacatcggcgatcagatcggcgacaccgagctgtaccgaggattccaccgcaccatcaagatgcaccgtttctgcattgatgccatgctcgaccagatagtcatgcacgagcttgtcaaaggacgttgccacacgtttgccttcaatgtcctcgagcgtgctgatcggggattcattcggtgcggcgaatcggaacgtggaggcaccaaaaccgagctgcatgtgctctttggcatcggtgccggaattcagcagcaaatcatgaccggtgataccgacatcgatggtgccacggccgacgtagaccgcgatatcgagtggacgcagatagaacagttccacatcgttatcaggatcctcaacgacaagctggcgaggattgctgcgcagacggtagccggcttcggccaacatgttccaagcaggctcggatagcatgcccttgttgggcacggcgattcttagcattgttcctcctcaggggccgtacgactcaacggtacggcccgggaaatatcacaggttcctatagatgtcttcgagagtgatgccgcgatcgatcatcatgacctgcagatggtagataagctggctcatctcttcggcggtgcgatccgctccctcgtattcggcggcgatccaggtctcgctggcctcctccacgatcttcttgccgatgaaatgggtgcccttgttcagctcatcaacggtcagggagccagcctgcttggtgtccgccttctcgctcagctcggcaaacagtgattcgaaagtcttcatgtttccttatctgttccttttggatttcgcgttgttcaggccctgaacgcggcttcggccttgtcacggatggagtcgatggcttcggcggggctttcggcgccatacacggcggaacctgcgaccaatacatccgctccggcttcggctacgatgtgcgcagtcttcggactgacgccaccatcgacctgaatcttggtcttaaggccacggcgggtgatttcgtcacgcagacgacgcaccttggccatttggttgtcgaggaatttctggccaccgaagcctggttcgacggtcatgatcagaatcatgtcgaactcgtcgagaatgtcgaagatcggctccaccggctcggccggacgtacggcgaagcaggccttgcatcccatatcgcgcaactggcgcgccagacgtaccggggcatgggtggcacccatgtggaagctgacggaggcggcaccaagcttggcgtattccggtgcccagcggtccggatcctcaatcatcagatgcacgtcgaccggcaggtcggtgacctggcagatacgtgccacgatcggctcacccagagtcaggttcgggacgaaatgatgatccatcacgtcgacatgaacaagatccgcattggagatggccttgaggtcacgctcaaggttgcagaaatcggcggacagaatgcttggtgcgatttgaatagtcatggttcccattctatggagggtaagcgacttgacgctattggatatggggctggccatcggcatttgagacggtggcgccttcattgcctgattgttcatccgtcgttcgtgcggcggtcgcactgaccggcgaagacttggaggagccggcttcgtctctgactgccaatcgcagttcgatttcagtgacggtacgaagcttctcgacaagcaattcggtggatcggcccatctgctgcacgataatgaaggaaaccacgccaagcacgaagacggcaagggacacccacacgttgatgcgtacgccgaggaattcgtgggcgtagtcgatgcgcagggattcgatccaggtacgtccggcggtgtaccacatgatgtagatggagaacagggaacctgccttgagccttttcatgactgtggagccgatccacacgatgatggcggcaccgatgagattccatatcagctcatataggaaggtcggatggaacaacgtgccgcttggacaggtcgccccgtcgtagcactgttcgctttgaccgatggcggtgcccgtatcattgagtttgaggccccaaggcaatgtggtgggagccccatagagttcctggttgaaccaattgcctaggcgtccgacggcttgcgcgaccaacaggcccggagcgatggcatcggcaagcaacgccatcggatagtgcttatgacggcaccacgcccatgcggccaatgcaccgagggcgacacctccccaaatgccaaggcctccgttccagatacggaacatctccacccaatcgccgttcgcgccgaagaagcgttccggtgtggtgatgatgtgatacagacgcgcaccgacgatgccggatggcacggcgaccaacgtgatgtcgagaatctggtcgaagttgcctcccagtcttttccatcggttgctggtgatccatacggcaagcacgatgcccatcaggatgcacaaggcgtagatatgaatcgttaccggcccgatggagaactgcgaaatcgtcggcgatggaatgtatgcaagtgtcatggtttcctgatggtagtccgcgcagtcgatatgtgcgagctgcgcggaccccttgtacggtgtctttcagtggcgggcgttgtggatgccttcggcaagttcctcggccttggctgcaagggccttgaggcccgtcgtctcgtcgacggcgaccttgccggattcgtcgagcatggtgtgcaccaaggcggaaccgacgatgacaccatctgcataggagccgacacacgccccctgttcggcggtggaaacgccgatgccgacgcacacgttcttcgcgcccgcttcacgagtgcgtgccaccaattcctgaggtgaggcatcgatggtggcacgttcgccggtcacacccatgcgggctgcggcatagacgaatccacgggcgttgtcggccacgaccttcagacggtcggcggtcgagtccggggataccaggaagacgcggtcaagaccgtggcgatcggaggcctcgatccattcgccggcttcatcggggatgaggtccggcgtgatcaatccggcaccgccggcgttttcaaaatcgcgtgcaaagcgttcgacgccgtagtggaagatcaggttccaatagctcatgaccagaggtactcccccggcattggctacggtctccacagccttgaacacgttggcgattgtttcgccgttgtcgatggcgatctgggaggcggcctggatgactgggccatccatcacgggatcggaatacggcaaaccgatttccacggcatcgacgccatgctcgaccatggtcttgaatgccttaagcgagtaatccgggttcgggaatccatatggaaggtaaccgatgaacgccggttcgtcgctggccttgaacgcatcgaacatggcttcggtcgggcttggcctgtggctgatgcccaacggctggccggacggggtggttgcggcggttgcattcgtcatgatgatcgctctccttctttcactcgccgtctgcattgttgccttgagcgccattggcttccagcgccttggcctgctcatcggtcagataaccgaaccacttgcctgcggtattcatgtccttgtcgcctcgaccggagatgttgatgatcatcaccggatgctcatatcccttggctttgagatcctcggcggccttgtacgcgccggcgacggcatgagagctttcgatggcggggatgatgccctcggtctcgcacagatccttgaaaccgctcatggcttcctcatcggtggcccacgaatagttgacgcggccgatatccttgagccatgcatgttccggtcccacggacgcgtaatcgaggcccgcggaaatagagtaggtatcgagcgtctggccttcggcgttttcgagcaggtagctctttgcaccctggaacatgcccagctcaccggttccgggagcgaaacgaatggcgtggcgtccggattcgggaccgttaccgccagcttcataaccgtataggttcacacgttcgtcatcgaggaaggcattcatgacgccgatggcattggaaccgccgccgacgcaggcgcagatggcgtccggatgatcgatgccgtaccaatcctgcaactgctgcttggcctcttcgccgatgatcttctggaaatcacgcaccatggcggggaaggggtgtggtcctgcaacggtgccgagcagataatgcgtgtccttgacgttggtgacccagtcgcgcagcgcctcattgatggcatccttgagaatacggtcgcccaacgtgacttccacgacttcggctccgagcatgcgcatgcgggccacattcaaagcctgacggcgggcatcgatctgacccatgtagatacggcacttcagaccgagcatggcacatacggtggcagtggccacaccatgctgacccgcaccggtttcggcgatgacgcgggtcttgcccatgcgcttgaccagcagcgcctgtccgagggcattgttgatcttgtgtgcgccggtgtggttcagatcctcgcgcttgaggaagacccgggcgtccaaaccggttttctccctaaggcgctcggcaaaacgaggagcttcggtcagtggcgacggacggcccacgtactgctggttgagcctggcaagttccttgtggaattccggatcggccttggcctgtgcgtagacgcgttcgagctcgtcaagcgccgtaatcagcgcctccggcacgtagcgtccaccgaattggccgaaatatggaccttcatgtgtgctcaacggggtttgttcggatgctttcactcttgctcctgcctttactagacgttcgacggcctgttcatgattggctgcggtggcgacgccctcacctacgagcactgcatcggctccggcgcgggcatagtcttcaagctcgacggctccgaatacacctgattcggcaaccctgatgacatcgtcgggtaggtcggctgcgagctcgtcgtatttattgacgtccactttcagatccttgaggttacgtgcattgatgccgatcacacgtgcacctgcggcaatggcgcgttgaatctcctcgcgcgtgtgcgtctcgaccagcaccgccatatcgagggtgtgggccagatcgagcaacgacctgagcttggcatcatccaatgccgcgacgatgagcaacaccagatcggcgccatgggcgcgtgcctcccagatctgatattcggtgacgatgaaatccttacggagcaccggaatatgcacggcagcgcggaccttgtccaaatcatcaagcgagccaaggaaacgacgtccctcggtaagtacggaaatcgcgcttgccccaccgcgctcatactcccgggccaacgccgacggatcggggatatcgctgaggtggcccttggaaggcgaggccctcttgatttcggcaatgaccggaatgccatccgctttcttcaaccatcggcgcgcatcgatcggcgcaggagcctgagccacctgccgcttcaattcgtcgagcgacacgctcttctcacgtgcctgttggtcttcgacggctcctgccaccaattcatcgagtacagacatggcgttcctttcagtgatttactcgattggtaagcttctcggcttctacaactggcgaagttgcgaagcgatctgcaccgcctcgacgctggcctccgccttgttgcgtgtttcctgccactcactggccggcacggaatcaagtacgattccggctccggcctgcacgctcgcttcatgatctcggatgaatgcggttcgaatggcgatggccatgtcgagattgccagaaaaatcgaaatagccgacggtaccaccgtagatgccacgatcggcgggttcaagctcgtcgatgatctcgatggcgcgaggcttgggcgcaccggaaagcgttcccgcggggaatgcggaggtgaacacgtcgaatgaggtcatatcgggattgacacgaccggttaccgtcgaacagatgtgcatgatgtggctgaatcgcttgatatccatcagcgagacgacttctacgctttccggctggcatacacggctcagatcgttgcgggcgaggtccaccaacatgatatgctcgctgcgctccttcggatcggcaagcaggtcctttgccaactgctcgtcctcctccacggtggcgccgcgcggtctggagccggcaatcgggaaggtcatggcatggccgttgtcgaccttgatcaatgtttccggactggagccgataacgttgaaatcgcggccctgggcatcggtcaacgccatgaaatacatgtacgggcttggattgagcgtgcgcaacacgcgatagacatcgaacggatcggccggtgaatcaatatcgagacgctgggatatgaccacctggaacacatcaccgtcgatgatgtgccgcttggcgacttcgacggcatgctcataatcggccttctccgtacggaagcgaagctcaggctgactgatggtctcatccagcacgttgacacgtgcctctcccccgaccggtgtcgcggccttgcgctgcatggtgtcaagtcttgcgatggcttcatcgtatgcagcatccgcacgagtcggacggtcatcgacgttaactgcgttggcgatcatccataccgagcccgacacgtggtcgaccacggcgatgtcggtggccaatgccaacgcggtctcaggctgtccggtttcgttcggggcttcggcacgcagggtcggttcccaatgacgaatggaatcccaaccgacagtacctaccagaccgctggtaaggttcggcagaccgtcgacatgaggagctttcagagtcttcaatgtggcatgcgccacctcgaccacgtcgccttccacggggattcccgccgggaccttgcccagccagtcggccttgccgccgttggaacgcaattgagccatggagttgacgccaatgaagctatagcggctccaggtccctccgaattcagcagattcgaggatgaaggtgccggaacggcctcccgccaaacgctcatagaagccaaccggagtcagtgaatcggcaagcagcctgcgcacgatggggataacgcgatagccttcgtcggcgagttcatgaaactgttcacggcttggccaggtggcgccccacttaaggttgcgtacgctgcatccgctcatcgctgttcctcctgttccttggttcggtagcctacgaccaccggcaatcgaccaccttcttcgaagcaggaacgcttgccggtatggcaggcggctccgacctggtcgacttcgaccaggatggcgtctccgtcgcagtccaaggcgaatgacttgacgtactgcgcatgaccggaagtatcgcctttacgccagtattcctgcctggatcgggaccagaacgtcactcggccagtagttagggtgcggcggacggcttcatcgtccatgtagccgaccatcaacacttccttggtgtcgaactgttgaattaccgccgcaaccagccctttctcgtcacgcttaagacgtgctgcgatgcgggggtcgagattgacgctgttatcgtatgcttcgttggtcatgatgttggtgatgtcgttcttttcgattataggaacagttgatggattgacgtcatttcatcgtacggtatagccggcggccttgatggcgttcttgacctcaccgatggagaccttgccgtagtgaaagatcgacgcggcgagcacggcatcggcaccagcttcgattgccggaggaaaatcggaggctttgccggcaccgccggaggcgatgatgggaatcttgacctccttgcgcacggccttgatcatctcgatgtcaaacccctgctgggtaccatcggcatccattgagttcagcaggatttcgccggcgccaagttcctgcgcacgtttgacccaccagatggcatcgatgcccgtggacttacgccctcccatggtggtcacctcgaagccggactgggtatggcgctccccttgctcgcgacgggcgtcgacggaaagcaccagcacctggttgccgaaacgttcggccacacgactgatcagtgtcggatcgttgatggccgccgtattgacgccgaccttgtcggcaccgcaacgcagaagggaatccacgtcctccggggtgcgcacgccaccccctacggtcagcgggatgaaaatctgctccgcggttcggctgaccacatccaccatggtctgacggtgggagctggaggcggtgacatcaaggaaggtcagctcatcggtcccctgacgatagtattcggcggcgagctcaaccggatctcctgcatcgcgcagattctcaaaatgcacgcccttgaccactcgccccgcgtcgacatcaagacatgggatgactcggactgccaatgacatgctgtttctcctcgctcgcagtttcatgcaacgattgcaagagtaaccgttacgcgttacgcatattcgtatgaagtccgagtagcggacagactattgccgttcttttgccgcaagctgcccgcaggcaccatcgatatcctgcccgcgggtgtcgcgcaaggtggcggtgacccccgcctgatgcaggatgtcaaggaaccgccgctcatcttccggcttggatgccgtccatttggagccttcgatgggattgagcggaatggggttgacgtgggcccagttatccccgtaatggttgaggcgcttcgccagcagacgggcatgctcggcttggtcgttgatgccgcgcatcaacgcatactcaatgctgacgcggcgcttggaagccagatagtagtcgtgagccgcatccaacacctgagtggtgtcgaaacgcttgttcatcggcaccagctcgtcacgcaattcgtcgctgggagcgtgaagagataccgccagacgcaccggaatgccttctgcggtgagctttttgattcctggaaccacaccgaccgtggatacggtgatattacgtgcggagatgccgaaaccttcaggtggcatggcactgatctgccggaccgcgctcaatacggacctgtagttgcccattggttcgcccatgcccatgaacacgatattgctcagacgtccgggaccgccggcaacctcgccgtcgcgcatggccttcgccgctacacgcacctgctcgacgatctcccccgcggacatgttacgtgtcagtccaagcttgccggtggcgcagaacggacagcccataccgcaacccacctggctggaaatgcagagcgtggtgcgtgtcggataacgcatcagcacggattcgatcaacgagccgtcgaacaggcgccacaacgtctttatggtagtgccttcatcggctacctgccgggtgacctcggtgatcagcgtcgggaaaaacgcttccgccgcttcggcacgcttgttcgcgggaaaatcggagaattcctcggcatccacatcgaaatgcccatagtaatggttggcaagctgcttgacccgaaacctcggcagaccaagctccttggccttggcgatccgttcgtcttcggacatatcggcgaaatgcagcggcggcttgcctcgacgggcatggtccttggaaagcacgtcacggaacgcaccggtggtgcctcccggcgtaataccggtttcaggcagatccttcacggtgtccatggaatcattcattgcggtcaatcaatcctcttgctcatcacatgccggtggcccacagcagtacgcacacgaacggcgcgcacagcagtatggagtcgacgcgatccattacgccaccatgccccttgagcagatggcccatatccttgatgccgatgtcacgcttaagcatggatgcgcacaggtcgccgaacgtgccggcgatgccgatcatgatgccggcgatgacgggcacccaccagcgggacatccaaacggaagcgtcataggtgcagaacatcaccacgaacgcgcccaccatggcgaacacgatggagccggccaggccctcccaggacttcttcggtgaaatacggggactgagcttgtgcttgcccagccaggctccggcgaagagaccgccggtatcgctcagggccggcatgaacaccagcatgatggcatgcgccaccggatgatcgttgaacgtcaacggcatgatcagacaggaggcgagcagtggaatatacagtacggtgaacatggagaccgccacatggctcagacggctgtggctgatttcgccttgctcatggttgaatgatgattcgagtcttgcaccggcatcggtgtgggacagcttgttggcgacggccaacgagattctgctgccgaacgtcactttggcgcttgccgccatggcgaccagcagcagggacaccagcacgcagatcgtcatggcgacgatgtgccgatcactgtagaaggtggccagcaaggtcgccgtggagcagatccataacatcaccaccgggatatgcaatccggcggtggcgaaatcgacgcgcagctcccacaaggcaagcaacatgaacagcacgacaagatagacgaacaggtctatgctgatcagcaggcaggccagaataagtatgaccagtacggccgcggtggcgatggcctgcggcatattgcgcccggttctcttattgatggcgttgatggcctcttcggcttccttctcgcgctgttcctgatgctccatcatggttccttgagtgtcttcgctgacgtcgatcgtcgattatgaatgtctgtgaatcagacctccataatctccttctgcttggcttcaagcagggtgtcgagttcgtcggtagtctgcttggtgaccttgtcgagctccttcaggagacgatcgccctcatcttcgcccatgtcgccatccttgatagccttatcgatggactccttggtcttgcggcggatgttgcgcacggcgaccttgccgtcttccgccttgcccttggcgagtttgacgtattccttgcgacgctcttcggtaagttccggcatggtcagtcgaatgacgttgccgtcacggcgcgggctagcaccaagatcggaatcacgcagggccttttccacggcattggcctgcgaggcatcgaacggggtgacggacagggtgcgtggttccggaacgccgatggtggcgacggccttcagcggcgtcggcgcaccgtagtaatcgacggtgatgccgttgagcagggccggattggcgcgaccggtacggatgccggagaagttctccttggtggattcgacggacttggccatctgggccttggcctgatcgacgatgtttgccatattcatactccttgtttgtgattgatcgatattcgacgttgaatgtcgttactcggccaacgaggattccgcagtggaaaccatggtaccaatttcctcaccgagcaaagcgcgggtgacgttgccctcgccttcaagaccgaacacgcgaatgagctgcttgttgtcgcgcgccatggaaagtgccgaggcgtccatgacggccaggttgtcgacaagtgcgcggttatagctcaaggtcgcgaaacgcctggcgttctcgtccttgcgtgggtcggcggtatagacgccgtccacaccgttcttgcccataagcacctcgtcgcaatgaatttccagagaacgctgaatggacacggtatcggtggagaaatacggcatgcccgcaccggcaccgaagattacgacacggcccttttcgaggtgacgaatggccttgagaggaatgtacggttcggcgacctgtcccatggtgatggcggtctgcactcgggtggcctggccttcctgttccaggaaatcctgcaatgccaagcaattcatcacggtgccaagcatgcccatgtagtcgccgcgggagcggtcgatgccagcctgctgcagttccgccccacggaagaagttaccgccgccgaccacgatcgctacctgcacgccctgctggacagcgggaacgatttcacctgcgatgcgtcggatcacggtcgtatcgatgccgaccttgccgccaccgaatgcctcgccggagagcttgagtagcaccctacgcggattgtcaccagtgttttcgccagtcatgaaaagcctttcttgcccgaaaactcacgaaatttaccgctctccagactatcggcaaacaacgacaccgcacttgaacgacacagcccataaaacaaaaagcggccatcatgtacgatgatggccgcttcgggatacatcgtcatgcgatgcgtcccggctttaccgtaagcgagttcactcggcttcgcccttgccgacctccacgcgagcgaaggccagagcggcgccaccgacttccttgaacaggtcgccgacggtcttggacggatccttgacgtaggactgctcaagcaggacgttctccttgtagaaggcattcagacggccttccacgatcttcggaacgattttctccggcttgccttcggccagggacttctcggtggccacgcgacgctcggactcgaccacatcggacggaacgtcctcacgggtcagccactgagcgcccatagcggagatctgcagagcggcctcgtgagccacggcggcacctgcctcgtcggtggcgatcatggccacgatgctcggcggcatctcagcggacttcttgtgggcatagatttcgacgtgcggaccggcaaccttggcgaactggccgaccttgacgtgctcgccgaacagggccgcagcctcttcgacggcttccttcacggtggcgtcgccggaggcggcagccaggacctcatccacggaggatgcctcggccttgacggcgtcttcgagaacgctgtccgcgaattccacgaacttcggggtcttggccacgaagtcggtctcggagttaagctcgacggcataaccggtctggccatcggcggattccacgaccttggaggcgatggtgccttcctgggccttgcggccttcgcgcttgcctgcggcctggatacccttggcgcggatgatctccttggcgcgagccacgtcaccctcggcctcggtcagggccttcttaacgtccatcatgccggcgccggtttcctcgcgcacctgcttgatcagagctgcagtgattgctgccattgatttgtctcctctgaaaaaataatgtcccatatgatgggaggcattgcacctcccatcatagaggatgtgttcactcagccttggcttcgccttcagctccagccggagcttcggaggccggagcgccctcggtcaggagctccttctcccaagcggccatcggctgctcggtctcaccctcggccttggcggccttgccggaacgctccagcagaccttcagccactgcatcggccatgaggctggtcagcagctcgatgccgcggatggcgtcgtcattggcggcgatcgggtattcgacggactccggatcggcgttggtgtcgacgatggcgacgaccgggatgcccagcttgtgagcttcctcgacggccagcgcttccttgttgacgtcaacgacgaacatggcggacggggtacggttcatgttacggataccgcccagctgcttggccagcttgtccttctcgcgctcgagaagcagcagttccttcttggtcaggccggagccatgcacgtcggtgaagtccatctcttcgagttccttgagacgggagacgcgcttggacacggtctggaagttggtcagcatgccgccgagccagcgctcggagacatacggcatgttcacgcgggtggcctgggaggacactgcttcctgagcctgcttcttggtgccgacgaacagcacggtgccgttatgagcgacggtggccttgatgaagtcataggcggcgtcgatcatatcgagcgacttgaacaggttgatgatgtgaatgccgttgcgctgggtgaggatgaactgcttcatcttcgggttccaacgacgggtctggtggccgaagtgcagacctgccttcagcatatcgctcatagtgatctgagccatggtatcgctacctctttcttgtcggttcttgcctggtcatgcgtccctgcgtgcaacctcgccttggaggcggggccgaccgacacaggtcgtcgcgaacatgacgcgaatttgctgcatgccggttgacgataatggttggtccgaagcgcttgcgactgcacttctcgccgggtggcatacgaagtatgaagataccacagggtcccgtctttttcggacgggaccctgccaaaccctgtcaacaggtgtaattccaagctctttgccggaacggaaacctactgacggtgattgcgcatgtatcgcatcgcttcgcggcgttcttccttctcgagacggtcaagatagacatggccatccagatgatcggtctcatgctgcaacatgcggcccatgatgccatgcccttccagtacgaccgggtttccgtccagatcaatgcctcgtacccgggcgtaatcggcacggcgggtcttgtaccacaggcccggtaccgacaggcaaccctcatcgccgtactgttcgccgctggtctcttcgagcacgggattcaggacatagccgatcttgccatcgatgttgtaggagaacgcacgtaggttcactccgatctggttggccgacaggccggcacggccaggatcgtcaacggtgtccagcagatcctgcaccaagtggcgcacggccggagtgatttccttgatggggtcgcatggggtacgtagcaccgggtctggcacgactcgaatctcacgaattgccaagattatttctcctcgtctgtaatcgttgcctcagatgctgcggaatcgtccggcgtctcagcttcgccatgcgattcctcagtctgtctcttgattttctcctgcatggtatcaaatgcctgccgaaccttcggactcacggattccgatgcctgacggacgctttcggatgcctgcttgacggtttccgtagtgcggtcgagaatctgcacggtcttcggcaatggtttcccggaaggcttcggcgcgtacagcacgttttcgatcgtttcggcgtaccgttgcagcaccttcgggcggaccaccttcagactggcggtcaacgtgccgttgtcctggctgaattcctcgtccagcacctcgaacttgcgcaccgattccgcacgggacacgttggaattggctttttcgacgtactgctggataaaggcgcgcaccgcatcattgtccgcaatctgcgacaatggcatatcggcatcaaggccctgctgggagagccaggagcgcaccatatccgggtcgagttcgatcaatgcgccgatgaacggcttgccgtcccccacgaccacgctgtgcgaaacgatcgggcaggtattgatgatgtcctccatcggggcgggactcacgttcttgccgccggcggtgatgatgatgtccttcttacgacccgtaatgtacacgaagccgtcatcgtcgatggtgccgagatctccagtgcgcagccatccatcgggcagcttgacctcagcggtaagctcgggcttcttgtaatagccgaggaacacattcggcccctcgacgagcagctcgccgtcatcgtcgacgcgcacccccatgccgggaccgggcttgcctactgatcctacgcgattggcatcctgccagttgacgatcatcggggccgcggtctcggtcatgccatacccctgaatgaacgtaatgtcatccatgccattgaagaaatgggccagatcgacgttcaacggtgcgccgccgcacgccagatagcgcatgttcgggccaagcgccgaacgaatggacttgcctacggtggacatgaagaacgaatgctcggcacgcgaggtgagcgaatgacgaccggtctcctgctcatccttggaccagcgcacgaaatgttcgaaggccttggcgaacagacggccgcggatgccggcaccggccttctgcgaggccgcgttgtacaccttttcgaatacgcgcggcacgccgagcagataggtgggcttgaaactgcgcaaatcggccagcaaatgcttggccccgggcaggtaaccgaccacgccttggccgccgatggccacgtactgaatgtacctggcaaaacagtgcgccaacggcaggaacagcatcagtcgattcggctggtagagcatctcgtcgagaatgatgtagccgttgagcacgatatgagtgaaattgcgatgcgatagcatcgcgccttttggcttgcccgtggaacccgatgtatagacgatggtcagcatgtcatcggccttgacccgcgcgatggccctgtcaagcgtattgccgtcgaccgcctggccgaaatcggcgacggcatcgaggccatccgcctcgaaattgaacacgtacttcaagccatcgtggctgtcgcgaatctgttccagtgtctgtgtatgcgcgaaatcaccggcaaaggcgataaccgggttcacctcttcgataatggaggctgcctgcctggctgaatccgtttcgtacacgggtacgctcaccgcgccgatcgcggcgcatgcgaaatcgacgacgccccattcgtagcaggtcggtgaatagatgaccaccatgctaccggccttgactccgagtccgagcagacctttggccacgccgttcactcgatcgagcatctgtccggcggtcacatcatgccagtgccgggtctcatcatcctgccactgggcgatcagatcgtcgggattccgctccgcccgtttggagagcaacgaatacacggtgtcctcatcagtggtgctgtacgcaggttccggtataaattcacgcaacatgagtccctatagtagttgccactttctcaaggcacgctgaaaacccttgaaaatggctatttttcgccgttttcaagggttttgcctgtttttcttccagcgatggcgggaaacgtcagccgatatcagaatatgcgcatttccaagctgttcccattcgttcgaacaccatgttgcaacacattcgttcggcaccgatgcgcaacatgaccacgcagtcgaatttttgaggattgaccaaccatccgttgatggatcccatgatgaccggcaagattccgattctggcgtgcaatctcgcatctctgcgcatgtgttcgaccaacagttgggaagcgttttccaaacgtttcaggcatgtcggagtcatcctgcgttcaatgcgcgccggtttcgtcctgccacggaagatatcggcggaatcacaggcgatacgtgccgagttcattgccatggcatgagcctgctgaggatcccattccatggcatcagtgcgcacgaagtgaaatggaatgggctcggcggagagttcggcggcgatgaatccgtcgaagacgggcaatggcgttttctgcttggtgagatactcttgccacatcatattggtatcgccattcggattcagtacggcatccaacccggaggacggaatatcctccgaaatttcatcgtcctcctgttcgtcctcctcctgctcctgcagatcatcatcgggaggggggacgtcttcttcgggatccttcatggggctcccctttcttgtacgttcatattcaccattgaatatgggggtacccctattacagcgttaaaaatcccttccgtcaaatcggcggaagggatttgtgaatatgtggataacccctatcaggggtggatgtcagcgggtgctacgtggggcgaccgtcaccgagcaacgctggaagctcttgagatcgacataacccgtagtggccatggcacgtcgcagggcgccgatgaagttggtggtgccatcggcctgatggcttgggccgaacaggacgctctccaaagaccctaccgtaccgacgttcgtacggaagccacgtggcagcgtctgatgacgggcttcggtaccccaatgcataccctgacccggagcctcctcggctcgagccaacggcgaaccgagcatcacggcatcggcaccaagtgcaaacgccttgacgaaactgccggagtcccccatgctgccatcggcaatcacctgcacatagcggccgccggattcatccatatagtcacgacgggcttcggccacgtcggcgatggcggtggccatcggggcatgaactccgatggtgttgcgattggcggagaccgcaccgcctccgaacccgaccagcacaccggccgcaccggtacgcatcagatgcagcgctgcggtgtagttggccgcaccgccgacgatgaccggcacatccagatcgtagatgaacttcttgagattcaacggctcatggttcttcgacacatgttcggcggacaccacggtgccgcgaatgacgaacaggtcgacaccggcatcgagcacagtcgaataatagtcttgggtgcgctgcggagacaaggctccggctacggtgactccggcgtcacggatttcatgcagacgttgcacgatgagctccggcttgatcggctcggcgtagatctgctggatgcgtccggtggcctgatccgcaggcaactgtgcgatttcgtcaagcaacggctgcggatcgtcatatcgggtccacaggccttccaaatccagcacacccagcgcgcccatcttgcccatggcgatggcggtggccgggctggtcaccgaatccatcggcgcaccgatgaccggaacatcgaattcataggcatcgacctgccatgaggtcgatacatcctgcggatcgcgagtacgacgggagggaacgatagcgacatcgtccaacgaatatgccagacggcccttcttgcccaaaccgatttcaatttcctgagacatgacttcaaggctaatgctcagcaatgacagtgggcgcaccgtgtccacctgtcgaatttggacatcgccacacggaattaacacacttccgctatgacggaacacataaccttcaatcccgacaggagggcaacacatggccaaaatcaaggtcgaaggcaaggtcgtcgaactcgacggcgacgagatgacccgcgtcatctggaaggacatcaagaatcgtctgattctgccgtatctcgatgtggatctcgactattacgatctgggcatcgagaaccgcgatgccaccgacgatcaggtgaccatcgacgcggccaaggcgatccagcgcgagcatgtcggcgtcaaatgcgccaccatcacaccggacgaggcccgcgtcaaggagtttggcctcaagaagatgtggaagtcccccaacggcaccatccgtaatatccttggtggcaccatcttccgcgagccgatcgtcatgagcaacgtgccgcgtctggttccaggctggaccaagccgatcgtcgtggcccgccatgcctttggcgaccagtacaaagccaccgatttcaaggtgccaggggccggtacgctcaccgtcaccttcaccccggaagacggttccgagccgattgagcatgtggtctacaactatggtgccgacggcggcgtggcccaggtgcagtacaacgtcaacgattcgatccgcggtttcgcacgtgcctgcttcaactatggcctgatgcgcggctatccggtgtacctatccaccaagaacacgattctcaaggcatacgatggtcagttcaaggacatcttcgccgaggtcttcgaaacggagtacaaaggtaagtacgaagcggccggtctgacttatgagcatcgtctgatcgacgatatggtggccagctccctcaagtggcacggtggctatatctgggcctgcaagaactatgacggcgacgtgcaatccgattccgtggcacagggcttcggttcactcggtctgatgacctccgtgctcatgacccccgatggccagaccgtcgaagccgaggccgcacacggcaccgtgacccgtcactatcgccgttggcagaagggtgaaaagacctccaccaatccgatcgcatccatcttcgcgtggaccggtggcctcaagcaccgtgcggagctcgacaatacgccagaagtcaagcatttcgccgaaacgctggagaaagtcatcgtcgacaccgtggaaggtggcaagatgaccaaggatctggccatgctgatcggcccggatcagccttggcttgacaccgaaggcttcatggacgcccttgacgaggcacttgccgcggctctgacggcataggagcccctccttccccgtttcatatgtttacggcctgaatatgtgcgcattcacgcatatgttcgggccttttcgatgaccggatattacaatcatggtcagcataggaatatcagagacaccagcgaaggaacgacggcatgacattgcactgcacggctatggcgaaacgactgctcgcattgacggcatcggcggggctgctcctgaccatgaccgcctgttcgacatcgggcgacgacgtctcgtcgacaacgtcatcctccaccagcgcatccagcacgacggaggatggcaatgtcgtgatcttcgccccctcggacggcatcaccatctcgcagcaaactcccttgagcaaatgggaaaaactggtgccggagattgtatcctccttgaaatccaaaggcgtaagcggcgggaacatcaccgtcaaaaccgcttcgagcctagataagcaaagccagaacgtacaggattacgtggtgaatcatgtaacgggctccgccaagaaaacgaagaccacgctagttgtggccccggtggcgaataccaccgaatcagacaggcaatacggcgattatgtgagccgcgccatcacctggaacgaggattcctctgatgaggacgagcaggattacgcgcaatccgcggaacgaatggtcgcggcactgcgactcgcccaggatgagggaatgaaggtggtactgatctccaacagcctacaggggtacgttccggatgccttcgtgaagatgtccgacgccgaacaaatcggtatgctgcaggctcagaagctggtgaacaagctggctttggataagacgagttcggataatccaaagcatatcgaggtgttgcttccctacgatacgaccgatgagaacggtcagaatgccgatgcgactttcgcgcaatcggtgttcaaaggcatctggaaggtgctgagcccgtacttcaaagacggcaaagccataagtccatccggcaaactgactgcttccagcaccgatgacgactggcgggaagtggcgttcgaagccaccaaaagcgatcaggtcaagcaggcgctggccgaacgcctcggcatggataaggacaaatctcgccatacgcgtatcgacggcatcatcgcctgcaacgacttcgtggcggactcggtcatcgccgagctgacggatttggcgtataccggttcggcggcggatgtcaatccttcgatcacgatttccggaatcatggacaacatcgccggcaaacatgatttgaagaaaaaagccgtccccgatcccgtcaaggccccggagtcagatgacgatgatgagtccaccgacgattccggcaaggacgaatccatcgacaagaagaatgcgcaatggccgatcgtcactggctatggagcctatgcgagttccatgccgagcatcgtgaacggtcagcaatggatgaccgcactggagaatcgcaaggcttttgcacaggatatcgccgaggtgtgcgtacgtttcaacgcggcgcggaagatcagcggattacggttcgtcgataccaccaccgtcggcggccagaagacgcccaccatccaggaagacaccttggcggtcagcgcctataatctgaaaaacacgctcatcgaaccgggatacatctcacttgccgatgccggcatgtgaccgattccatcgaatccgtaagtggcgcaagggcccgcaccgcaatctccggtgcgggcccttgcgccacttacggatgataggagcctactttttcggcacgtagatcacggtgtcaatcagcgatctatagtgttcgacgactgcttgacgacgtgccttcatgctcggtgtgaccaagccgttcccctcggtgaactcatcgggcacaatctcgaactttcggatggattcggcacgagataccagttcgttggctttattgacggcacgttccacctcagcccgcacgatcgggttcttcgtggcctcctcaagattctccacacgttcagcgccttgcgattcaagccacagattcgtctccgccagatcaagggagataatggatgcaatgaacggcttacggtcacctatcaccacacactgactcaccactggagaagtcatgatggaagcttccatctcgcttggggagacgttcttgccacctgcggtgatgatgagatcctttttgcgtccgacaatggacacgaacccgtcatcgtcgatggatccgaggtcaccggtgtgcagccacccatcgacgatctgctgctcggtaacgtccggatggttatggtatcccacgcatacggccgggctcttgatgcagagttcgcccgtctcgtcgacgcccatggtcacgccttgcaatggcagaccgatggtgccgatcttatagccgaccgttggattcacgctggagggagcgcaggtttcggtcatgccgtatccttcgagcaaaggcagtcccacgccattgaagaagtgcgcgatggaggagtcgagcggcgcgccgccggaaaccgcgtattccacatgtccaccgaacacatccatgatcgacgaatagacaagcttgtcgtacagcgcatgcttcataccaagcgccaacggaatgccctcgcctgactgctgggcgtaggaccagtcgcgcgccacttgagtggcgcctgcgaatacacggcccttaaggccggaaccggccttttgcgaggccgcattgtagattttttcgaagatccgtggcacggctaggatgaatgtcggtttgaatgcctggaaatcggccaagatggttttgagattgccagacaggcccagtgaaacattgccggcgaagcagaagaactgcatatagcgagcgaacacgtgggccaacggcaggaacagcagcagtcgacgatttggcttcatggcgatgtcaggcatggaattgacaccggaataggtgatgaacacgaagttcgcgtgggagagctcgatgcctttgggcgttcccgtggagccggaagtatatacgatggtcgccaggtcggaacctttgacggcatgttcgcgttcatagaattccgcatcggatacggagcggccgtattcgatgatggtatcgatcgcaccgaaccgaatcacatagacgtcgcccagatcaggacattgcgcacgaaccgattcgattttgtcccgctggccgtcatcttcggcaaaggccatcttgaccttcgaatcgttgaaaatcatcgtgacctgtgccggtgaattcgtctcatatacgggcacggtaagcgcgccaatggacatgatggccaaatcgagcgccgtccattgccagcaggtatgcgcagtgatggataccgagtcgcctggcatgatgccgcgtgcgatcaggccttttgcaatggctatgaccttggcttggaattcggccgcgctgaaggacgaccactcccctgcctcgttcttatattcgatcagagaatcgttcggcgcgcgccttacacgctcctcgagaaccgaaaagacgttcttgtcggcatcgatcgactgttccaaaggacgcgtgtattccttatacatgacgctattctcctcaatgcatgaacctacaaatatgcatcatagtcgagccgatcatattactcggaattcgccacactccttcagcttcttcaccggtgtcacccatctggtttcagcgcgatcgtcactgccctaactttcccctccggatcggtataaccgtgatccgcacccttgagcccccagtgcaggcagacatccgcgcaatggtcggaagaaccttcgacgtgcgcaaagatacgcccgcctttgaccattgttccgacggggagatcggtggtggccggctcgaaggtggaagtcagctccccgtgcagcgtgccgtgacgtatggtgaccaccgatttgcctgccacgcttcccgcaaaggcaatcatgccgtccgctggcgcaaggagttcttcgccttcctccacgttgagatcgattccccgatgccctgaaagccattgtttttcaggtgcttggtatcgcttcattatgctggcgtccgacacgggccaacgcatgagtgcgctgcactcgccgctcgaatatgatgtcgtgttcgatgtcgaagcctgcgatggccgtaccatcatgcagcagatgatcagcgccgcgatcgtggtgatcaggcaggagatgatcgcccgtctgccttgccgctcgcaatcgttgcgctcagtgtcgcattggtatcggtatcgtcggattctacgctggtattcccgttcgttcaccatggctcctttgccgttttctgccagcatgaggaccctttatcttccccgtcaagtcgaaacggaggttgtggtcggaggacggtggttatccacaggctccgggcgtgtcgcaacctacgatggaaggcatgagcgacaataccacgcaacgtaaggcactacggcagctggaagacgaaccggccgatgaacggatcgcctactatcgcaaaccgttcatggtgctatgggccgccgtgcaggaggcctcgagcgaattgcaggacgattattcgctctcccctgaactatcacagctatgggtcgccgaacgcatccgccaggtggcggattcactggtggaccgcttggctgaaacggcgattgcccacggggaatccaaatcgaacgtggcgcgcgcggcgggcgccagccccgcgaacgcattgcgtcgtttcccccgccttcgtgaaggcgaagggcgtgagcgtacgcttatcgatgaggtattggattcactggaatgacaaaagccctcggtatttcgagggctttcctatggctcctgcgactgggcttgaaccagtgaccgtccgattaacagtcggatgctctgccaactgagctacgcaggaatgcgctgtgcacaagatgaagatgatactccggaatggtgctactgcaaaacctcagcgtgtcacatggaaattctggttaaaggcatggcggagtcgatcggaaaatccggagtggacggcttgactcccgcttcgaccagattgacacccaacatggccaccatcgcaccattgtcggtacatagtttgatacggggaacacgaacctcgaccccccgttccttgccgacttccaacagtttggcacgcaactgggagttcgcggaaaaaccaccgccgacaatcagtgtgccggaatcatactgttcacagcctcgcatggctttttcggcaagcacggtggcaacggagtcggccagcgaagcgcacacgtcgtcgacgggaatctcaagacctgcggtctgacgctgttcaatccaacgtgcgacggcggtcttgaccccggagaaactgaaatcgtatgggtgttgccttccggctttgccctgggtgagtccctgcggcaccttgatggcatgtgggtcgcccgactgggcgtgacggtcgatatgcgggcctcccggataggggaaaccgagcagtcgtgccactttgtcgaagcattcgccggcggcatcgtcaagggtggtaccgaccacatcgatgtgccgggccacatcttcaacgtgcagcagcgaagtgtggccgccggacacgatcagcgcaagcgtgtccttgggaaacgggccgaactgcagttgggtgacggcgatgtgcccaatgacatgattgatgccatagatcggcttgttcgcggcccaagccagcgctttcgccccggaaacgccgacggcgaggcaaccggcaagaccagggcccgcggatacggcgatggcgtcgatgtcggacagcgtcatatcggcgtcggccagagccttcgacacgcatggtacgaaagcttcggcatgcgcccgtgaggcgatttccggaatcacaccgccgtagcgcgcatggtcgtccatggatgaggccacgacgttggaaatcagcgttctgccctgcactacggccgcagcggtttcatcgcaagtggattcgataccgagtacgattggttcgctcattggttggacactccgttagttctgtggttggaagccgatggttcgtggctcaagatcgaggctcatggtgtaggcatcgattccttcgggctggtaataccgtttgcgcagacccatcctgatgaaaccgaaacgttcatataatcccaatgccggcacattgtcgacgcgcacctccaagagcatgcgtttcgcgccctgccgtttggccgattcgatcaaggattgcaggagcatcgccgcaattcccctgcgctgaaacgacctgccgacgccgatggtcatgatctccgcatcatcaccgtcataccagaagccggcatagccgcgaacgatcggaatcccatcgtcatctgacggttcaatatccaacaggtaagtacgtgccggcgcattgagttcctgccggaccgaatgttcgctccaggcgccgtgaccgaacagatcagcctccagtgcgacgatctgtctgatggccgcatcttgttcaacctgcgtatgatcgacaatcatattcgctgcatcactccgttttatcggcaccggcatggttgagcacatgcttgagcggattcggtacggatacgtcaggacgtcgaagatacagcggttcaacgggaacgggacgggccagcgactcgtcggatgtggcgaatgaggcgaaccgttccaatccgtaggctcctttatcaagcagcgtatcgtcggacacggagccgagcgcagccagcgaatcccatgtcatagcgtatttcgaagcgccatggcctacaacgtcgaccacataccgtacgttcggacgatccgctcgcagcagttcaaccgcggcatcgacccgtcgcacgatggattgcggatagtcgatgtccatgccgaccaatgttcggggcatggcgctcccccgtgccgaatccatcagcatgaagtacagttgccgacgacgggcatcgttgattgcaagcgtcagatggcacgcgtcatcactggcgtattcatcgaccagttgcgtttgcggtgaaagcgcatcctgtcccaccagttcggctccggtggcgaatgccagcgccttggctgctacgatgcccgctcggagtcccgtgaacggcgccgggccaatgcctaccacgatgcgctcgatatccgtgggtctgagtcccgcctgttcgacggcatgggcgatgttcacctgcagtttctcgacatgcgtacgtgaatcggtctccactatgggctcatgcccgaccacgccgaccgtggaaccgtacgaggtgtcaatcaccagtgtctgcattttcaagaactccttgtgccaaacctctagatactgtacaaccgacgctagaagcggccaaaacaacgatcagcgggatccgtttgcgaaatcgaagccactccaggccgcgccgatcggaatcatggtgatgatgcgcacgccgtcgccggtcagttccctgtcatcccccgccgtgtcgacatcgatcggtctgtcgatatggatttccaaccgttccggcgcaagggccgcagccatctgctcgccccactccataagaattaccgtattatcgcttggatcctccaactcctcatccagtcccagagattcgagctcatccagcagccggcccacggcatcctgtccgggagcgtaggcattgcctccaagacgataggcgtcaacgtgcaccagatgtgcagaagacccatcggagaagcgtccctcaagctcgcgtgcaatggtgaatgtcggagacacgatgggctccgtgatgccgagccccgcgccgaaaccttgcgcgaatgtggttttgccggcaccaagcggcccggaaagcagcaccacatcccctccgtgggtcagttttgacaatcgttcgccgattgcgcgcatatcgtcgccggtctcgaccatcatagtgatgccgttactgttcatgacctgttgatccgtcctttttgactaatgagttcgatggagcgttccagcgcatagaccgggtctcctccactggttttgctttgctcgtccgcccatgcaagcatctggatgcatcggcccagacctgccgaagtccatccgggaagttgccgtgtggcattcttgagtgcccacgggttcgttttcgcctctgcttgagaaatggtaccggcacgcacagccgacgctttggcgagcgtacgcagcttcatggcaagggctccgatcagcgcaatcggatcgatgccctgctccaccgctgatcgcatggcgatgatggcatcggcggaacgaccggccatggcctgatcggctacgacaaaaccagtgacctgcgggttggaatcaagatactggttcacacgattcaatcccattggatcgtcatcgaaatcaaaacacagctgggcgaccatcgcagcaagctcaccggttttctcgccgagtacggccacaagctgctgtgctgccatcgggtccacacgacggtttctacgatcgaagcattgcatgacgaagttgagcttggcgtcagcctttttcagatcgggcacgacttgtttgtcggctccggccttcgtgagctgatccaccagtcgtttgcctttgactccgccttcatgctggcagatgacaatgctgcagttcgtgggatccttgcatgactgcctgcaatattcgaccatggcatcaccaagcttttcgtcggcgccttgcaggttgacgattttcacgatcgcccgatcgctgagcaacgaaggactcaccgcttcgtcgaaagcataatgatccgcgcccattgcatccaattcgatcagttccgcatcaggatacttgcgttgcgcggcaacacactgatcgcgcaccgtctgttcattcagatacgaatccccgccaaagacgatgtgaaatggcgtattcgttgcggatgttttcggcatagtattcaatctcgccgcatcggtggacaagcgtgccatcatcagccggcatcccaatgcatgtttttcaacgcggcgaacgtgagcgtaccccacaggcgcaatcgatccatgggattgctcagcatacgacgaccgggcatgccctgttccggcgttcccgcgcgtcttgcgatgcgacgcatcaaccataccgaacaagcgcagaccgactcgacagccagaaccaacatcgcgcctggtatgccgccggcccatgggatggtggcgtgattgcccgatcccaaatgcaacgatacgatttccatgattgcggtgccgcaaccggatagccacgccagcacgaacccgatatcgggcagtatccaagacaaggccaatgacgccagtccagccaacgtggaaaaaccgacgacaggtgagaccacaagattcgccagaatcgaaaataccggcagctccggttcgatcagcacctgtaacggcaaggtgaacagttgtgcggcgatggtcatgcctgcagcctgtgccacgaatagcggcaacatcgctttcagccaatcggtcatacggtccgcgaacagcactatgcccagcaccgcggcacacgaaagtgcaaacccgaagctatatgacatgtacggctggataagcaacacgcccatagcggtccagcatagggtacttagcgcctgtccacgccgtcctacaaacagacaggtcgcgccggccagtcccatcagtaacgcacggaagacggaatccgaaggaaacatgcaacaggacaatgcaatgtaggaaagaccggtcagtattgccgtaattcttcgtggcattacgaaaaacgcgcaaatcgtacggaccagcgtggcgaccacggcaagatggccgccgctgaccgccatcagatgcagaattcccgatttccggaaatcatcctccaatcggccggcataggtggcatcgatgccggatccatcggtcgagtcttccgtcggcacgtaatcctgtccgagaatgcccaatgtcagcccgggaaccaacaccttgccctgatccgaaagcctgccggtctgtatgaaaaaggaacgttgcatcacatcgacaagacggaagacggcattcggcgcgcgaatcatccgaatgtcgtccacgtcggtcagccatatcggcatgctgccatagtcggatggcatcagcatgccgtccaactggtatgtgccgtcctgccgcaacatggcgcagtcgggctgatcggcgtatacccgtatacgactgaccgatgcccgaacgagttggccttcggtcacggtttgcaatacggcatccgcttggcagtcattggcgcgcctgttcgaggcaaccgtcggcgaaacgacatgcagccgcaccgtaaccggcgttgttcccttcctcgccagcgacgaggacacgtcattccattgcacaagatcataggtcagtgcggtgcaggagcatgccagcatggcggcgatgcataccacggcaccactgtgccaagcaatcagcttggcggcgttcgggccgcgcagtctcaacgacgccaatcccataccggccaccacagtcatcagcaatatgatggcgattagtgccgggcctgcgtgtgttccgttcgccgtcatcattgagaacgcagcatgcgtgagaagacttgccgaccaactcagcaccgtcacgggcaacaggcgccagtccctgctgcctcgctcacgttcggaccaccgacctttcccgttcatcgcacgcatacctgatcacggaatttggccaacgtcttgcttccgatgcctttgacctccatcagctgatccacattgtcgaaacgaccgaactgcatgcggtaatcaagtatgcgttgcgcggtaaccggaccgattcccttcagcgtctgcagttcctccaagcctgcggtattgaggtcaagaaggtcggaagtgggatcggtatcggtcgattcggatcgtgccgtatccggctgtgcggatgaggcggatgtcgacggcgatgtgccggatgaaggatgtgcggtttgccgtaccgtgggttgcgtggattgcagttgtgcatagtgggtcgcctgttggataagcatggtcaggcttgcgcataacgcgcaggtcagggtcagcatcgcaatgaccgcatgaatcggctgaaatatgatgcgtggcttatctcttcggctgcgattgagcggctcttcggagtctgatggctggacacccgccaaatcggccagtgatggtttgactgcaatggcacgccgcacttgcgatgatgcccgggcgtacgatcgtgcgggttgaggacagtacgcagacggatgaggctcaggccttgacgttgtttcgggagcattcaaccgttgcagccgcgtcatcggtgcggctgcgcccatatgcttctttctgataacgaaaacgcccatgactccacgctgatggaatcatgggcgtttgtccagtcgaaacggcccttgtggtcgaaggacgttagttatccacaggctcggcgtgtcgccaagcgggagaacgattcagtcctttcgaaggccttcggtcgtcattccgcggggacgatcgaaacgatcttcggcgctttgacgatcaccttgcgtggctccttgccgccaagacggtcggcgaccgcttcgagggccatctgctcaagctccttcggatcgatatccggagtgacctcgagtttggcacgcaccttgcctttgatctgcaccactgcggtaacggtgtcttggccgacataacgttcatcggccttcggccagtcggcatgggccagcgattcgtcatggccgagcctgttccacagttcttcgcagatgtgtggtgcaatcggcgaaagcatcagaatcagcggttcgatggcggcacgcggcacgtcatcaaggccagtcagatgattgttgagcacaatgagcttggcgatggcggtgttggggcgcatggcctccatttccacggtcacgtcggcaatcgtgttgttcaggagtttcagggtcttggagtcgaggtcaccctcgctgacgcgaacctcaccggtggtctcgtcgatgacgttacgccacagacgctgcaggaaacgcatggagccgaccacgttgcgggtgttccacggacgggattcggccagcggtcccatgcccatctcgtataggcggaaggtatccgcgccgtagttctcgtacatgtcatccggggtgatgatgttcttcaggctcttgcccatcttgccgaactcgcggttggcgtgttcgccgttccaggtgaaggtcggttcgccattggcatcggcaggaccttccaccacttcggcggccggcacgtactggccacggtcgtcggtgtaggcataggcctggatcatgccctgattgaacagcttatggaacggttcggcggagtcgacgaagccgaggtcgaagagcaccttgtgccagaaacgcgaatacagcagatgcagtacggcatgctccacgccaccgatgtacaggtccacgccaccggccttgccggtggtctcgttatggttcggacccatccagtaatcgtattcgtccttctccaccatgtgttcggtgtcggtcggatcgaggtatcgcatgtaataccagcaggagccggcccagttcggcatggtgttggtgtcacggtagtaggtcttcttgccgtcgcccagatcaagctcgaccttgacccaatcctcattgcggctcaacggtgcttccgggttggattcggcatcttcggggtcgaaggtcttcgggctgtagtccggcacatccggcaggttgatcggcagctgttcgtcgggcagcagatgcggggtgccgtcctcaccgtagacgatcgggaacggctcgccccaatagcgctggcggctgaagagccaatcgcgcagacggtagctgacggtgcccttgccgacacctgcggattcaagccatgcattgaccttgtcaatggcctcgtcgacgcgcagaccgtcgagactcagggcatcgcccttgatcttggtggacgctacggaagagttgatcacgatgccgtcgtgggagacgaacggagccttgccctcgtagtcggccaggtcatcgccggattccggcagcggcttgacggtatatatgaccggcagaccgaacttgacggcgaaatcatagtcacgctgatcgccacccggcacagccatgatggcaccagtgccataatccatgagcacgtaatcggcggtgaacagcggcagcttggctccggtaattgggttgatggcatacaggccagtgaacagacccgtcttttcgcccgcctcgtcgacacggtccttggcggtcttggcttcggcggccagacggtaggattgcacggcttcgaccggagtggcatagccacccttccagttctccggggtttcggcaggccactcgtcggggacatcggcgagcaggtggtgctccggagacacgacggcgaatgtggtgccgaacagggtgtcgggacgagtggtgtagatctccatgtccctgataccgttcggggtttcgacggtgaaatgcacggaggcgccatgggactcgccaatccagttacgctgcatcagcttgactttttccggccaatcgatgccgtcgagatcctcgatcagacggtgaccgtaggcggtaatgcgcatggaccattggcgtagctcgcgctggaacaccgggaaattgcctcgttcggacttgccttcggcggtgacctcctcgttggcgagcacggtacccagtcccggacaccagttgaccggggacttagagatgtatgccagacggaagtcgttgagcacatccgcccgttcggcttcattcaagtcggcccaggacctgccctcacaacccggaatggcgcgcgcaccggattcgaactgttcgaccagctcgctgatcggtcttgcgcagcctttggaaccgctcggattgacggcttcctcgtcataccaagcgtcatagatgcgtgagaagatccactgggtccaacgcacataacccggatcgatggtggcgaaggagcgacggttatcaaagctcagacccatgcgatgcaactggcggcgcatgttggcgatgttctgttcggtggtgatgcgtggatgctggccggtctgtacggcgtactgctcggcgggaaggccaaaggcgtcatagcccatggcatgcaacacgttctcacccttcatgcggtgataacggctgaccacatcggtggcgagataccccagcgggtggcccacgtgcaggcccttgcccgatggatatgggaacatgtccatggcgaagtaggatggacggccttccgcgttgtggcccttgccatccttcagctcgccgttgacgttggccgcccagaacgtaccctcgtcatcccagatcttctgccatttctcctcaacgccttgagccagcttcgcattgtagcgaaacgacggctcggcggattcgttcgactgcgcctgtgcgcttttctcggtgtcattcataatgcatgaaactagccgcgcaactggacacttggcaaggcgataatcattatccaagaagcggcatgcagattagtttttccgccgcaccgtaggcgggttcgacgaaacgtcgacggtgtatccgatatcctgcttcagggcttgcaccgcactcgaccatgaaccgtccgcgaccatggttttgagtgccgcgtcaatctgtccgaccagctcgctcttaccattcctgacggcgatgccataggattgttcgccgaacggttcgccgaccaccttcaggtagccgcctcccctgtcggccgcaagtcccgtaagaatgacgtcatcggagatgatggcgtcggcttcgcctatcatcagcgccgtgacgcactgcggataggtgtcacgttcctcgaccgtcatcttgtcggtcaggttccgcatatcggagccggagatggatcccttggccgtgcatacggttttgccgtccagatcatcgacactcaggatcccatccttatcatcggcacgaatcagcaaatcccgacgtaccgtaagatacggtccggcaaaggtcacttcgtcgtcatggtcggtgttcgtcgcgaaggaatccacgaccatatcgacatcccccgaagtcaatgccgaaacgcgagtcgagggaatcacctttgcgaacacgacctgcttgtcggcaaatcctaggtattgtgcgacgtatcgggctacggtgatgtcgaacccggaataatccttaccgtgcagcaagccgagtcccggctgatcggtggctacgccgatggtgatggtcggcccctgcgcctggccgttggtcaccacggagatggaggtgccgcatgcgctcacgccaaccacaatcgacgcggcacacagcatcgccgcaatgttccgtatcccgtgcgtcatgtaaccgccttccgaacacccatcatgcgccggcggcgggaccaccggccggtgacgcacaatctacttgaacatgcgtgaacgagtaaggaaccaagtgacgattcccgaaagcaccagtgagatcaggatgatcaccacgaagccccacggcttgtcggacaacggcatgcccaacatgccttgctggaagttcatgccgtacatggagaagatcaacgtcggtatcgacagcgtgatggagatgatggtgaagatgcgcatcacgttgttcaggttgttcgacacgatcgacgcgaaggcgtcggtcatgttcgcaagaacgccgctgtagatgttggccatctcgattgcctgcttgttttccgtgatgacgtcgtcgagcagatcctcatcctccgggtactgcttgatacggggcagggtcgttagcttctccatcacgatttcattcgatttgagtgacgtggtgaagtagaccaaggtcttgctcagttcaagtagcatgaggatctcacgattctgcatggaatggcgcagtttcagttcgagcttgtcgctctcgcggtcgatgatgcgtaggtaacgcagatacatggtggcgttgcggtagaggatctgcaggatgaaacgcgttttcatgtacgtgttgaaaccgcggatggtaccttccatgaacggatgcagcaccggggtgtcctgcatgcagacggtgatgatcatcgactgcgtgatgatgatcgacaacgggatggtctcgtaccagtcacgaccgccgcgttcctcgacggtcgggatgtcaacgatgatcatcgtgtaatcatcctcgacatcgactcgcgagcgctcttcgtcatccagcggggcgcgcaggtcggccaggtcgatgccggtttcttgggcgacgctggcgagctccacgtcggttggttcggacaggcacagccaggagccgttctcaggtttttgaatctgttccacctggccgttaatcgttctgaacattctcaacatgtctctcacccgcctttcgcgctttctgacgttctatcgctgtacggtagcccgagatccgcggcaggaaaccgtgtgaccgggcatacaacctcattaaggatagtcctatgcgcagaatttgagatgcgcagggtgaaacgttaaccgactgttcatgttccggctgtggaatcggggtttctcggggtgtgtccgtgagtccctttactgcatgatcggtttccattgcggcatgttcggtcctctgaggtcgtcgggtccgttctcccagtcggtgaatgctgcaatggccggaccttggttgaattcgtcaagtgtccatcggggtcgttccgcatcgccggcaggcgtcatgcgtgaccagaaggcgttgcgcatggagccaaggttgctgagactgtcggggtccatgccgagcagtgtttcgatggtggcgacgatccaggatccgtggccgacgataagcagtgtggtcggcacgatgttttcgcggtgtcggtcaagaatgtcgagcaccgcccggcttcctcgttgtccggtgtgggtgcggctttccacgccatggttgagttctccgccggtatgtgagcgccatgagtcgtagtccggggcgttggcttctcgtatttcctcacgggtcatgccttcccactcgccgaaactgcgttcgcgtagcctggagtcgtattcgacgggcaggccgagcaggttggcgaaggcgcgcgcggtctgttgtgcgcggaacaggtcggaggagatgatggtcatctggcgtttcgatgccggcgcttgtgtgatttcgttcgggtcggcgagatgcgcgtccggtccggttggttgttgcagggcttcgggatgctgtgcctgattggtgattttcgcccagtagtatcggcgggcaagttcgtaggcgctttggtccacctgccatcggccgacgatgtcgagggggatgtcgatttggccttgcagtcttctgccaaggttgtaggcggttcttccgtggcgtaggaacagtacttcgtcgatcatgatgctcattgtatccgtgggggcgtctgcgccagatgcgtcggtagtggcggatgatggcgatggtgccgctccagatgatggcaagtatcgctcccgtcgaggcaaggacgttggctatggcgcatccggggtcttgggatcgttcatcgtggttgggtatgcgggtgccggtgacgagcagtctatgcgtgttgatgccgtatggcgtgcaggtgagcagtgtgaccttgtcttgcccggtttccggtttgacccagcttacgtcgtcaggggtgacggtgcgtatggattccactcggtaggtaagcgtttcgtctagtgtcgtgagggtgaattcatcgcctttcctggcttggtcgagcttggtgaacatgagtttgtcggccaatcccctatgtgcggtgattacggcatgggtgcctttgccgcctatgggcagcgatgttccttgccagtgtcctgcgccggccgcaagagagttctcgtcggcaccgtgacgaatcggcagattgatgcccaacctcgggtatgcgatcgtggacatgatatcgctgggcggtatgacgagctgttgggcgtattccggtatggtttcggtttgccgtaccgtttcggactcgaggtcattgccgctggcgagccgttcattgtatcggcgcgcgtcggttttcgtctgcgtgatgattgcgagcgccgtatcgttcacggcgctcgcatacgcacgcgtgtcgaacatttgttcgatattgtcggtggtgcgcagggtgagcggaaggctgacgagcagggccgtggccagcagcattgccgttcccgcaagccagcgtatgcgtagccgcaagggtggttcatacttgtgccgtgccttgcctgtccgcctgtccatcattgcgaattccgtctatcggtcggcggattctcgtgtgatgcgcagcaatgcgaggcctccggatagcagtgccgcggccagtaggaggattgcggtcagtccggccgcgccggtcaatggcatttgcactatcgatcgcacgttggtgacggtcacggtttgcgttccgtcaagtttgatcagcttgttggggtcggatttcacttccacgccgtacgtcccctgttgctggttgacgtgtacgttgatgacggcgcttggcagcatcagtgatgagaaaccttccggggccttcttttcgctgatggtgtattcgccgttcaatcctccgatgcttacattgccggccaggatcgtcgtggtggtcagtttcgcctcatccttgtccgtggcgagacggtaagtgccgtcgtcgatgcggatcagtttcaggggctctcctccattcgcaccttcggcaatggtgaattcggcaccgctgaggtctttgccgtcggagtccactttcttcaggttcacggcgcctgtgcagacgttgacttcgttgccgggcacatcgttatggtcgttccacgaattcgggttgtgcgagtattcgaggctgatggaattggggttgcattgtggcgcgatggcggcgtctccgttgagtcgcgcggtgtaggtgacgacgattgtcgccccgaccggcagggcttgcttggaagcgtcggagacgagcacgtcgccttgtgcgtcgccgaacagccaactgaccgtattcgaggctatggtctcatggtagaagtcggtcggcaggcttttgccgtcaacggtgatggactgtaatcccgcatagtcgatgcccttgccgaaggtatcgttcagtgcgaggtagtagtgttcgtatccggtccaattcgggattttctgcgtgatgcggtaggtcaggttcttaccgatggcttcggtggttccctctttccatgcgtcgccctccttgacccgcttgtcgggtgtttccacttcggaaagcttgtagatgacctgtccgagttcgacggtgctgccatccgccgtaatcagttggtctgcgccgctgacgccggtaccgttcatcatcatgattgacgcggactcggattgctgctcaacggtggctggagtgcggtccacgacggcgtagatgcccggggtcagcactgctccggttgaaatggtgtctccggcggcattgagttgcgtgaacttcgtgccttgctgttgcttgaacgcgtcctgtttggcgaggctgtcgcagaaatcacgcagtcggccgccccatggatgggtgttcgcatcggtgagggtcctgacgacccagaccatgggatcgagtgtgccgttgacgttcaggtctttctgcgtggcgccgatatccttggccgccgacgcgatggcatcgcgcaacgcgggtatggtggtcaggtcatatccgaccatcttgccgtcggtcacgttggccgcggtgtaggaagccaacggtatggccgtcaatgtcttgcctttaagactcacctgcgtgccggcctgaacgctcatggattgtttgactttcaggtcggccaattgcggtgtggcctgagccgccggctgcaggatcatcgccgcgagcgtcgccattgccaggcccgcccatcgacgtcgtgtcgttcgagatgtcatggttcaccttctttggtctatatgtccccgaatggtcgtcatcgtccacccgtgcagcccagcatggcagaacctgtccgcccatgccaccggctcgacggattctgtggatatgtggatgaatcatggttatccaccgcaatccacacgctcttatgccccgtcttgcaccctcttctatactggttcgtcaggggggtgcgcaagcgtgccccattcgggcagaaggggccttatggcttgcaatacgattaattccagcatcggaatcttcacgctggcgatacttgcggtgctgattgtcgccgtggcgctcggcgatgatacgcgtcggagtcgtatggcattcgcggcggtgctgacactgcacgccgtcaacacgttcggaggtctgctggcccagaggttcaccggtcttgacgacactttctccatcatgatgacgtacatcggcaactatggtacgtacatggtggggcctgtggccgtcaccggcttcattctgctggcatgtgccaatctgccgacggatctttccccgaaagcgaggcgtacgaccaccggtctcatcgtcacgccgggcgttttgaacatgctgctgatcatcctcaacccttggaccggctgggtgttccgcatcggggaaggcaatgcgttcgtgtgggggcctctgcacatgctgccggataacatggccgcactgcagatgctggtctccttgctggtggtgccactcgcgaatgccagaggagccaagcacgtcctgctgcaatggctggccctgttcatgctaccgatcgccgctggaatcgtggagaatcgccatgattcgttgacgttgatgtacccggccatcgcgttctccctgatgatactgttcattctgcggcggcaaagcaacgaagaacggcgaatcctcgccgaacatgaattggcggagagcaaggcgaagctgtttaccgagcaattacacccacatttcatcttcaattcgctgaccgccatccaggagttgtgcatggaggattccaccagggcgagaaaggccgtgcaggagctgtccgtgtacctgcgcggcaacatcgatgctgtcggagaatcccaactggtgcccgtgcgcaaggaaatccagcatgtcaaggcatacctcggcctggtgcagaccgacaccccgcacagcatcaaaatatcctggaacatacgcacattggatttccgtcttccgccactcagcatgcagcctttggtggagcatgccgtcaaattccatcttccatacgcgtatgatccggcactcgtcatcaaggtatggcacgatgacgtggctgactacatcagcgtgcatgacgatgtcgaatccgaatgccccgaagaagccgaccatcacacggccagcttggatcgcgtggccaaacggttgggtatcatctgcaatggttccctcacatacgccagtgatcacggaacgaccctgaccatcaccattcccaaaggcggtaatgcatgaacatcctcatcgtcgatgacaagcagcttgcgatcaatgcattatgccgtattctgcgcgatgtcgagcctgacagcacctgcatgaaggcgctgtcggcgcaacaggcgttggacgaggcttcccgaacccatttcgacgtggtgtttctcgatatcgaaatgcccggcatgaatggcatcgaattggcgcaaaagctcaaggcatgcaacgagagcattaacatcatcttcgttaccgcccatgccgagcacgcgctcgaggcacacggcatgtacgtcagtggattcctgctgaaacccgccagcgaggatgatgtgcgcaccgcattgtccaatctgcgcaaccccatcgagtcggagaacgacgaacgtatcacagtacgctgtttcggggatttcgatgtgtttcatcacggcgaaccgttgaagttcgatcgcaacaaatccaaggaattattcgcgtatcttgtgcatcgtaaaggtgcacgctgctccatcagcgaactcatcaccgcattatgggaggatgcctccaactcggcgtcgcgccgcacccaagtacgcaatctcatccacgatctgaagacgacgttggaaccgatcggccaagatgacatcatcgtgcgcggccgtgacagcgtggcaatcaagacggaagcgctcaactgcgacctgttccgtttcctgaagggagaacccggcgccgtgaatctgtatcatggcgaatacatggcccaatatgactgggccgatatgacggaaagcatgctgtaaagcgttcaatccgccatatcggaccgggtccatcggtcaaccatcccgtacgggtttggtgaaccgaccatgatcgtcaatccttgacgatggtctttccggccgtcgctcccggtgtcagatcctggatttccgtgatctgcaacaccggaatggtcatgggcttcttcgtgccgcgttcctcggcgattttgacctgttcctcgtaaatcgcgtcgttgtcgtgcagtacgacattgccacggaaacggtagcctttcctctgttcgaggttcgcaacggcaacgaccaattcgctgccatcaagcagattacggtacatttgtccggcggtacgctcgtgatagccgatgtgattgtcgtcgatgatgaacatgctcatcttcggtccgagatccacatggccgtccttgccgatggtcgcgacccatgccagattgccgttgaggaattccttcatctccgcagtgagatttgccatgattgcggtcctttccaactcgtgcgtctgtggtgtaagacgtgtttccagactacggcagcaaggctttcgacacatgttcactctgcgtgaataccgtcacattgactgtgctgcgccaatggcctgttgcggttggttcatatcggctcagttcatgccaccggttcggcaacggttcatcatacgaaaaaagggcttccgactttcatcggaaaccctgttcgtggagctaaggggattcccctaccttggtgttattccgccgttttaaaggtgtgtcgcaccatgctccacctcattctccacctaattatcaggaggaactaggagataagcagttccaacgccgaatcgcattgaccgttcgcaagcatgaggaatacccaagcgaacagtttgacgagaatttgattgaattgttggaacagacaagcccttgcatcgatggtgaggaacccttggaaatggttgttaaggagccaatcattgtttatcgtggagaaatcgataagagcgtgcatatgggattgagttggacgactagtctcgaaattgcaaagagattcgcgggtagattcggtaagcagggaagcatcttcaaaaccgtattggagccaaaagaaatattggcggcttatgcagacgatggcgagcacgaagtactcgccatcgtcctaggggaggatataaatgccatttggggttctacgcacgagatatcttttacgttaggcggtcatgtgagtttttaccacatgtttccttgggagtcaccgtctatatcaaaatggcaggatgtaccgtcgcatcccttgaagttattggaggtcatcggagaagccccaccaccggcactatccttgtaatttttccaatcccaagtgccactgcccggcgtggtgccactacccgtcgaattagacgaagagttggaaccgttcgatgacgaatacccagtattcgagtatgaaccgttgccccctgaatatgtgttggaattggaatacgtttcactcgaaccagttgaggatgcctgtgactgttcggcttcggccttggctttggcttccgcgtcggcttgttctttcgccgtcttggagtcgttcacgccggtgacggccttggatacggcgtctttctgcgcgttcagggctttcacgtcagccttcgcgttttcggcggttttctttgccgtgtcgatggcggttttcagactttcacgcgtcttgtcatcagctactttgccttcggaatccttgtatagggtttccgcgtcggtgatggttttgttgagcgtgtccttcgcatccttgacctgcttcgccgtcttggacgcgtccaccttgcccatggcggcgtcaatggaactgatggccttggtcgcggcgctgatatcgtcggcaaccgtggtcttcgccttcgacacgtcccagagcgcccacctgttcacatcctccgccttcggactacccttctgagcctcaccggacttcacgctcgcattcagggaatccagcacggtcttgtcgagcacgtccgtatccttcgtcgccttagcaagctgttgcgcgtccgcaaccttcttgacaagtttggcatcgatggtcttcgcagactcgacctgagactcataagactcatacgccttgttcgtagcgtaggcgtagccgccgccagcgccaagaacgataatcgcggcgatgatggacgcagtgatttttacacttttcttgacgcgcttctcgttaggtgtcgcttccttatcctcatcctgcgcagtctcgactgtggcagagtcgattacctgcgtggcttcggcatccttgttttcttccatggctctcccctccctttatctgcatttattttgctacgaagggtggtcccgccgctttcccgtaccgccctgccgagatgcctaccggccttaattttccattttatggatttttccatcggaaattttatattttaaaaaattgaaaatttgaatctttatttttctaaaattttttcatcggaaattttatatttccacatttccattacatgaatcctgatttcaatgtgggggtatgttttttgaattttccaaccgacttaattgtgtggacgattccagtataacgtgaacgcaaatatccaatcctttgtgcgcagacaatcccagtgcggcttgcaatcattgaggtacacgagtgtcgcgttatcttccaacggttttcggcatatgtcatatttcctaatttgacaagaattagcccctcactaatctttatattagcttccgtttgatgggtgaaaaaccaatcggatgcgaggtcgccgccttcgtgagctatcacggcggttcctgacagatgaatagtgatagcgaggtttctctggaaaggagaaaaatcatggcaagccgaaacggtggcttcggggattatttcgatattcccgtgaccgaagagcaaattgcaaaatccatgcttgcggaagacgtcactcccatcatgaaatgggagaaggattccgacggcaaatccaagcagattcccgttctcgacaaggacggcacccctcaatgggaaattcaaacgctgatgattccctacgagggcgacgaacgcaagcacgtcgccatcgtgccggtcaaaatgtcttccaagaccaagccggtcgtgaaagtcaatcagccgattaggttcgtcgacttcaccgttcgcccatggagcaacgacaccgccgaaggtgtctcctacaaggccacgggcttcaaacaggactgacaaccatggctatcccgatggtcacacggacgtgcctgatgcccgtcgaactctatcgcgaggtcgcctcctacgccgacttccatgagatttcatggtctgcggcggtccggattctcgcggagaaaggactgaaccttgaggacgcggggtctaccaccccaaacgcttataaagaaaagaggtcaagcgccccgataggcgcctgaccttgtccacacattctctggtggggtgggagcttgcacctcctaccctgccatttctttagaaagaagaatgcaatgagcattttactacttttccttaaacttcttgcgttgacggcgttgttcgtcggcctgatgcaccccctcggcgacgttgtagcttgggatgagaacggttggaaaacacgtcacattgtatgtgccatcgccacaacgctttggtcggcattgctcttgtttaatccgaagttcaccaccttggtgacggtctgcgtactgtggaccatcatttggttggtttcgctttttcacccgtcgttcaggaatttgcttccattcctgcgatgcctgacttcacttcggcaccgcatcaggggtaacagccccgagtttattgttgaacgtgttttgggtttgcgcccgttcgaggattcgacaaccgagttcagcggcgcccgtgactataaagcagtgtataaggacgacggtgacgaaaagctcctcgagttcatctgtggattgaccggcgtcaccgattccttcgtcgagaagaaggttcaggacggtctaggcgcgatgggtgcggagacgtacaagattgacaaaatcgctccggcccactggctgattcacttctaccgcactgtcccgaagaatccactcgatgaggaccacacaatcaaggtcacggatattacagactggaatggcaaatctgtcgtctacggtttgtttgagtccggcgactttgccaaactctcgttcgagcaagtctctggcatcgtggtcggcgggacaccgggcgctggcaaatcggctggtgcgacgcttttgactctatcgttgttcgcttcccgcctggccgctgtttacgtgttcgacggcaaaggtggcatggactgggcatgggcgcaacgagcggccagcctctacaacaacgattgcgacctcgatttagagacggcgacgaaacagctggaaacgttggctgaccgttgtgtcaccgacttgaaagagcatccgtggagcgatatagaccccgatttctggcattccggcgcgactgccgctcatccgttccatcttgtggtcatcgacgaatgccagacattgtttgacacgactggacgttccaaggatgataaagcgctgattgaacggtgcaggcgcgccgtggcaaccatcgttcgtaaaggccgctccgcaggttggtgcgtcatgctgttgactcagaaaccgacagccgattcgattcctacgaatattcgagataactgcgtcgtgcggtttggcctgcgagtcaccacacgagaagcaagtgaggccattctgggaaccattccagacggcgacccgatgcctaccgagattccgtcaactcggcgcggtggcgcggtagtccaaagcgaagacggtcatacgaaaaccgtccgattcttctatcttcccgtggcggaggcggcgaaagccttgaacggtccgacattagaaaccatgcggagcggactgaacgactgacatttacccagaggggacgtggcaacacgtcccctctttccgtatcaagaccttgggggtatagcaccttcaagagagctagctagccgtgcaggaagacgtgattgagacggtacgggtaccgtgtggcggcacgcagtggcgacgggaacaccgtcaccaaaggagtgcggagcgatggagcgaaagtgagatgtcagtaacgcgaaggcggtagcgacgtgcgtagcccgaagcgaagcacggagcgagagccgtagcagtggatgacaaatcgaacgaagcgaaagcgcggaagtacgacgacgtgacggtgtgacctgacccacctcagtaccagaaagagtgtgcgcgggaaccgacgaagaacgtacccaaacggtgacttggtgaatgctctccttcttgatatcagagtctatatttcaacattcttcctgaacaaaaagggactgtgtcccgatacctgagaggaggtataaatgccaacaatcagcatacgtgcgcacggtatgagtgcgagtaggtggcaaccgctggtcaacccggaaaccggcgaattggtgaagctaacgtcatttcaacagcctgaacggacgaactgtggtggttggacgcgtaacgttgcacgtaggaacgaacagcgtctccagcaagtggattttgaggctattgatggcgttccggcgttcgtcactctgactatgccatcccagcagatgaacgaagtcagtgccaagcagttccacagttggctcaacacatggctggtatacatgcggcgtcgcggctgtgttcactactactggatacttgagtttcaaggctcgggcaacccccacctgcatgtcattgtgtggctcaccgattggcggacaggtggcgcgaaacgagggtatatgactcattcatgggtgagcgagtccggtgtggtcgagcaatatagggctcttgcctactgggcgaaaatgctcaacggtgatggcatcgcggccaaggtggatgcacaaaacttccagctggtcgagactggttcccatgcggttgacggtaaggtactggacctagctacacctgaacgcctgttgatgtatctcactaagcatgcggcgagaggcgtagcccactaccaacgtcaaatcgagaatatgccggaggactggaaatacagcagtggccgcatgtgggctcacgacagggctttgccgttacatgagcagcaggacgtggaatgcgactatcagaccttctgggcatatcgtcggctggtgcgtcggtggcgttgcagtgaggctcatgcaataggtgattctgaccgtcggtgtgcggctatctctcaggctcggcgcatgttgaagtgttctaggcctgacatcagcccctaccggggcgtttcagcatggattcctgccgacgtgtcttcacagcttcttgcttccattccgacaggggaaggaggtgaacggtgaaacgttcggaacttcccgccctgatgacagtgaaggacacaatggcgtacctccagtgctcgaaacaacacgtgtatgaccttatcaacggtggcagaattaagacgtacaaggtgcgtggacgccgatacatcgacgtagattccctcgctcatctcttttggtgatatatggcgtctagctggctttctaggtcggctagacgcttttttatttctacgatggcttgcttcagctcggcttcggtaggctcatgtggcataagtctcgcctcgatgccattagcaagttctcgcatacggtcggctcccgatgcccgctggtatcggtccagagatgtttttgcgtcggcatggcgtccccactgcattgtttctttcaaacttgctccgacctgcacggcggtggttatgctcgtggccctgagagtgtgaaagtgcaggtcgggacggccagcgacgattttcgccttgttgaaatggtcatctctgagattgttcttgtggattctctcaccgttgggtttggtcacgatgaagtcggtgggcttcttgttcttgcacgcgtcgttgatgagtccggcgaggattggtggcactggttgcgttgtatggctggcgtcggtcttggtgtctttcagctcgccgtcatcgctttcgctgtggcgaatatggatggtctgggtcttaccgtcgaagtcttggacttgcaaggctgtgacttcaccgattcgcatatcgaggattgcacctagccagatggatattcgtgtggtcggtgccatgttctcgtaaataatttgcagttgttcggctgttgccggtgggatttccgcttgcttgctcttcggtactttgggtgccttcatggttacgggcgaacggtcaactatgccttcgttgacggccttttcgtagactgacttcaggagttggaaggtctttttgcgtggggtcgctcccccaaagtttttgatattcgagagccatcggtttatgttctcggtggtgacctccgcaattgggtacttccagaagaaagctttgctcaggtgggcaagatattcgcggtgctttcttttgctaccgcttgctagttctcgtccatccgcactgtaatcgagccatgttggggcgaactcctcggtcacataatcacagaatagccgtttacgcctgtttatggcgtcttcttgccgtttacgctcgctgggcgtagtccacttgctgataccctttttatcggcttctacgagggtcttctcgctgtttagccatccttgggcggataacttatctttgaaccgtttgcagatgcgttgctttcggtaggtatatcgggcttcgaatgtcgtggacttgccatggatggtgatgatggtgccccaagtctgttctttgcgcatgcgaaacagtatggcttcgggggtgtatttttctccacctcgttctccacctaaaatgctgacttttgcggactttgacggactgccgacggggtggtgtaacatctcgcaatcgttggaatttcaacgattgcggtatgaaaaaagggttttcagatttcttcgaaaaccctgctcgtggagctaaggggattcgaacccctgaccctctccatgccatggagatgcgctaccagctgcgccatagccccgtgtctgctctgcaaaccttgtataagatacatcgcagacttgaatcatgcaatcccggcgtgtcgctcaaggattggatgcatgacctcagttcgtcgtaccggtcgtcccgcttgaattcgtgctggttccggaatcggacgattcgcctgtcgaagtgccggaagtcgaatcgtttgtggtggaaccggaggaattggaaccggaactggtaccggaatcggtacttgaggagtccgaaccatcggtcgacgacgagccgccatcggtggtgccggtgctggaatcggacgagccgctggtccctgacgtactgtcggaagtgctgccggaggtcttgtcactgccactggtggtcggctgatcggtcgccccgtcggtagtgtcggttccactcgtcgtggtaccggaacctgaggtaggggtaccggagacggtactgcccgtatcactcgagctcgtcgaaggtgtgaccttctcgtacaccacgtcatgcactacggtgtccgtgcctttgccatgggtaaagaaaaggatgaggcccgcactcagtcctacgccgaccagcgcgccgacgaatgcgatgatggccggtgcgtatttgccatgcaaccacgccatgacacgggtctcccccgtgtggtgcatggtccgggacccgccggcggacgagcttccagctttgacgctccgcttggttttcgtattgcgttcagggttggccaatatgcttgtggcttccgtaccgtccttaccggaggcgatgacccttggcgagtcggacatcaccgcagtctggtcagacgtaatgaccgcggtatcgcttccgccatgccggacttcgccgatgacctgcgtggcttccgtaccgttatcggttttggcatcgctttcaggggtttccccgtccgagttcgaaccgaacggcaccgcattctgaatcttttcgcccgatgccttcaatacgttcttatagatttgcgtcgaaacggcggagacgatggatccggccgccacaccgatcaccgaacccgctatgccgattttcgcggaaaggaggaaggacgtcactgcggcaagcgcacctgccgagattgatgaaaatgaaattcccttgaaaaaattcttcacagcacacgacgatagcgagtatcgcttcaaaaggactggcgattatgtgaaaattcgtggaatccttaaaagtcaaggccttggcggcgtggatgttcccactgttcggtatcggcgattgccggaccgtgattgtaatctagcaatctccatcgcagtgtgtcccctatttcgatcggtacaagacgcacccaatgtgcgttgcgcatcgaaagaatggaggcgaaatcgggctgtacttcgttcagtcccaacaacgtctgcagtgtctgtgagatccaggcgccgtgggagaacacgaataggtcggtgtcggttccggctcgcatggcccaatcattgagggcttccacgccacgtttgccgacgtgttccttgctttccgcgccatatttgagttctccgccacggaactcggcccaggaacgataatcctccgggtaacgttcggcgagctcttccacggcgacgccctcccaatcaccgaagctgcgttcgcgcacacgctcatcggcatgcaccgtaagtcccagcggatcggcaaaggcatgtgcggtggcggccgcacggtcgagatcggagcagaccaccagtcgattgggaatatccggacgatgatccacataaagctcacgtaaggcccttgcagtctgcctcacctgccactcacctacttcgtcaaggggaatgttgatctgcccctgcaggcgatgctgcgcattgaatgcggtacgtccatgacgtaccagcgtgatggcgtgcacatgctgtggcacattgccccgtgattcaatcgttacgttgcgcggcatgcttctcctcacgtcctggattattccgcttcgacggcttcctccgtcgtgtcctgcgcgtggtcgagctggaggtcgatgttcgggcaatccttccacagtcgttccaagcgatagaagtcgcgtgactcctgatgcatgacgtgaattacgaagtcaccgtagtcgagtagcacccactgcccctcggtcaggccttcgcgtgaacgtggctgacgcttgccgtctttcagataaaggtccttttcgatttcctcggccacagccagtacctgacgctcgttcgaagcgccggcaatcatcatgaggtcggtgatggccaatggttcggtgacatcgaaagccacgatgtcagtggccttcatgcgatcggccgcggctgcggcgatgcggatggcgtcgatggaatcttgtactgccggcataatcagcgctcccattcgggcttccagccctctactacatgttgcgtgttttcggaatagaccatggaatcggccggcacatcatgccggaccacagagcctgcgcccgtggtcacgccgtctccgacttcgaccggggcgacgaacaggttacccgcgcccacatgcacgttcgatccgatggtggtgtggtgcttgtgcacaccgtcatagttggcggtgatggtaccgccgccgatgttggtgtgctcgcccagatcggcgtcgccgacatagctcagatgcggtaccttggtgccgttgccgatgtgggctttcttcatctccacgaaggcaccggccttggattcctcaccgaggtcgttgcctgggcgcaggtaggtccatggaccgatgttggcggcacgtccgatatgggtttcctgcacgcgggaacgttccacatgggcttcggcgtcgatggtggcgctgatcagcgtggtgtacgggccgatttcggcggcctcgccgatcacggtatggccctgaaggaagcagccgggtaggatcacggcgtcacgagcaatccgaacatcgtcttcgatccatgtggtttccggatcaagaatggtcacgccttcgcgcatccaatgctcgcacacgcgcgcattgtgggctttggccagtgcggcaagctgcacgcggtcattcacgccttccacactcaacggatcggaagctgcgaacgcgccgaccgcgccatgcgccttggcggtctcgagcgcatcggtcaggtagaactcgccctgggcgttgtctgaattcaggttggcgatggcctcggccagcaacttggcgtcgaacacatatacggaggtgttcacctcatgcacggccagttcactgctgttggcatccttctgctccacgatgcgcagcacattgccttcgctgtcgcggatgattcgaccgtagccggtcggatcatcaaggacggtggtgagcacggtcgctccgttgccgctctgctcatggaaggcaagcagttgattcagcgtgccggcgtcaagcagcggcatgtcggaagcggcgatcaatacgacgccgtcaagcgccccatcttcctgcaattgggccatggcgcactgcacggcccggcccgtgcccggaatgtcgtcctggttgacgatggtgacacgctcatcgtaggagcgcgccgcggccgcgacacgctcggcctggtagtgcaccaccacggcgagcgtgtcgggattgagtgccgatacggaattcatcacacggttcagaaaagtctttcccgccaaggtgtgcagcaccttcggcttgctggaacgcatacgggtgccctcacccgcggcgaggatgattgcggcgcttaatgccatcttccgccttccatttgatattggaatcaatagaagacgcccggccgcgagacaattcgcggccgggcgtctcggtagctcccccacctggactcgaaccaagacaaagggttccaaagacccgtgtgctgccattacaccatgggggaacggcggaatttcactggggaaacaccgccaagtgtttattatgccatatcatgccaacccagcgtgtcgcgaggtgatgccgcagtttcagcagcgtctcccgcaagcccacggaccaaccgatatggtcgctggtttgaccggcctcaggcgaacaggaaaccctgcccgtggtgttccggatacgtgtcgaacagctcggcgaccgaaccgtcctcgaacacggcgcgaatggcgctggccagcagcggcgcgatggacaggaccgtcaggccatcccaacgcttctcctccggaatcggcacggtatcggtgagcacgacctcacgggcgccgctacccttcagacgttcgatggccggaccggacagcacgccatgcgtggcgacaacggtcaccgacttggcaccggcgtccttgagcacgctgcatgcgcctgcgatggtgccggcggtgtcgatcaggtcgtcgacaagcacgcagtccttgccttcgacgtcaccgactacacggttggcgacggcctggttcggacgggtaatgtcacgggtcttgtgcacgaaggccagagggccgccgccaagacgctgagcccactgttcggccacacggatgcgaccggcatccggggagaccacggcgacattgtcgagctggttggcgaaacggtcgcggatgtaatcgaccagcaccggcatggcgatgagatgatcaaccggaccgtcgaagaaaccctgcgactgggcggcatgcaggtcgacgctcatgatgcggtcggcaccagccgtcttcagcaggtcgaacatcagacggcaggagatgggttcgcgaccgcgatgcttcttatcctgcctggagtagcccaacagcgggcagaccgcggtgatggaacgtgcggaagcgcgcttgagggcatcgatcatgatgagctgttccatgattgactgattgatcgggttgcaatggctttgcagtacgaacacatccgcgccacgcacggattcggtgtagcgtacgtacatctcgccattggcgaaatcatatgccgtggtttccagaacatcgatgccgagctgttccgcgacttccgccgccagcttcggatgcgtcctgcctgtgacaaggataaggtttttatccggctttccttcgaggattgcgctcaccatgtctccaaacgtctgttttcgcgtcaattggacgtgaccaatactaaccgtttacacagaccatacgagcctcgcgtgttcatgtggaaaatcaacggtacaggccgtgtttgccgatatattgcaccaccccgtcgggcaccagataccagaccggttcaccatgttcggcgcgtcggcgcacgtcggtggacgaaatcgccaatgcgggaatctccaacgtgtcgactttgccttccggaagtttcacgccttccggagacgagtatccgggtcgtgtcacggccacgaagtgggccagctcccacatcttgtcggcatccttccactgcatgatctcggcgaccgcatcggcaccggtgatgaagaacagttccgcctccggatgctgcgccctgatgtcgcgcaacgtatcgatggtatacgtgatgccgggacggtcgatatccacacgcgataccgtgaatttcgggtttgatgcggtggcgatcaccgtcatcagataacggtcttcggcattggtgaccctcttgtcgagtttgaacaccggtcgccctgtcggtacgaaaatcacctcgtcgagatcgtagacccacgagacttcggatgccgccaccaagtggccattgtgaatcggatcgaaagtgccgcccatgatgccgatgcgaggccgactgtgccagttgccacgcgccgacctacgcccggaggccactgccgaaccggaaacgtcgacggacaggtccgccatacgcctttccggttcgatcacatagctgacggcaagctcggaatcggcttcggccgattccggacgcatgcgtcgaggcccggtcatgcggtctcctcatcctgtagcttgtcggcgtcggcggtttcacgctcgatctcatccgcggtgggcgcgccctcctgcgggtcgatcttgcccatatcctcatcccattcatcctgcacgacgcgacgaatttcggcgaaggtcggcaagggaaagtcaggctggtacaagcgccgtacctcggccacccgttcggtaacgcgaatcagggtatcggtcatgccatcgatgtcaccctcacgttccatcgcgctgaatctggcaatgtactgctccatcaggtgcatctgctcgtcaatgttcctcaactggtcatcgtcaaggtcgactacatctcccgcatcggtttccggccagccgatcagcaccgcatcggcgtattcgagtgaggcgcgttgggcggcggaggctatgccgtcctcgatctgcacgaggaacacgtaccgtacgatgctcagacgttccgaggcgaggcgcaacccgagccgaggatcctcacgatcggcgttccaaggattatccatatcctccatgatctgcttgctcatgctcgcacctgccccgttccatatccgatccacttggtcgtagtcatttcacgaagtcccatcgggcctcgcgcatgcatcttctgcgtggagatgccgagttccgctccgaaaccgaacactccgccatcggtgaatcgcgtcgaggcgttcaccattaccaccgccgaatctatccgggaagtgaattcctcgatggccgagtaatcctcggcgatgatggattcggtgtgccccgtggaatgccggttgatgtgttcgatggcctcgtccagcgaatcgacgattctgatgccgatcttcaatgccaggtattcggtatcccaatcctcatcgatggcctgcacgaagttcgcgccatcgatgccggccttgtcgatcaggctgtaggcccgttcgtcggcatgcatctcgacctgcgcctcggcgagcgcccgcgcggccagtggaatgaaccgttcggccacgtcgcggtgtacgagcagcttttcggtggcgttgcatacgccgacgcgttgcgttttggcgttgaggaggatcgggatggccttgtcgaggtttccggaacggtccacgtagatgtgtacgttgccggcgccggtttcgatgactggcactttggaattgcgtacgacggcttggatgagtcctgctccccctcgtgggatgagcacgtcgatgtggccgcgcgcctccatcatggctgtggcgcccgcgcgtccgaattcgtcgacggaggcgaccagcgccggggcgaactcgtgttcggcgagcacgtcggagatgatgttcagcgttgccgcattcgtgcgttcggcggcgtgtccgccacgcaggagtactgcgttgccggatttgatgcatagggaggccacgtcgacggtgacgttgggtcgggcttcgtagatcatgccgagtacgccgatcggcacgcgtacctgctcgaggcgcaggccgttttccagatggtatccgcgtacgatttcgccgaccgggtcgggtagtgaggccacatgacgcacgccttgcgcggcggcggccactcgcggcacatcgaatttgagcctgtcgagtttgcctgcgctcatgccggattcgaaggattcctgcatgtcgagcgcgttggcccctgcgatttcgtcggcgcgtgcgtcgagtgcgtcggcgatggcgagcagcagttcgttcttggcttccgtgttggattgcgccagcaggccctgcgcgcgtcgtgcggcgtcgccttttgcgcagaccgccgcgaacgcgtcggcaccgaccgcgccttgttccgtctgtggattcgtcatagtctcctaccatagcgcgaaatcgcgccattcccggttcatggcccattttcgccgatgaaccgggaaagacgcgattcgtgaatcatattgggttgcgtcgcatgcctgtcgatcagtggatctgatcgaggcccgggtacagcgggaagtcttcggcaagcttgtcgacacgggccttcagtgcgtctacgttcgcatccttgccggctgcgagcgcggtgccgatgatgtcggcgacctcttcgtattccttggatccgaagcctcgggtggcgagggcgctggtgccgatgcgcaggccggatgccacggatgccgggcgtgggtcgaacggcacggtgttgcggttgatggtgatgccgcattgtgcgagcaggtcttcgccttgctgtccgtccatttcgctgttacgcaggtcgaccatgactaggtgtacgtcggtgccgcccgtcaggacgctgatgccattgtttttgacgtcgtcggcagtgaggcgttctgcgaggatcttggcgccgtcgagggtacgctgcatgcggtccttgaattcttcggaggccgcgactttgaaggcgacggccttgcctgcaatcacgtgcatgagcgggccgccctgctgtccggggaatacggcggagttgagcttcttggcatagtcctgcttggcgaggatgaagccggaacgtggtccgccgagggttttgtgcgcggtggaggaaacgacgtcggcgtatgggaccgggcttgggtgcagcccggcggcgacaaggccggcgaagtgggccatatcaacccagaatttggcgccgacttcgtcggcgatttccttcatggctttgaagtcttcgatgcgcgggtaggcgctccagccgccgatgatcatggcggggtgggtttcgagtgcgcgctgacggatgatttccggatcgatgcggaaggtttcagggttcacaccataggcttcggcatggtagaaacggccggagaaattgattttcatgccgtgggtgagatgtccgccgtgatcgagggccagaccgagtaccgtgtctccggggttgacgagcgcctggtagacggccgcattggcttgggcgccggaatggggctggacgttgacgtattcggcgccaaacaggctcttggcgcgttcacgtgcgatggtctcgatcttatcgacctgttcgcagccgccatagtaacgacgtcctggatagccttcggcatacttgttggtaagcacggagccctgagcctgcagaaccgcacatggcacgaagttttcggaggcgatcatctccaagccgtcttgctgacgggacagttcggcgtcgagcacggcggcgatttcgggatcggcctgggcgatgggggcattgaacatgtcgttcggggtctgggcgagaggtgatgcggtcatgggctctccttggctggtactggtagtccgcgaggaatgcggcttaaggaagcagtctacgacccgcaatcgcttttgacgagagacgtttcgaaacatggaggaaatcatcgttccatttcacggactcaaggcccctcgttgcccacctttaccactacactggtggtgtatttacctctatccgccttattgctaaggatgtccagtgaccacgttccacagcacacgcagtaccaccgactcgctcacctccaagcaggccattcgcaagggcatagccgatgacggcggcctgttcgtcaccgactccctgggcgaaacccatgtggacatcgcgtccctggccggcaagtcctaccagcagatcgcgtttgacgtgttgtccgtactgttgccggatttcaccgaggacgaattgaaggaatgcattacggaggcgtacgggccgcagtggtccgatgagagaatcactccggtcaagccgctcggcgacgatttcgtgatggagctgttcaacggaccgacctccgcgttcaaggatgtggccctgcagatcctgccgcgcttcatggcacgcaccactccggccgacgatgatagccacgagaagatcatgatcgtcaccgccacctccggagacaccggcaaggcggccctcgccggcttcgccgatgcggcgggcactggcatcaccgtgttctatccggaaggcaaagtcagccaggtgcaggagctgcagatgaccacgcagaccggttccaacgtgaacgtgtgtgcggtcaagggcaatttcgatgatgcgcagtccgcagtcaaacgcatcttcggagacaaggagcttgcggaacgtctggccgacgattcccatgtggcgctctcctccgcgaactccatcaacgtgggtcgtctggtgccgcaggtcgtctattacttctccgcttatgcgcagttgctggagcagcaggtgatcaatgtgggcgacgaagtcgagttcgtggtaccgaccggcaacttcggtgacattctcgccggctactacgccaaactgctgggcttgccggtcaagcatctggtagtcgcctcagacaggaacaacgtgttgttcgacttcctgacctccggcacatacaatcgtcagcgtccgttcttccagaccatctccccctcgatggacatcctcatctcctcgaatctggaacgcatgctgtactacatgtccgacaaggacacccgtctgatcgccatgctgatgaacgatctcaaccagtggggagcctatgaggtccccgaaccgatgttcgccaagattcgttcgattttcggcaccggttgggccgacgaagaccaggtgcgcgagatgatcgccgactgctggaacaagaaccactacgtgattgacccgcacaccgcctgcggctattacgtgatgcagcagatgccgcgcgatccgctcaccccgcgtgtactgctttccacggccagcccgtataagttcccgcgcgtagtcaacgaatccctcggcttggatgcgtccggcaccgatttcgaatgcatggacgtgctcgccaaggccaccggcaccactgctccagccgcactgcgcggccttgaacacgctgatgtacgtttcgatgatgtcgtcgagattgacggtatggagcattttgtcgagcaggccgccaaatcgttgtaaggtcgccgtcaatcacgatatcctataatcggctgtccgcttaggtgggcagccgtttttcatatgtttcgctaaagtatcaacaccggaggcgaaaatgacgcgatctactgcaagcgatgcaaacggatcgaccggctccccggccaatccgtccgtaacatccggaaatttcaacatgccgggcaagccgaagaaggaccggctgatcacccgtgacgtggcattggtcatgctggcgacgttcttcttcatgaccagcaacatgatcatcacgccgatcatcgccggttatggcgaatccatgggtgcggccggcacgatgatgggcatcatcgccggcgtgatgagttttgtctccctgttctgcagaccgattgcgggcaatctgtccgatctggtgagcaaacgtctgctggtggccgtcggcacaagcctgtacatcatcgccggcatcatgtactgcctggcgaattccacggggatgctgattgcggcgcgcgtggtcaacggtctgggattcgcctgcggttcggtgtgtctggcgacctgggtgtcgctgctgctgccgatccgccatatgggcgccggcatgggattgtacggcatcgtcaacgcgcttgcgatcgccgtcggaccggcacttggcattcgcctgcaggccgtggtcggctaccatctgacgttcgtgtcgtcattggtgctgaatgtgtttacgctggtcgtcgtcatgttggtcaacaacggcggcaatccggctcgaaagaccgtgatgccgtcacggaacaacgccggatggcgcaatatcgcacgtcatctccgtttcagcaatctggtggagccgcgcgcgattccgttgacgatggtgttcatgatgttcgccatcccctatttcgcgaaccaatcgttcatcgtggactatattgcagcacgtcatctggcggtttcttccgacctgttcttcgtgttctatgcggccgccctactgactatgcgcatcaccatgaaggatctgttcgattccaaaggattcaagttctggctgacgatctgctcgatcgcaatgctctccatgctgacattcctggcgttcatgacgaacgactggtacctgttcggcgcaggagtggcgatggcggccagctacggtctgatgagctcggtcactcaggcgcaggctgtggtgattgccggccgagagcgcagcggactggccaacagcacgtattacatgggtctcgacctaggtatggcattgggcccgattctggcgggcatcttctatggacacatgccgatcagctggttctatccggcgttcatgttgacgatgccgctcgcgtggatcatctatctgatgttcgcacgcatcatccattccacagctcgcacggatgcttgatgacgacacgatgcccgtctctcttggacggcgttccagaatggcaagacgtcgtttcgaatccggatatgccagcatgacggggaagactactgacgcggctgcggtctttcacgcacctttgccgtgacatagtccgactcgaccttccagacggtgacactgcggacctgctggtcggtgaattcgacatgctccatgcccgcctgctgccccatcagcatctcaagcgcgagacgagattcgtccagatcgctgacgatggaggcgacaccggtaccgaccaccgatttgaaggcctcaccccaattgcacggcacacgtcccgccaccacttcacaatcggtttccatctcgaaggcgacggacagcttgttgccggcggccttgatggcatcgatcttacgaccgatcggcgcactgtggaaatagaatgtcggtctggtcgcatttccgatgccttcggagacatagccgaagttcatcggcactatggtcagcccttctgcgtccatgtaggcgatgcgaatgattttgcaggacgcgacgattgccgcaacctgtgccggatcggatacttcgcgatcggcgcggcgcatcattcggtgcgctcccgcggctgtccgctcatcgttacgtcgcgccgtcatgccgcaatcctttcgacttgatgtttcattccgtcttgtccacgtgttcttgttcggagcctgtcgtcaatgttatcccaatcgtcatgaagacccatgaagacctcggcaggctcgtgtggcgcatgggaaagttccgggaattcaccacgtgccatgccggtgatcaacgtggaaatgtcggagaccggcagattgtcctgtgcgaagcggcgcagcacatcgctgtcggacacgaaaccgaccacggcacccgtttcgttgacgatcggcacgaccatgaggaacttgacggtgatgcccttccacacggcgcggtcggtctgtgcacagaagcgattcatgatggcgcgtgagcttggcgtgcagatgcatagatcgcagatcatgccgatcacgtaggccagcggccagttgaagaatgcgtagctccatgcggcggttccgacgtcgccggtgcgtacgccgtagttgagtgccaccatcacgtagatcatgatggccgacatgatgaagctgaagagaatgccttccttgccgttgcggggcatgacgaggttcctttcgttatgttgtgcggttgcgattgcatccggccccacttgtctgtccgttaactcggacggcgagggggcgcataacgaatggttcgagatggcgacttcctggcaggcggatcggcgttgttcacgttgcatccgtacgtcgggggccgcttgcaggttccgtattgttcgctgggggttggacaagatcgtcgtgtcaaaaccgcacggaatggaagcatgagcgcatcacacatgtccgaacgagaccatcccgccataccggcaaccgctcataatcgttgcaaatattactattaagcggttaatcaccatgaattacaactgttatactacgcacttcaacagttatcatgagttgtgatactgttatatataacagcagaacggcaatccggtcgtttgaccctgtcaccaacaaaagaggcgcagattgaaaccgatcatctcatccacgtcaggggaaccgatctacgaacaaatcaagaatcagatccgctcggcgattctgtcgggcgaactcacggacggagagacactcccctccctgcgcacacttgctagggaactgcatgtcagcgtgctcactatcaccaggtcgtatggcgaattggccgacgaggggcttgtggagaacgtgcagggcaaaggcacctttgtaaaggcccatggcaacgagttgatcaaggaacgcgcccgggaacgtatcatgcaagtgctccggcagaccgtcaccgcagccaaagccgcggatatcgaactgatcgaccttcttggcatgttcgagaaggcttacagggaacagtcatgaatgacgccttgcctctggtccggcgcggatttcggatgttcggtccgagaggaaggaaccgcaccttttccgttcaaagccgccgcggggcgtcatgaaagtcgaacatgacgccgtccgcgagctcgcagatctcggaccagtcgaggtcggaggaatcgtcatgcatggcccacaccttcataccaaccgatttggctgatcgcatgccgacgagcaggtcttcgaacaccgtgcagtcctccggcatgataccaagacgcgaggcagccaacaggtagacgtccggccgatctttgccgacgtcgccggcatcgtccacgctgacgatctcattgaaatagtcgaagattccaacgtgccgcatggccggttcacgcaatgctggcggaagcgaagtggcaacggccagtcgagcaccgctatcgcgcaaccgccgtaggtattcgcaggcgaacggcttggcctcgaccacggtggaatacatgacacgtgccatgtcatcccattcctgcatcaactcttcgggagtatcctgcaggccgaagcgtgcaatggtgtattcggcgatctgacgaaactgcatggcggcgactttggtcatgtagtcatcggggacttcaatgccacggcgtgacagaaagtcgatatcgacctgatcccacacacccatggagtcaagcaacgtgccgtcaagatcgaaaatcgccgccttgccccgattgatgccagtttcatcagttgccaccatgtccgttctcccctcgatttcagttccctacgcgaattacgattgcccgtcttgccgcgatgccgcatgccttttacagcaccgatgcccgcaacagctcctcggcatggtcgagcgacgcttcactttcgctgcccgacagcatgcgtgcgatttcatgcacccgctcgtctccgctgacctgcttgatggtggtgacgacaccgctctcccctgccggcatgcctttggaaacgacgtattgctcatcagcccaggatgccacctgcggcagatgcgtgacgacgatgacctgcgcggactgtgcgagcttggcgagacgagcgcccagctcaacggccgccttgccgccgacacccgcatcgacttcgtcgaagatgaaggtcatgggaggtacggtcccgccagccaccacatgtcgttcggcggcaaccagttcaagtgcgagcatgagacggctcagctcaccgccagatgcgctcttgcccatcggcagccgcggggaacccgggaacggggtgaacaggaattcgatgtcgtcgcaaccgttggcatccaatacgtccatcgaatcggacccgccgtcggcgcgggaatgcacacagatttccagcttcgcgcctcccatggccaacgacgacagttccttcgtgaccttgccggccaggttctcggcggccgccgcacgcagtttcgacaatgtccgcgccgccttcaacgccttacggaacagttgggctcgttccgtctgtagctgctcgactttttcaggagatgcgtcaagatcctccaagtcgaatacggccttgtcacgccatgcgatgacgtcggcaagcgtcgggccccaacggcgagtcaactcgtcaagttcgtgaatgcgaccgttgatggagtcaagatcatccacactgctttcgttgtccacctcaccggagagcgtgaacaccacatcagacaggtcggcgccgatcgaatccaaccggtcggccagatcggagaacacaccctccacatgaatggatcgcaatgcctgcgccgcacgatcgatcagttcggcggcacttgcggcgtcgacgtcgtcaccgacctgagatgcatccaacgccgccaacgccgtggcggcaccctgtgcgatttcggctgcgttttcgatgcggtcgcgtcgagcgtgcagttcctcactttcccccggttgtgggtcgatgcgattgatgcgttcgatggactcacgaagataatcggcctgctgcctcattgatgattcctgactggacagtcgttccagtcgctcatccatggcacgcaaggcctcccacgccctgccataggcggccatcgcctcgtcgttaccggcgtaacggtccaagaattcacgctgtcgggcgggagaagcgatacgcaactggtccgcctgcccatggatggtcaccaattcggacgcgaccgagtcaagcacggaccgtggtacgctccggcccgacagcatgctgcgggagcgtccggaagccggcaccttgcgtgacaggaacagttcaccgtcttccggttcgaatccggcctcgcgagcggcggccacggccgcaaccgacgcgccgacctcgaacacgccctgcgcccacgcctcctcggcacccaccgacacacggcctccatcggaagggccgccggaaatcaggcgaatcgcactgagcagcatggatttgccggctcccgtctcgccggtgatggccgtcatgccgccggccggggcgatcaatgcggaacggatagggccaaggttgcgaatctcaagttcttcaagcatgatccggtctcactcgccgcccgtcatatccgccataccgtcagcatgctccgtgcaggccgagcctttcgggaatacatgtccatgatgaacgtcgccggtcttacgggcctgttcacgccagccgaccaccggcagatcgaatttcgtgaccagacggttggtaaaaggcactccggaaagccgggccagccttagcgtgcccttcgattcacgcacttcgattcgggtgcccttcggcagggcccgctgccgacggccgtcacagcagatccaaccgtccgacatggagtcgtcgagaatgtcaatggcgaacgtggagcccgaaccgatgatcaagggtctggcgaacaacgcgtgggccgccagcggaatcaactgcagtgccttgacgttcggccacatcaccggcccgcccgccgaaaacgcgtaggcggtcgaccccgtcggtgtggacacgatcacgccatcacagccgaaagagctcatctccacgccatccacccgaatcgacagctccaccattttgccgcgatcggcacgttccagcgtaatgtcattcagcgcccagtcctcgatgggcgcatccgaccccggcagccacacgtcggcatgcgcgatcatgcgctcgtcgatggaataatcatgatcggcgattctgcggatcgcctcactcatctggaagctctcgaattccgcgagaaaaccgacatgtcccagattgacgccgagaatcggcacatcggtgcagtgcaccagttcggccgcacgcaaaatcgtgccatcgccacccagcaccaccacgatctccgtatcatcgggcactgcgggaggttgactaccgaaatcaggcgcttccacgttgtcgatgatcgacacccgaaaaccggcccgtgcaagctgctccaccgcctcctgcaccaccgtgccgctttcgcgcagacgactatgcgtcaccaccaccgcatgccgggcatcgaccatcacagaccctttcgaccagaagacgtcaccgactccaatactaatcgaacaaatgaacgaaaacgaacgatccgtgcctgaaattcgtgcgagaccggtcagcgggtcgcccattcgtcgcacatatgcctacaatagctgatgaaaagacgattccatatacatgccgaaggagagaggaatacatgtcgaacctcgtctttgacgagtcctcctccaaccgtgaggcctcgcatggctacgcctggtggttctcgggagacaccttcgagaaagccatggcagaagaccgcaagccccgcaaacgcagtctcatgcaccggctgaccgcgcttccgggacggttgaccatcatctacttcctgctactggtggcaatctccaccagtctgctcctgactccgatctccacgccacggggcgataccaccgacttcaccaccgcatttttcaccgccgtttccgcaatctccacctgcggcatctccatcgtcaactccactacgcattggaccaccttcggccaggcggtgctgatcttctcggtgcagatgggcggcctgggcgtcatgaccttcgcctcgctcatcgcactggcggtgaaccatcatctcaaggctacgcagcgactgctcaccgccaacgaactcggcaccacgaaactcggcgaaatcaagggcgtactcaccgtggtcatcaccaccgcattcgtcatcgaaggcatcacgttcatcgcactgttccccggcttgtacaaaatcaaccatggcaatgtccgtcacacattgtgggaatcgctgttcttcgccgtcatggcatataacaacgccggtttcacgccggacggcgccggtctgcatgtcaacaactgggccgtgggactgccgattctcgccagcgcattctgcggtacgctcggcttccccgtcttgctcaatctcatgcgttcctggcgcatgcacaggccacccaagcgctggagcctgcacaccaagctcaccctgatcaccaccttctgcatcgtaaccgcctcactcacctggttcctcatcgtggaatggaacaacaagtcgctgttccccggcaacagtgtggaaccccgcttgtggcatgccatggtggcggccgtcatgccgcgaagttccggcttcgacctgtcgtggatgccacaagtgagcgacgccacgaaagtgttcctgagcatcgtcatgttcatcggaggtggcagtacctccaccgcaggcggcatccgcgtaaccacccttgccgtgattctgctggtatgccgtgccgcattcaccggccggagggaaatcaacgccttccaccgccgtatccatacccaggccgtcatgaccgcggtcagcgtcagcaccgcctgcctcaccttggtgaccgtggtatcaatgacgctgatgatcattaccgactgctcgctatgcgacgcgttatttgacacatgctccgctttcggtctcggcgggtattccgtaggtgtggccgacgccggcaatccggcggcactctatgtgctcgccgccaccatgttcatcggcagactcggtccgatgaccatcgcctatgccgtgtcgcgtccacgcaatttggaggcggtacgctaccccaccgagcagatagtggtcggctgacgcagaccatccatatacttggactttgcagaacacacagtggaaagggacacacgaagaatcatggcgaacagcaccagaagcgtactcgtggtcggattgggccgtttcggcagctccgtggccaccacgctggacatgatgggtcaggatgtgcttgccgtcgacaaggatggcgaactggtgaaccgctggtcatcgcagattcccaccgtgcaggccgatatgaccgatgtgatggcgttggaacagatcaacgcctcagatttcgacacggcagtcgtggccatcggcgatagcgttgaggcttccgtcatcaccgccggaaacctgctggatgccggcatctccgatatctgggcgaagtccgtgtcgaaggagcatgcgcgtattctgcagcgcatcggcgcacggcatatcatcaatgcggaaaccgatgccggcaagcgtgtcggacatctggtctccggcaattatctggattacatcgagttggaaggcgcctacaacgtcgtcaagatccatactcccccgcacgtggtcggctataccatcggggacgcacgcgtgcatgaacgtttcggcatcaccgtggtcggcatcaaatcgccaggcaaggaattcgaatacggttcgaaggaactgatcatgcatcgtaacgacgagctcatcatcatgggcaagcaggatcagatcgaccgattcgctcgcggatagtctatgcccgacttatttcacggcatatagcaggtattcgacgttgccgtgcataccttcgatcggcgaaggtccggtcgcgcgcacgtcaagtccgttggatttcgcacaggcaatgacatttcgcaacgcctgttcgcgtagttcttcgctttcgacgatgccgttcttgccgagattgcctttgccgacctcgaattgcggtttgacgagcagtacgatctgcgcatcatcggccgcgattcgtgcaatcaccggaatgacataggtcagtgagatgaaggatacgtcggaaacgatcatttccggacgaaacggcagatcaccgacttcgacgtcccgtatgttgacgccactcatttcgatgattcggccgtcgttcgcgattttcggatcaagttgcccatgcccgacatccaatgcgatgacctgtgccgcaccatgacggagcagcacgtcgcagaatcctccggtggaggcgccgatatcaaggcaacgtaagcctttgggaggacgcagcccatccttgaaaaacagatcgaaagcgcctaccagcttgtaggcgccacgcgaaacgtagtcatctcccctatcggcggcaatcacatcgtcgtccgagacctttgccgatgccttggaaacgacaacgccgttcacactgaccttgccctggacgatcagacgctgagctttcgacctgctgtcggagagccctcggtccagcagggcaaggtcaaggcggacggcatgttgcgaatcgttatgctgcacttgctgccaatcgtcagtcgatgtgaaattccggtacggtgacggcattcaagtcacggccattgtcggcagcttcccacatggcgttgcaggctgcacgaaggccgtccacactggtgacatcgtcgacttcaagtgcattgccggcacatccggcccgtacgccaccacaaacccaggtaccgtcggcgttacgttccacagcgggcgccggctcattcagtccacgcaggtccttggcgatgaacgtcgggcgcagctgcgccggggcgaacataagttcatgcggattggtgacgccggtaagcaccgccaatgaatcgtaaccaccccgattaccggcttcgatatcggtgtcgagacggtcgccgatggcgaggcatagttccttggccaccggttcggcgtcgtcatgcgcggcgagcaatcgtgcctcgtcgtacatggcggattccggtttgcccgccgatgacaccggttcgacgccggtggcgttgatcacggccctgatcatggatccgcaccccggggcgatgccgagctcacgcggaatggtgagatcacggttggtcacgaaataggtggcgccgtgttcgaccgcatatgcgatctgggccatctcgttccatgacatatccggataccaaccctgaatggccgcgaccggcttgtcttcggcggaatcgaccacgacaagaccctgtttggccacctcctcacgcaagtgccgtgcgccgagcacgaacactttggcacctgcaggcacctcacgggccaccatgcgggcagccaccacggaagaggtgatgacctgccatggttcgacgtccaagtcgaaccctttgagctggtcggctacgacggactgcagtctggacgagttgttggtggtgtactccaccgtcatgcccagacgttccgctttgcgaatgttcgccgccgcgtgctccaccgggttcttgccccgatacaccacgccatcaaggtcaagcaacgccagcttgtacgcttcgcttagaggccgattcgtggacttcagcatgtgatcaacgtcacctcactcgttgtcggaggattcgtcggaatcctccacatcgggttcgtccgatgcgtcggaatcctcgtcggcttcctgctcacgggccggttcgatatccgattcggcgccctctacggcttcctgggccggcagctcagtctcgtcatcggtttcaccgttggcgtcgatggcatcatcggacgcttcgtcggaatcctcatcctccggagcgtactgggcgtcctcttcggtgatgcccagtacatccataagttcgtcgttcaactcctgcatgtcatattcgatgaccaaatcatccgaagtctcatccatatcggattcggcatactgcagttcaagtttgtcgagtagctgatccagcgcgatggcttcgtcggtgcgtccggactcttcgaggaaatactgttcggcctgcaccgcacgcatgcggtattcacccgccagacccttggaacgacccagcttgtgaacgatctcaatggccttgtcccacatcttgagatcacccaaagctcccgcatacacgaggaacatctcagccttggcttcgccgcgcagatacctggcatcatcgctcatggcgatttcgatggccttcttcgggttgccgaggccgcgctcacaatcggcgatgaacggcagataatccaagaatccattcatacggtaggccgtgcggaactctttcaacgccagcttgtaattgccttgacggtaggagatgaaggccagtgtctcacgtgcgaagtcgatacgggatgcctgacgggccacccacttggcgtgctcaagggcaccttccggattgctctcctccaacgtgtaggcggcaaggatgtgcagaccgatattctccgcgtgctccttggacaaaccgcgcagacgttcacgatcttcggcgctcagcatgcgccattcgatgctcttcggcatcttgggctcattggggcgacgatgcgtgtacggattctgcgaggggaagctcatcgtgccgtcggagttacgacgcggcttcgacaggtattcaccgcgcttggcctcgcggtattccatcttttcttcgcgggtgaactgcttgggatcttcacctgcgttccgctgatcacggtccttgcggaagtctcgatgctggtcgttgcgacggaagtcacgacggccgccatcacgacggtcatcgcggtggaaatcacgacggccaccgttgccgcgacgatcatcacgacggtcaccatcacgacggaagccacgatcgttgcgatgctcaccatcgtcacgacggaaatcacgacggtcatcgcggtggaaatcacgacgctcaccatcacgacgatcatcacgacggaaatcacgacgctcaccatcacgcttgcggaaatcgtgacgctcaccgtcgcgacgatcatcacgacggaagccacgatgctcgccatcacgctgatagcgcgggccgtcgttgccgcgaccgccgcggtaaccgccggaacgttcaccgccattgccgaacttgcgaggaccgccgcggaaggagcgacgctcctgaccttcgccatcaccatcgcgatggaagtcacggtcacgacggaatccgccgccattgcccttgcggtaaccgcccttatggtcatcgttacggaagcctccggacctatgcccataggacttgccgccatcgccacgcggcttgaaccccttgccgctacggttaccgggcctgcccgagccgtaggatttgtggttgccgtaggacttgccgcgatttgcgcgctgttcttctgccattcttatccttaaatattgatctgtgtcgttggttatgtacgtttgtttcgacggatcaggcgctttcgacggcacccaacgccttcttgccgcggcgaatcagcgcgaaacggccatgcaggaaatcctcttcgccaagcgtttgctcctgatcatccacacgcacgttgttgagatatacgccaccggatttgatggtcttgcgtgcctcggaaatcgacttgaacaaacctgccttcataccggcttccgccactcgatcgcccactgccgccggtgcgaaaattttctcgccatgcccgtcttcgaccttgagtccctcgattgcggcttcaagcgtagcctcatcgatgctcgacaaatccccgccgcgcccgaacaacgcgcctgctgcctcgatggcctgattggtcgcttcttcgccatgcacaaggctggtgacttcccatgccaaggtacgctgcgcctcacgcgcgcccggattggtttcgctctccttgaccagtcgctcgatttcggtcttcggcaggaacgtgaacgccttaagcaggctttccatctccacgtcgggtcgattgaaccagaactggtagaacttgtatgggctgagcatggtcgcgtcaagccatacggcgttgccttcggacttgccgaacttcttgccttgcgcatcggtgatgatcgggctggtgaacacgttcacatccacgccacgcaccttatgaatcaggtcaaggccggaagtgaggttaccccactggtcggaaccaccgatctccagtacgcaatgatattcgtcgaacaggtgcaggaagtcgttgccctgcagcacctgatagctgaattcggtgaaggagatgccttcctcggagttcagtcgacgggccacggtgtccttggcgagcatcgtgccgagacggaaattcttgccgacgtcacgcaggaagtcgatgacggtcatggaagcggtccaatcgtaattggacacgaaccgcaccggattgtcgccatcggtttccagaatgccgccgatctgcttcttgaggcgttcggcccaactggccacgacatccttcggattaagcgtacgctcgccggattggcgcgggtcgccgattagaccggtggcgccgccgaccaacgcgatcggatgatgacccgcagcctgcagatgacgcatgttgatgagctgtaccagattgccaatgtgcagggaggccgcggtcggatcgaaaccgcaataataggaaaccggctccccgttcaacgcttcggcgagtcgatcccggtcggtggactgggaaatcaacccgcgccattccagttcatcgaggacggaatcgaagccggcctccttgaaatcgatgacgtgagccatgactgtttttctccctatcgaattgtgggtcattaccgcgcgttttgcgcaccctacagtttcgcagaagacgacgacagccgaatgtgccgtttccaccggtcatcccggcgattcccatccaacccgctacagtgggtaccagccactcaccgccgagagaggaggccagttcatgaaccgtagggaaatgaaggcgcaggccaggcatcagctgcgcaggcagtattggatgatcgtcataatctgcctgttcgccgcgtttttcgaagtcgaatactcttcatcgatgtggggcatcaacttcgatctctcgtccttcaccgtcacccagcccggtaagggctggaccgattcgaatctgtccgatgtgtttcgggatttcctgcgcggcaaggaggacgtcgcccgcaaacgagtcgaattcaatcaggaacaaatcgtccgcaccgacaccaacgccatgttcggcaggtcccgagggctctttgcctccctactcaattcgttctcatcgggtgcggtaatcgtatccatcgccgacgcgacgcgttccatcgttcatgatgccagaatcgcagtcatcgtaccggtcatggtttcgatggccgtattcttattcgtctggctgttcatccaacagacataccgcatcgtgatgcgtcgcatgctgcttgagggacgcatctatggcaaaattccggcgagccggttcctttaccctctgcatacacgacaatggccgcgcatggcgtggaccatgttcgtgaagaataccgctctgctgttatggtcgctgaccatcatcggcggcatcgtcaaatactattcgtattttctggtgccttacatagtcgccgaaaacccgaccatcggcgcgcgcaaggccatcgacctgtcccgccgcatgatgaggggacataagtgggaatgcttcgtggcgcagctgacgttcctgggctggtatctgcttgacatcgcgaccgtcggtgtgagcggcatattctattccaacggatatagcgcgtcgttcttcaccgaatattatgcatacctgcgcgcactctccaaggagcaaggcatcgaggggaccgaactgctatgcgacattcatctgttcgccaaggccgattccgaggagattcggtcgtcttatgcggacgtggccgaagccgtcgaccaagtacgttccaccatggtcgctgccgataagccgtgtggcttcacaggctttctttcccagtggttgggtattcgcatcatgcattccgatcaggtggcgcgctatgaggaatatcgggaagattcccgccaggtccgcatcggtcaggaaatccttgacggcatagtctatcctgggcggctcgcgccggcaccgatgccgtttaccttccgcgaatcacgtaccatcagcgccgatcgcagctattcgttggtgaatctggccatgatgttcttcatcttctgtttcgttggctgggtgtgggaggtaagtctcgcgttcattaccgaaggtgccttcgtgaaccgaggcaccctgcatggcccctggctgccgatttatggcaccggcggcatcctcatcctgacactgctcaagagactgcgtgacaggcccatgttcgaattcaccaccaccgtggtgctgtgcggtggtctggagtatttctcgtcatggtatctggagatgatgcacggcggccggcgctggtgggactataccggctacttccttaatctcaatggcaggatctgcgccgaaggactgctcacattcggcctcggaggcttggtcatcatatatctgctggcaccgatgcttgataatctgctcaaccgggttgatgcgaaacgacttggggtcatcgccgtgctgctgttgatcatctattgcgcggaccagttgtactccgtagaacatccgaacatcggcgcaggcatcaccgattataaggattccttgacggcgcaggtttcatgaccggacgctacggatgggacgttcattggcgtcgccgcagcatctcacgcacggtttccatgattttgctgtatttcgtggattccgtcgatttcatatgggggaaggcgctgatcatgcgtcgttgctgtctgttgagcatggacatggcgctattctgcatcttggagatgacctcctgcgatgattccgaccagccacgtaccttatcgacgaaggcgtccctaccccactgccaggaatcaccggctttctccgcatagctttggatggcatcgccgaatgcggacagactttcgcccagatcaacgatgcccatcacggtgacgctggtgtcgatgatgatcaggatggtgaatatcgagcatagccaatgtacgacgggcaacggaatcatcatcgtccaaatggcgacctgaggctggatgatgtcgatgatggccacgccggcaatgccgaataccagcgctcccggcaaacagatacgtccctgcagattgaaacggtagtcactgtaatcccaccatctcgcgtggaacatcttctccatggcccaggaagtgacgtattcgagtacgctcgctccgattgcggagatcaggaaaatcatgatcggattatgcatattgtgcaacaatgcgatcgccagtgccgcgccggctccgtaaatcgggcacaacgggccattgaggaagccgcgattcaccagccggcgttccatgacggacaccagaatcgattcgtagatccagccgatgaaactgtacagtacgaaccaaaggaagagatgctccagcgctaacatgcaaaggtcattccctgcagtccggtttcccggacttcggcttgttgaatcgttccatggagaaagtctccctagtggcactgatcttgtcggccatggtgaccagatatccttcgatgtatcgtggcggcctcggggtcagggggaacatgtggttcgcgatgctgtcgcgttcgacatgattgagacggaagtcacgaacggcgttgcgtacggcggtgttgccgtgggtgaagccatgcagacgatgctcgccattgtcccaatcatgccaatcgtaaaggaagtagtcgtgcagcagcgcggcacggatgagcgaatgcagatcgaccctgtaccacaggtgcaaccggtccgccatccacacggcgaggcaggctacgcgcaccgaatgcgcgaacgtggtcaccacgccgtgctgatagcagctcctttcgatctgcatatgctcatgttcgaaaatctcccggccgtgtctgtggaccagccgttggatctgtatgcgagtcagcattatttcagcaaggattccggggtcttataagccgggccatcgctgacggagttggcgaaggcgcgcagggattccaccgcggtcttggctgcgacgatctgctcgcgtacacgcaacggagatgtgcctcccttgccgttgcgggcggatacggaaccttccgtggagagcacctcgcgcacctgcggtgccttgtctgccggcaggaaatccttgaacacctcaatgaagtcctcgtccgtcagatcccatagttcctgaccgcggtcttcggcgatcttcacacaggcaccggaaagttcatgcgcgtggcggaatggcacaccgttcttgaccagccactcggcgatgtcggtggcaagggcgaaaccggtaggagcctcggcctccaagcgctctgtattgaaggtcatggtaccgatcatgccggtgaaggcaggtagcaacacctcaagtgtgtcaacctggtcgaacacggcttccttgtcttcctgcaggtcacgggcgtaggccgtcggcagacctttcagggtggcaagcagaccggtcaggtcgccgataagtcgtccggacttacctcgtgcgagttccgcgatatcaggattcttcttctggggcataatcgaggaaccggtggaataggcgtcgtcaagacggacgaaggcgaattcctgggtattccagatgatgatttcttcggacagtcggctgatatcgacgccggtcatggccgcgatgaaagcgaactccgcgacgaggtcacgactggcggtgccgtcgatggagttggcggtcaccttggagaaaccgagctcacgggccaccgccaccggttcgagaccaagggtgttgccggcaagggcaccggaaccgtacggactggcatcgatgcgcccatcccaatcggcaagacgctcgacatcacgcagcaacggccatacatgcgccatgagctgatgggccagtagcaccggctgggcatgctgcatgtgggtgcgtcccggcatgacggtgcgacctgctttttcggactgctcgatcagcgtcgcggcaagcccgagcaacatcttggcgatgacgcggctctgtcggcgcagccacatgcgaatcagggcggcgatctggtcgttccgcgaacggccggcgcgcagtttgccgccaagttcgtcgcctgcgatttccagcagaccgcgctccagtgcggtggcctcgtcctcgtcatcctcgatcggggcaaaggcaccggagtcgacacgacgctgcagctcatcaagggaatcctccatgcgctgcaattcgtcggccgtcagcaaaccggcacggccgagggcacgggcatgggcacgcgatcccgcaatgtcgtcatcggccagacgccaatcgaactgcgtggacttgctcagtcgagccaattccggagatgggccggatgtgaaacggcctccccacaatgcaagatgctcagtattgttttcagtcatagctacataccttacacataaggctcccaccgatggagctgtcggccacaaccgaccggagatgaccgcctttcgaggcattcagccatcctcagccacattgtgcatgacagctccatcggtgggagcctgaaacccgattactcgacggtgttgtccggaacttcgatgccgttgccgaacttgacatcacgggccgcggccacacggctcggcagtccgtagatatcgatgaagccgttggaggacttctggtcgaagctatcgccggaatcataggtggccagattgtagtcatacagcgaggtgtcggagcgacgaccggtcaccactgcacgaccaccatgcagaatcatgcgaatctcaccggaaacgtacttctgggtgtcttcgatgaaggcgttcagggactgcgtcgccggggagaaccactgtgcgtcatagaccagttcggcccagcgcttgtcgatatcgcgcttgatgcggtgctgttcgcgctcgaggcagcagttctccagctcctgatgggcggtgatcaaggccacggcacccggagcctcgtatagctcgcgggacttgatgccgaccagacgatcctcaatcaggtcgattcgtccgatgccctgggcgcctgcgcggcggttcatctcttcgatggcctgcaacggggtcacatcgtggccgtcgatcttgaccggcacgccctgcttgaattcgatgacgacctcatcctcgaccggcgggaatgccggatcgtcggtgtaggagtagcaatccttggtcggaccgttccacggatcctcgaggaagccggtctcgatggcgcggccccatacgttctgatcgatggagaacgggctcttctcggtctgcacgataggcagctggtgctccttggcgaatgcgatctcgacatcacgggtcagggacagatcacgaatcgggctgatggccttcagggtcgggtcgatggaagcgatggacacctcaaaacgcacctgatcgttgcccttgccggtgcaaccatgggagatcgtatcggctccgaactggtgggcggcacgcacaagatgcttggagatgagcggacgggagatggcggagaccagcgggtacacgccttcgtacatggcgttggccttcagggccttcatgcagtattcgtcggcaaactcgtcacgggcatcaaccacataggcttcgacggcgccacaggccagagcacgttgcttgatggtttcaaggctttcgccgccctgaccgacgtcaagggacacggccacgacatccttgccggtacgttccttcaggtatgaaatggcgacggaggtatccagaccaccggagtacgccagtacaagacgattctgatcgctcatggtttccctttcttgcatcaaatgttattcagcagtatatgcattgctctgtatatttatgcatatatggtgagtcgtgtccactatatggttattcaccccttcgacacgacgtcaagcagccattgcgcacgttgcttcgcaccgtgatcatcggcgcagatcaccataacggtgtcatctccggcgatggtgccaagcaccccttctatcggttgcctgtcgatgacgctggccacatattgcgccgctccagaaggtgtgtgcactacgacaaggttacgtgcggccgccaccgaagtgaccaagccggatagcacccggctgatctgctgttcggccttggcatccggattggccgcggatccctcatcgggctgcttcacaccgatggcataggctacggtcccatcggacagcctggttttcgtcgcatggatctcgtccagatctcggctcaaggtcgcttgcgtcaccgcaatcccctgattcgcgagaatgtcggacagttgggattgcgaagtgacgatacgcgtgagtagcgcctgctcgatggcactcagtcgagcggcacgagtggcaggacgctgcaacgcgggggtgtgatcagtcatcagaccagcaggctttcatcgccacgggccttgccggccagccaagtcagcagcgccttctgcgcgtgcaaacggtttccggcctcatcccaaaccacggactgagcgccatcgatgacctcagcggtgacttccttgcctcggtaagccggcaggcagtgctggaagatcgcatccggcttggcgaaggccatgagctcagcgttcacctgataatcccagaagggcttggaacgaatggcatactcggcttcctcacccatggaaacccaggtatcggtgaacacgcagtcggcatcggccacggcttccttcggatcggtggtcacgaggatggatccgccggtttcggaggcaatggcctgcgcgtcggccacgattcgcgaatcgggcaggtacccattcggaccggccacgcgcacgttcatacccgccacggcaccgccaagcaggtaggagttcgccatgttgttggcggcatctcccaagtaggcaatggtctggttcttcagattgtcaacgccgccacgatgttcggcgatggtttggaaatccgcgagaatctggcatgggtggaactcgtcggtcagagcgttgaccaccggatgggtggagtattcggccatctcctcgaccctatcctgcccaaacgtgcgccagaccacgccataggccatgcggtcgagcacgcgtgcggtatcggcgacgggctcacctcggcccagctgggaaccggacttatcgatgaccagcggataaccaccaagctcggcgacgccgatggagaagctggaacgggtacgcgtgctgggtttatcgaacagtacggcgatgccctgcggaccggcgaacggctggtggtagaaacgattcttgtggaacttgatggccagttccagcacctgcttctgttcttcgtggttcaagtcgtcgtcacgtagcatgtggcgcagttccggggttgccatatggcctcctttcaaatattaatcgttgggtagatcggcgggaatccgggcgaggatggatatggcccggtcgacgtcccgttcggtgacgaccagcggcggagcgaagcgcagtgcattcggagccacggcattcacgatgagaccgtgctcaagcgcccagttcatggcggcatgggaacatgggtgagacagttccgccgcatccagcaggccacggccacgcaccgatacgaacagcggattaccgcaggacatgatgccgttgcgcaactgctcacctcgcgcttcggcattcgccaccaaatgttcttgttcaatgacgtccaatgtggctaaggccgcggaggcgcccaagggattgcccgcaaatgtggagccatgcgaaccgggggtgaacaatgccgaaagcttggcgccgaaggcgatcatgccacccatcgggaagccgccgcccacgcccttggcgaaggtgacgatatcaggaataactccgccggaaagatcctcacgttggaaggcgaaccaggagccggtacggccgatgccggtctgcacctcatcgatgatgagcagggcaccgtggtcatcgcacagttggcgtgccctcttcacataatcggatccgaccggacgcacgccggcctcaccttggattagttccatgatgaccgccgcgaccgggcccttgccatggtgtccctgtcctgtttcggcgaaggcatcctgcaatgcgcagggatcgccggcctcaacgaattcgatattcgggataagcggctcaaaaggggtacgaatggccggtttccaggttgcggaaagcgcgcccaaagtacggccgtggaaaccatgggtcagggcgatgatacgtgccggctttcctccgatcgacggcgatgcgcccggcagggtgcgaccatacagtttggcaagcttcaaagccgcctcattgccttcggctccggaatttccgaagtacacgtgggagccatccggggctccggccagctcaacgagcttggccgcaagcctgatctgcggttcggtggcgaagtagttgctcacatgcgcggccttggccgcctgttcgctgactgccttgacccacttcgggtgggcgtagccgagcgcattcacggcgatgcccgccagaaaatcgagatactcattgccgtcgacgtcccagatgcgggcgccttcgccatgatccatcacgcgtaacggagtaccgaacacgttcatatgcacctgggagtattcccccagccatttcgcgtcttcacttcccaacgcttccagttgttcagttgccataagagctcctcatttcgacgccgtcctcggggacgaccatggttccgatgccggcggaggtaaaaatctcattcagtatagaatgcggcttacgaccatcgatgatgtgggcacgtgggacgccaccatcgagggcacgcacgcaggcctccatcttcggacgcataccgctttccaaatcgggcagcatatcgcgcaggttctccacaccgatgcgcccgatcagggaatcacgatcgggccagtcggcatacagtccatcaacatcggtgagaatcaccagcttgctggcacccaatgccgcggccaacgcggctgctgcggaatcggcattcacattcagcacttcagtggcatcatcctcattcggggccaccgaggaaaccaccggaatgcgtccggcgttgatcagatcctccacggcggaggcatcgacgctcaccacatcgccgaccagcccgatatcggtaggttcaccgtcgatcatgggcttacgttgcatggcggagaacaaggcaccatcctcaccggacaggccaaccgcgaacggaccgtgcgagttgatcagtccgacgagatcgcgggaaaccttgcccgtcaacaccatgcgtaccacatccatggcttccggagtggtgacgcgcagaccacccttgaattccgatttgatgcccaacgccttgagcatctgggaaatctgcggaccgcctccatgcaccacgatcggatgtaatcccacctgacgcaggaataccatgtcctctgcgaaacactgtttgaggtggtcatcgatcattgcgttgccgccatacttgacgacgatgcgctgtccggcgaattcctcgagccacggcaacgcttcgatcagcacttcggccttctggtcggcgcgcaaatcggtatgcacatcgaaatggaaaccgggtcccttgagttctgttgtcattgcctgtgttcagctttcatagtcagcattgatatgcacgtattcgtgggtcagatcgtcggtccagacgctcgcttcggcatcgccctcgttgaggtcaatgtcaatatgcacctcacgcggcgtcatatcgacctcggaacgatcacgtccggccccaccgttttcgcaaatacgtacgccattgacgtccaccgtgaccttttcggcatcaaatggcgcatcctccggggaaaccgtgcccagagaactcaggattcgtccccagttcggatcgttgcccgcgatggcgcacttcagcagattggaggccgctacggcacggccgcatgccaatgccgcgtcctcggtggtggctccggtgaccttgacgcgaatgtcatggctcgcaccttcaccgtcgccgacgatctggcgcgccaacgatgcggtggccttggccacgagatcgttgaactcgtccggatccggctccacgccggaagcaccagaggccagcagcagcacggtgtcattggtggacatgcagccatccacgtcaatacggttgaacgacatctccacgcctgcgttcagtgcagcctgaagctgacctgcattcaccacggcatcggtggtgatgacgcacagcatcgtggccagctgcggagcgatcatgcccgatcctttgaccatgcctccgacgcgaaaaccggtggagccttccagctcgacggtcttcggcttggtgtcggtggtcatgatcgcataagaggcgttctctccggcctcgacgctatcggacagtgcggcgaatgcggcctccgtaccggaaagtacgtggtcgagaggcaacagttcgccgataaggccggtggagcataccgcgacatcgtttgcggatgcgcccagcagctcggcgaccttttcagcagtggcttgggactgctcatagcccggcttgccggtgcaggcattggctccgcccgaattgagaatcaccgctttgacatggccatcggcaacgaccttgcgggaccactgcaccggagccgcacagaaacggttcgtcgtgaatacggcagccgccgcatccaacggaccgttgttgaccaccaaggccatatccttcttaccctcgacggcggaaatgccagcagccacaccggccgcggagaatccttgtgcaaacgttacactcatggtgccactccaatcttcgtaagtcctgcgtcttcaggaagtcccaatgccacattcaacgactgcacggcctgtccggcagtgcctcggttgaggttgtcaatggccgcaaacgccagcagacgaccggcattatgatcgacggccacttggatgtgggccgcattcgagccaatgatgttggcagtggccggcatcacgccttccggcaacaccaccatgaaatcctgccctgcataggcgtcgagccatacctgtcggatttcggcatcgctcatgcccaacgccttgtcggtgagcctggcggaaacggatgcgaggatgcctcgtgccatcggcaccagaatcggcgtgaatccaagcgtgaacccttcagccgcggaagcttgcttaccggcagcatgagcaaagttctgcagaatctcgggaatgtgacgatgcgtgccgcccacggaatacggcagagccgatccgaacgcctcggcggccagcagattggtgcgcttgagattcttgccggcaccggagtagccgaccaccagatcggccacgatgtctttcggctcgatcaggccctgggccacgcccggctgcagagccaatgtggtggcggtcacgttacaacccggccccgcgatgcgtttggatcccgggagggcctcgcgctgacgaacgtacgagccatcggccgaagtaccggtgatgagttccggcatgccataggtccaatgctcgtagaaatcaccgccatagaactcgtcccacgccgagtgctcctcgagtcggtgatcggcgcccagatccaccaccacggcattcgcgtcaagcttggaggccaatgccccggaagcgccatgcggcaatgcgagaatgattacatcatgcccattaagcacttcgggggtggtgtcctccaccaccagatcggccaattgcggaatatggggcatgtgcttgccgagcttgtcccccaccgaggaatgtccggcgacgcatgtcacctcgaaattcggatgggcggcgagtatacggagcgcctcaccccccgcatacccggtcgcaccggccacggctaccgtatatttggccatgtcacgtctcttttccttgactcactgaaacacccccagcatacactttatgcagtacattgcataattatgcatccgaaatgtgtcggatagtggtcatcgtgatgtgccagcatggacggcacggcaacggtcaggcagacagcgaaccggattccgacgagcctgaaccgccgccaagcatatgctgcagcagctgatcataaagctcggtggaagagatgccgtgcacagccatccagatcacgccgatggtgtagagcacgttgattaccaatgcggctacgcccagccagaatcctttcatgtggaaggtcttggtacgccacatggccacgccgcccatcagtgcgggcaccaccggtaccggcagaaggatggtgaacaccagcgaaagaatcgcataggaatcccaatgcccatacagcgggttctgattgggatcgttcagatcgatgttgccccgcattcgcggctgccgtccgctcggcgcctgttgatcgtactgctgctgcgggttaccgttccagccatagggattgttctgatacggattctggttctggtacggattgcccggctggccgccatactgctgcgaatacggatagcctgcgggagtaggttgttgaggctgccgagcctcggcgccctgctggttggaggaattcgtctcgatttccggcgcaccatagacgtagggattgtatccggaagggtattggttggccattgcaccatattccggctgggcatactgtccgtattgaggcgtgttcgaaccttcggaagacgacgaaaccggagcggcaccggccgtcccctgacgttcatcgggattgttcggctgatattgctccggttcgttcatcgttatcctcttatctatcgttgctcgaaacgtcaggcgcgcaactgtgcgcccaatttgcttgcctcgtcaacaatacgcttgcgaatcgcctcactgtcttcggaagtcagcgtcttatccggagcgcggaatgtgactgcataggccagggacttcacgccttcgcccagttggtcgccggtaaacacgtcgaacagcttgatgtcttcaagactatcgcctgcggcctcggcgatgacctgctgcaacgcggcggcggtgacatcgttcggcacggtgaaggccagatcctgcttgaccggagggaaggtggaaatcggcttggcctgcaccggcttgccacttagggtggcgaacaacgcagtcaggtcaagttcgaaagccgcggaatgcgcaggcaagcccagcgcttcgttcacatgcggatgcagttcgccgaccataccgacaaaagcatcgccggccatcacgcgagcggcacggcccggatgccattgcgccggaacatcctcggccttcggctgatccaacgtaaggccagcgccaatacgatcggaaatacggtgcacggcttcaacggcatcgctccaatccaccgcacgacgttcacccaaccaaccggcgtcgacggcattgccggtcaggatgcccgcgacatgcatcggctgatccggtaggcctgcatcgagcgccgccaactgttcgtcggtcggacgcaccgcgccgggcaacgccgggatggccggcgcgttcggatcccacagatacacatggccgatttcatacagcgacacgttctccacaccacgacgcagattgcgctgtacggtctgggccaaagtcggcatgatggcgcggcgcaggaacgggcggtcgccggcaagcggattggcgatctcgacgctgaccttcttgatctcatccttgtcgtaggcgaagtacttgtagtcttcgtcgcccacgaacgggtagctcaacgtctcgaccatgccgtattccgcaagctcgtcggcaatctggcgcttacgcagctgttcggcagtcagtccgaccttaccttcgacgggagccggcggcacggtgacaggaatttcatcgtagccaaccagacgcgccacttcctccaccaggtcgcacggctcattgagatccggacgccaactcggcgcggttacggaaaattcgccattgccgccacctgcgacggagcagccaatgtcggtcagaatgccgctgatggtgttcacgtcagtgtcgagacccgccacgcgagccacctcggtggctttgaaatggatggtgcgcgcaggggtgacggtgttgacatcggtgggatgttcgctcggctcaccattgccgtacttgaccatgagctcggcggccatctgtgcggctgccggttgcagctgatcgtccacgccacgttcaaaacggcgggacgcctcggatggaatcttgtggcgacgtgcggaacgtgcgatcgacacctgatcgaaatgcgcggattcaagcaggatgttcttggtctcggcggtcacctcaccgtataggccacccatcacgccggcgatgccgaggatgcgtgagccatgctcgccattgggcgaatcggtgataagcagatcttccacgctcaggtcatgcttcttgccgtccagcgtggtcagggtctcaccctcgacagcacgccgaaccacgatcgggccttcgattttgtcgagatcgtaggcgtgcatcggctgaccgaggtcgagcatcacgtagttggtgacgtccacagccaaggagatggagcgcatgcccgcacgggtcaggcgacggcgcatccaattcggagtgtggcttgcagggtcgaagccatgcaccgcacgagcgtagtatcggtcgcaaccaattacgccgtgaatcgggttgttgtcttcgacgatcacctcgatgtcggtcttcgtgccctccggcaggccttgggtgaccggcgcctttccgttcaatgccactgccggatcgacataggccgctccggtggagtggtgatattcacgggccacgccgcggtaggagaacgcataaccgcgatccggggtgatgttgatctccagcaacggctcgtccaagtgcagcaggtgcatggcgtcgtcgcccggcttgagtgcctcgtactcctccggggtgaagccgtacttgcgaagcaggatgataccgtcatgattgtcgccgaggcccagttctcgctcggaggcgcacatgccgttggagatgtggccgtaagtcttgcgcggttcgatcttgaaatcgcccggcagcactgcacccggcagagtcacgacgaccttctcgcccgcggccatgttcggcgcaccgcagatgatgccgcgcggcactttgttgccgttctcgtcggtctcgttatattcgtcgccgacgtcgacgtggcaccagttgatgatcttgccgttcttctgtggttccggagtggcgtcaaccacgtagccgaccacgatgggcccgacgagctgggatgtatgaatctcctcctcttcgagaccgaccttcaccagatccttggcaagctgttcataggtaaggccttccggaacctcgacgtggtccttaagccaatcaatatctaccattggcatgggtcaatcactcccccatcacaaactgttcgctgaatcgcacgtcaccttcgaccaggtcgtgcatgtcattgatgtcatggcgcagcagcaacgtacgctccacgccgacgccgaaggcaaagcccgtatagacttccgggtcgaggccggcggacttgagcacgttcgggttgaccataccgcagccaccccattcgagccagcccgcgccacccttcttgtcggggaaccacaggtcgagttcggcgctcggctcggtgaatgggaagtagctcggacgcaggcgggtcttggcttcgggaccgaacatggccacggcaagcttgtcaagcacgcccttcaaatcagccatcgtcagatgcttgtcaacggcgagggcctcgacctgatggaacacaggggtgtgggtggcgtcaagctcatcggtgcggaacacacggcccgggcaagcgatatacagcggcacgccgcgggtgagaagacctcgtacctggtcggaggaggtctgagtgcgcagcaccatgttggaaccgacgaatccagcggcatccttggcctggttgcccttgacatagaaggtatcctgcatctggcgcgccggatggtccggaccaaaattcagggcgtcgaagtcataccactcggtctcaacctccggaccgtcggaaatctgccagcccatggagatgaagaagtcctcgacgtcttccatcagcttcggcaacggatgacgcgcgccaagcggcttgcggttgacgggcagggtcatatccacggtttcggaagccagcgcacgggcctcctcctcggccttgacctgctgctccttggtgccgtacgcacgaccgaagtcagcgcgcagtttacccatgaccttgccggcttccttcttctgatccttcggtagcgcaccgatggccttgctggcctgcgtcatcgcggaatccgcgccggcgtattgcgtcttgatggctttcaattcctccatactggaggcgttttcgattttcgcgatgccctcggcaaccgcatcggtcaccgcttgggcgtcgaacaccgcaccttctgccacgagatacctttctaatttcccgtttgttttacgcgaaaaacgcgcaatttcaacgttttccgacttcacattctttcaacatgactcgacatagccaagctcagcagcatcaccgccgcgctggtgccgaggttcagggactccgccttgccgtaaatcggaatcgacacgattcggtcggtccgatccagcacttcgcgagtaagtcctcgcgcctcattgccgaagatcatcgtcttggcaccggccagcgtggatggctcggcaagcacatcggtcagcggttccgggggcctggagtccgtgccgtacacatccgccgcgtatatggcgagattccgctcgtcgcaccaagcgaaaaacgcctccgtacccatggtgagtaccggcagatggaacaatgagcccgcagtggagcgaatcaccttcgggttgaagatgtccacgcattcgtcgacgaacaccacggccgcacagccggcggcatccgcggaacggatcacggttcctgcgttgcccggatcgcgaacctgccagaacgcagcgaccatggcattgtcgccaaaggattccacgtttccggcggcgtccagaaatccttgcatgtcggccacggcgagcacgccttgcgcatcggagctcatatgccgcatcaccgcatgcgtcaccttgtggacataggcaccggcctgcatggccttgcctgccatctgcgccaccgtatcggtcaggaacggagcgtcgggttcggtgccgatcgcctccacatacagatcccgcacgatgtcgggatgccaggtcagcagctcgcgtaccgattgaggcccctccaccaggaagcggccggcacgttttcgccccttgcgctccgcaagttcggcgacgcgtcggatgcgttccgccttgggattcgcgatgacttcggttttaataggcatacgcgttagcctaacaccattgttccgccgtacaccccgtcatgtcgtattgagattcagtaaacattcagattcgtttcagattgcaccaagtgttctttacgccatacgccaagatacggtttttatcatcggttcatcgccgatcgcgacggcgtatcgtacagcatcttcggcatcaagggatcatcatgttcgtcgtaaagaacgcatggcaaagcgtgaccagaaacaaaggccgcaacatactgatcattgtgatcgtaaccatcatcgccgccgcggcgaccatcggcctgtccattcggcaggcggcgacgaccgcccgcaacagcgggttggagaacacgaccatcaccgcacagatcagtcttgaccgcaataagctcatcagtgaatcgaagtccgactccagcagttccgacggcaagccggactttgacgcgatgcgtagcgcattggccgacaagcaactctcgctcagcgactatcagaaatacgccaaggcctcatcttccgtgaaatccacgtactataccgaaaccgtggggcttgccgcaaccgatgatttccagccggtcaccgattcgaccagttcatcgaattcctccgattcgagcgattccagctcatcttccagcgatagcagccaaccccaaggcaacggcggccccggtggaggtgaccagccgggtggcggagacagcaacggcaccactgccgtcagcggcgatttctcgctggtcggcttctcctccgacgaagcggtctccaatgcgtcgaacggtagtttcaccatggttgacggtaaggtcttcggttacgacgaaagcagcgacgggaacgtgatcatctccaagtcgctcgcggatttcaacaatctttccgtgggcgataccatcagcgtgaccaaccccaacgattcgagcaccacctacaagctgaccatcgtcggcatctacaagaactccaccgattccaatcaggccatgggcggtccgatggcctccaccgcctccgatccggcgaacgccatctacacttcggtctccacgctcaagtcgctcggcctcgatgcggattccaacgcgtcgagtgattccgatacgtccacgtccacgacccagctgaactatacctacgtcttcgccagcaaatccgattacgagacctttgccaaggatgcgaagaaggccgggctgagcagtgactacaccgtatcgtccgccgacgtggagaactatgaatccagcttggtaccgctcgacaacctatcgaagttcgcactgacgttgctcatcgtggtgcttgccgtcggtggtgtggtactggtggtcatcaccttgctgaacgtccgtgaacgcaaatatgagatcggcgtgctgacggccatcggcgtgaacaaggtcaaagtggccgcacagttcaccttggagctgctgatcgtcacgatgatcggtcttgccttgggcgctggcatcggcgcggcagcctccgtaccggtctccaaccagctgctgtcgagtcagatcgcgcaacagcagtcgcagcaggccagccaacgtgagcagttcggacgcgacatgcagggtacggaccccaacggcgccggatcctcctcggattccacggacgggaattcctccgcctcgaccgattcctccagcaagtcgggctctggcgacaccagttcctccggtgccaccaatgacgccaaacaaccgcagggcggtccgggcggcatgatgaaccaggccgcgaactacgtctcctccatcaacgccaccgtcaatctggccgtggtcgggcaattgctgttggtcggcatcggcctgacattggtcgccgcgctcgtggcagtcatcttcgtcctgcgctacgaaccgctgcagatcctcgccgaccgttcctgaaaggacccatcatgactgacaatacgacgaccacggcaatcctcaagctcgatgacgtcagctacgcctataccaaaggcggcaaaaaggtgctgaagaacatcagccacgagtttcgtgcaggtacggtgcacgccatcaccgggccatccggcgccggcaagaccacgatgctgtcgttgatctcgggactgaccaatcccacggagggccaggtcctctacaacggtaacgacctggcgaaacaggaccgttaccgctaccgcagccacgacatcggcgtgattttccaaagcttcaatctgctgccgaatctcaccgtcgccgagaacatcatcctgtcattggacgcttccggcaaaaccttcgacaaatcaaagaaggagatggtgcttgatttgcttaagcaggtgcatctgcctaaggagtacgcgaacgaacggattctgcacctgtcgggtggcgaacaacagcgcgtcgccatcgctagggcgctaagctacaatccctccatcatcgtggcggatgagccgaccggtaatctcgacctcgccacgcaggatgacatcatgggcatcttccgcgcactggcccatgacgatggccgttgcgtgatcatcgtgacgcacagccctgaagtgtccacggcctccgacgaggttttcgaactcgccccgattcgtcggaggccgtgaccgtcgctatctggagagtttgtcgagcagcagggcctcggtgatcacgttgttcttcagacccggcaggctgatggactcgttcgggctgtgcgcattggccttcggatcctccggtccggtgacgagcacctgggcgttcgggaagatgcgctgcaattccggaatgaacgggatggaaccgccctcgcccttgttgaccggcgccacaccgaaggcctgttccatggcttccatggcatccttggtggcttcggcatcggggtccatggcccatcccatgccgttgtcaagtctgtcgacccacacttcggcaccgaacggggcatgttcgaccatgaattcggcaagtgcctcctgggcctcctgaggacgctggttcggtgcggtgcgcagactcagacggaacgtggtctccggggaaatcacattgaaggacccttcgaccgggtgagcgtcgaagccaatcacggtgacgctcggcttggtccacagacgtgccgcaagcgaaccggttccggccagacggtaggaatcgacgataccggcatccgcgcgtacggtggtctcgtcaaggtcgcgctgcaagcctccgatcggctcttccgcggcgacgcccggcaccgcgagatcgccatgttcgtcatacatggaggcgatcagcatggccgcaagcgtgttcgcatccagaatcggtccaccatactggccggagtgcaccggatgctcaagggccttgacgtgcacgtcgatatcggtgttgccacgcaacgaggtggtcagcgacgggatttcggcggaccagttgcctgaatcggccacgatgatcacatcggacctgaattcgtcacgatgctcttcgatgaatgggatgaaactcggcgagcccatctcctcctcgccttcgatgaacaccttgacattgaccttcagatcgtcgccgagcgccttgagcgcaccggaatgaatggctatgccaccgccatcatcggcggctccacggccatacagtcgcgtaccaatctgcgtgccgacgaatggatcggtatcccaagcaccttcgtcgggcaccggttgtacgtcatgatgtgcatacagcaacacggtcggagcatgctcgtcaacgatcttcgagccgatgacctcccacgcacctggtgtgccatcggggttatgggactgcaccacctttgcgtcaacgccgacctttttcagctcctcggccacgaattcggcggaacgcctcatatgttcggcggtgatgcctttcgcggagatcgactgcaatgcgatcttccgattgagcacgtcgacgatgcgatcccaatcaccctccacacgtgcacggatgtcatcggcaagtaatgctgccatgattctccttaatattgatcgagtacggccaatgcaagccattgtatccacaatcccattcggcgttccgcggcttcgaggcataccgccgaggcgtcgatacgtcaccctaccctcatagacatgagtttgtttaagaaggaagacaaggcccaagagcctgtcgaacagaaggcgcaggagcctaccgccggcaaaggccgcccgactccgaaacgcaaggatgcccaggcgcagaatctccgcccgctggttcccaaggatcgcgatgccagccgcaaggccgcaaaggcacgtatgcgcgaacgtgagaacgccgaatacgaggccatgcagaccggtgacgtgaatcacatgccgaaggccgagcgtctgccatggcgtatctacattcgcgattatgtcgacgcccgattcaacctcggcgagttcttcatcccggtcgccttcgttattctggtcgtctccatcttcgtgacctacaagtggcctaccctagctttgccgctgatggtgctgatgtacgtgtatctgttcgccgtaatcatcgacattgcgatcatgtggcgcaagctcaagaagaaactcatcgaaaagtacggtgagaaatccgtggccaggggcatgcgttccgcctcctatgcgtggagccgtgccatccagatacgtcgttggcgtctgccgaagccgcgttatgccaagcgtggccattggccggaatgatgcctcacatgcatatgtattgccgtcagctaagctgacggctttttattagcataggatcagttgtttttccacggctttcgagccatgacatcaaggattgatatggcacaggaacatttcgatatcgcgattatcggcggcggtccgggcggctattccacggcgttacgtgccgcggagctcggcaaatcggtggtgctgatcgaacgcgacgccacactgggcggcacctgcctgaatcgaggttgcattccttcgaagacgctactcaccgccacgcatgccgtggagaatatgcgtcacgccaaggcgatgggtatcaacgtgtcagtggagagcattgatttcggcaaactgcgcacgttccgcacgcagaccgtggacaccatgaccaagggattggcgggattgctggcacatcgcggcgtcaccatcgtacgcggagaggccgtaatgcagccttgcggaagcgtacatgtcacgccggtcgaaggtcttggccacatattgcgattcgtgaaggcaggcgtcggcgaacctatcgatggcgaactggagatcgttgccgaagacatcgtgatcgccaccggttcacggccgtcgccgctgccggacaatccattcgccggcgcattgatagattccacacaggcattggaactggataccttcccctcaagcgctgtgatcatcggtgccggagccgtggcgctggaattcgcctccatgtggcgtacggccggctgcgacgtgacgttgctgattcgcaaagaccgggtgctctccgcatgggagcgccgcacatcggcgacgttgactcgcgagctgaagcggcgtggcgtgaacatcatcacgcacagccatgtgacccatgtggaaaccggtgccaatctgggcgcgaccgtgcactatacgagggaaggatccgaagcggacatgagcgcctacggcgaggtcgtactcgccgccattggacgcataccgaataccgacgcagactggttcgaggcctgcaagctggaacgtgacgcccggggatttatcggcatcgatgcatttggccgcaccaatctcgaccatgtgtgggctttgggtgacatcacctccggccattccttagcgcaccgtgcctttgagcagggcatcgtcatcgcggagaagatcgccgggctcgatccgaaaccggttgacgacgacacgattccgcaagtcgtattctccttccccgaagcggcatgcgtgggcttgagccttgatgaggcacgggcacggaaggacgtggtcaatgcccaggaaaccgtgtatccgatgctgtcgaattcacgtatgctgatgagcggctcgggcgggtcgctatccattgtcagcggtgcctatgcggacaatcccgaggtgccgctggtgctgggcgcacatatcgtaagtcccatcgccagcgatctgatcgcggaggccgagcagttggtgggcaatcatgtgccattgcatgatgcggcccgcctgattcaccctcatccgacattcagcgaaacgttcggcgaagcgttgctcaaggcggatggcaggcctcttcatacccgctgaccggcgtgggagggccggcggccccgcagccgatgcttacactacggcatagcacctgatagactactgttccagtgtgttcaaccacgtaaccaagtgaggaaattgatggcagacaaagaagagccaaagaagaagcagaacacaatcaaacagatcattcagatcttcaaatacacctactcggaagacaagacactcccctggctgtgcggaagcgtgttcgtggcaccggtcatcgtgttcatcgtgcttggcatcgtgttcaaatggtcggttatcggctggatcacctcaatgatccttgccatcatgatcggcctgctgttcgccaccatgatgctcaccaatcgtgccgacaaggtcggctatgccaagctcgaagggcgtcccggcgccgccatcagcgttctcggcaacgtcagcaaggcgggtttcaacttcccgcaggagccggtgtgggtcgatccgaagaccaaggatgccatttggcgtggcaccggctataacggcatctacctgcttggcgaaggcgattacggccgtgtgacgcgcgccatggatcgccaggagcacaacatcaagggcgtgaccgccggttccgaaatcccggtctatcgaatctgcgtaggcaaggggccgaagcaggtcagcctgaagaatctgcgcaagaccgtgctcaagtgcaagtcctatgagccgacgcatcacaagaacaagctgattgcggccatccatccgaggcgtcgcttcatgctcaccaggaccgaattgaatgttctgaacgaacgtctgcgtactttgcagatgaagaacggcatgaacatcccgaagggcatcgatccgacgcgcccacagaggatcagccgtcgcgccatgcgtggccgctgacggtacatgcatgcgaacgcactaggaatccccgatctgattcgtcagatcggggattttcaattgttgcgtcgattcatcgtcccagacgttcgatccgtccataacatgaacggatccccaccgttgcatttcgtcccgcgaaacgtcgcaacccctatttttcgcgcaatcatggagggaatacgtcatctcgaaacattctcgtaacccaagtggcgagtgtgtgaaacgcgtttttctagactaatagcctgtaagttacttattcgaaaggagcggtcccgtgactgcactcgaaaccaaggctgatgctgaggcccttatcaataaggaaggcgttgaatacgtctccgttcgcttcaccgatctgatcggcgttcagcagcacttcactgtaccggcaagcgagttcctgaaggatgccttcaccgacggcatgccgttcgatggttcctccgtggaaggcttccaggccatcaacgagtccgacatgaagctggtgccggatgtttccaccgcattcatcgacccgttccgcaagcacaagaccctcgacgtggccttctccatcgtcgatccgctgaccgatgagccgtactcccgcgacccgcgtcaggtcgccggcaaggccgaggcttacctgaagtccaccggcatcgccgataccgcctccttcgctccggaagccgagttcttcatcttcgacaaggtgcgcttcgagaacagcatgcagcgctccttctacgaggtggactccgttgaggctccgtggaacaccggtgttgacaccgaagacgacggcaccccgaacattgcgttcaagaaccgcgtcaagcgcggctacttcccggttccgccgatcgaccacacccaggatctgcgcgacgacatggtcgccaacctgcagaaggtcggtctgatcctcgagcgttcccatcacgaggtcgccggcgcaggccagcaggagatcaactaccgcttcaactccctgcagcacgcaggcgatgacctgatgaagtacaagtacgtcgttcacgagaccgccgctctggcaggcaaggccgcaaccttcatgccgaagccgatcgcaggcgacaacggtaccggcatgcactgccaccagtccctgtggaaggacggcaagccgctgttctacgatgagaagaactatggtggcctgtctgacatcgcccgctggtacatcggcggcctgatcaagcactcctcctccgtgctggccttcaccaacccgtccctgaactcctaccaccgtctggtgccgggcttcgaggcgccggtcaacctggtgtactccgctcgtaaccgttccgccgccatccgtatcccgctggccggcacctccccggctgcgaagcgtatcgagttccgcgctccggatccgtcctgcaacccgttcctcgccttctccgctcagctgatggcaggcctggacggcatcctgaaccacatcgagccgccggagccggtcgacaaggatctgtacgagctgccgccggaagagcacgctggcatcaagcaggtgccgagctccctggccgaggccatggacgctctggaagaggatcacgacttcctcaccgccggcgacgtcttcaccgatgatctgatcgagacctggctgggcatcaagcgtggcgagatcgatcaggctcgtctggccccgactccgctggagtacgagctgtacttccacatctgatagtcattagggcaaaacgtagtcggcagtaggcttttcgcactgttcagagtgacctactgcacctatactgcacctatcggaacacgagaaaccccacttcgttcacaatcggacgcgagtggggttttctcatgcctgccatgcaggcagcgagatgagccattcatccaaatccgcgccgtcggatgcgcacggtcggcgtgtaggcgtagcaggcgatgaggtcgccgcgacgcacggcctgacggatggtctctccgtcaaaccgcacaaggcggccgcctccggcatccccaacgataccagtgtcactattgcatggaagaatttagattcaacagaatcatcaattctgaataacagttcatcacctcgagaagctgtcacaaaattagtcacaatcgttcccttgcaaaaagcaaattctcaatcgtcgtatcagccgtttataagatgattggaacgttgaatgatttcggcttcactattaccagaaatgaggaatttcctgtcagaatcaacagaattatgagcgataccttttttcctccccacagattctaaaactgcccaatccggaatttctttttcctttggccagttcaatccagcagtttctagtagcatgccatattgggatgatcgtgtaatatttgtattcgcatcgacaaggccaagttccaataaaaagttagctttactctgatctacgccataggcggctatcagctcttgcttaattagccctcctcccctacgtgccgccatttccccaaatatgaaatcaccagtttcattcttatagaattcaatatgcatcacatttgggaccgtctgatctttgaaagatttaattaattgctttgtcagtcggagcagttcagaatagtcagcgctgttctcgtctaacattacggaaccagtattttgtttctcgaaatctagcggtgggacaaaatatcgtgatggcgaaatcaggatcaaatcagaattgatatagaccacatccacatggtagacagaaccagagcagtattcttctagataatactggtttgaatgtacgcttctgacaatttccggcttagcggctaaagcagataagtcgtctttcgaatgcagtatcgtaatgcctgcagatcctgcaccccatcgaggcttgagaacaaccgtctcccaacgatcgaacgccgaaataatatctccaaagcatttgcaagaggtatagggaataatctttaacccagcgttaagggctgactgcttcatcgtaactttatctcgacagctcaacgctaattcatactttaaaccgggaatttcaaataaacttctcgcctccgcaaccctcagcacatcttcttccgagccagaaattatcctatctggtctaaatttcttaacaacatcaaagaattctgcagtagcgctatcagaggaataattagaaacttcaatttctttgatgacggaattcggccaactatggcgtatggctcgatcgttcgatgttaagactataacttctaaacaatcaaagcattcttggacttcttcaatccattttggataattcgagaaagatttgggttgttgtaacaatagtactttcatatcatttccccctgttgtattcgccaaagcatgagacattaactttgacctcatcattaaaatattgcgccttcacttcaattggacaaccatatgaatacggatacttgcttccctcgggttaaatccgctaaaagtgaagacacttcgttcctatgggaagaacgagttgcattcagaaagtatgtgggacaagcttctggacatgcatgcggagagtttgctcgaaatgagttccaaacggtctcttgacgtaacattttttcatattccgcactaatagcaagtaattcttcattaactgcattaaatctgccgtgatggtggaaaacggaatcgaactgctaatccaacccgtcattgaagagaagaacaaggcagccaacttgttcgcgtccatttcgagttacatcgataacaatgttgtcaaggttgaggcatttcgaagctgctttagtcaacgctgctaaggaaagtttatccaataggccatattgtcctccatccctttcttgcagcgaacagatggagttatcgctgataccacatagcggtgatgaaactgcggagttacttccaccgctttcagaacaccaggaagcagagagactgtcatttctcttaatatcgggaagccgctctaccgcttttcttccttttttatccttagcagccccgctattgggatgttcgagggcatttgtcaatatcttctcaagtatgaatattttttgtgggtgcatgtgactcctctttcagtggcagatagccctttttccatgtttgtcaatttggttagcagcgattgccggcattattcccaccaacgctaatgtgcaccagtaccaaggtgtcattcctgcagggcgtagtgccggaacaatccaaccgccaaggaatgaacctactgattcaccaatagctgcaattatcagccgataattcagaatgtccaccaaaggtttatctggctgtacttctactagagcaatattgattaatggtgcgtagatacattctgcaatggaaataacaatcaatgatacaatgcatatccaccagtaggacgaaactccacaggcaaatatcgcaaaggaaatgccatagatccccaagcttttgattatgaatgaggtagcattatgcccattagtcatacctcgtgaaataaatttactcactggcatctgcagtgctatgactgacaaggcatcaatagaatagaacaatcctcttatgactggactatcggataacgaatagaattccaatgccattcctgcaaaaagctgaccgttcattatactgcccacaaacaccgccaggatagcaagaatagtgccagaacttttcactgagtctttaatggtcttcacgatagaagaggtattttgcttactactttcttcactgcgtataaagacatgatgagctagcacaatcggagccagtaaagcagaaaaaacatagagtccaataatgactataaaaaagagtgtctgcccgaaagatttatatatataattcgaggccagaggaccaattgcggatccaagattggcagtcattgtcactaaagaaaataaagtagcctgagattttttatcctttaccgtagcaagtatatgccctcttagggcaaaattaaccagtgagagtccaagtcccagcaaagctaaatccagaaaaaggaagccgacaaaactcttcattgccgactgtagtagcaaaagcgaaaaaactatgaatccgaaaccagtctcagtgagagataaggttgatgagcgttcaatcaaattgcctataaaatagtactacctctagaaaaaagagataaaattccaagtgctaatccaacatatagtgatgacgttgcagaaacctgaccagtaaggataaccgaaaaaagggaaaaaagcccgctatatgcagcactatttaaaaaataattaaccgatatggagtcattcttgatattgctcagcttttccacatgaacagactttcttttatgctttacaaataatgttctttcatgctagtcgttatatggaaatcgttcgttattgcgtccagatatggtagtgagtgcccggtttcttgcacacttggggttttgcctgtttgcgacacggttgtcagttcactgtgttcatggtgtcttgccagtcgggacatgcccagatagcggcgtgtggaccatgggttgccggtgacgtagcgaattctgacggtgatgagcatcagggcgctctggctgtcgggaaagttgtctacgacgcgggtgtgacgtcggatctcccggttcaaccgttcaatcatgttgttggtgcggatccgtctacggtgctcgatcggtggtcgtccttgatggccccttcttccatcaggccttcgctgtacagggtgctggctggtacttgggcggagatgatgttgccggctggcggcggaatcaagccgtttctacggagccatcatcgtcctgcgtggcgtccggataactttggggtaacatcacaggccaccgaaacacccgcgacacacccgaacgacatcaggtcgctagcatccgtctgtcgcgtcggccccggcattgcctgcaccggcatgcctgagatacgttacaggcgcccccggagtcttccatcggactccgggggcgcctgtaacggtgtacggctaagacgttcagcgtgcgtggcgtgccatgacgtcgaacctgccccgtccacggcggcgcagttgcatggtcgcgcccgcggcggcagcgaggacgacggcgaacaccgtcacctcggcggtgtccacaccggtcgcgccgagcttggcggacccgttcgtcctgacggccgtcttgttggcgacgtcggccgtggccggggtcgagaccgtcacggtcgtggtgtcggacgtgccggactggacggtgctgtcggccttgatgtcgccgtccgtggtgtcgccggcgtcttgccccgtctgccgttcgaggtcggcgagacgggccttcgcgtccgcgagcttcgactgcgcggccttgacggccttggaggccacgtcgagcttcgccttggcggcagccagcgtggcctcggccgtctggaccgcgtccgtgtcggcggcgttcgccttcgcgtccgccaacgccttctcggccgtctcgtattcgctcttggccgcatcataggaggcctgcacgtcggagagcgtcttggccttggagtccacgtcggcggccgtcttctgcacggccgcgtccgcctcggacagcttggcggccgcgccgtcggccttagccttgtcaagcgccgtcttcgcgtctgtcagggcgagcacatggtcggacgcggcctgctgggcctgccccaggctctcctgtgcgtccgtcacggcctgctgggcggccgatacggacggtttctttccgttgatatccatgccctgtctttccttctcttccatcggaccttgggtacggggcgtcacatgtgtccccatgccgttcggcatcccaccgagaacggtggaataccactgttttcaaggagtagatttttgtcgggtaactctggggtaacatggcaccatactgaaaagccgcggcacacgcggccgcatacgcataggaaaaggcatgggatatcacggttcgtaaaaaccggagagaggattatgcctccaacccgtccatggcgggccttcgtgtccgcagccatgttgctgggactgttagccacattcgtcacgctgacgacagtgccggtaccacgacattgagaatccagaagaacatgggaaacatgcggcagataagccagattacgtcttattgacttctcagacacgcccgttcctaacaggataggcatggagatccaaggaacggaatacgactcacaaatctggaccctgactgtcaagcccatcgaatcggccatcggtcagggccggcccaccattcattatgaccggacaagggcgacggcgatgcattcaagatggtagacagccctagcaccgcccacaaggacaagctaccgtcacgaatctggcgtccacgcaggacgcggttgtcacgttgtacgcgtaatggcgaggactgttgacggtgatgcccgacacaggcggccaagccaatcatatatcccgctcatcgtcagcactgccgtcacggccgttgctttggcgttcgacgtcatggcgtgtcatcgacacacgtgtcagcgcccgtagctatgcgggcctgatatctgactgacgggcatggctagctcgtggtgtgtgaaagacccatcgacgatgaccatatgttgcctatctccctgctgatgtcatcgaacgcctatccagcacggcaaagccggaactcgatccgtccgaggtcaccggggtcgccgaaaccggcaggacggttttgcgatgaaatcagcagcatgctggccggcatgagccggtgaccggctgaccgaaatgttgggtatccacagcggaatggctggcaacgaaacaggggtcggcttatttgctggagattttgtatcctttgtccgcaattagatagctagggctgtcctccccgctggttcctgaaaggatgtcaccgacatcgcggaatgcaacggcgaccatctttacatcaagcggcacctggaacggataagtgacctgcgtgctgagtcccggctgaaggtcgacgttgcattcggggttgccctccacttggtaaagggcatcaattggcgtgtactgctggctgtcggagttgagggcgtagatctcgtatggataactgcaggtgatgtcgagtggcttcttcgtgttgttcttgacctcaaccacggcgacccagtacttggtacttgcgtcgggcgatttcggcgcataggtgccgttactgcaactgtcgccgcaagtgtcgtagctaatagtcgcctgttcagatgcggataccagcttcatctcgataccgccgttgaccacggtctcaccaatctggccctgctgtatggcgtcgttagagtcatcattcgtgccgttggtcggattgaggcgtttattcgcgtcggcaagctgtttcttgaccgaatcgagcgatgtttcgagcttctcgattctagagttcttctgtgcgataatcgagttcgcacgcgatatgatcgtcagtcgtccggcgatgtatccgacgaccagcgcggcgatgacgccggcaatcaggaggatgagcgtggcgcgtttcaaggtgacatgtcgggctccatgccccgggctttggggtacctgaggcactggttgaggcattacctgttgtggccggttaggccagaccccatccgaaatccgtggtggctgcgacatgttgatatcattattgctcattctctctccttgaagaatcgttcaaatcgattttatgcatgttggggttaccaaaaaagtgcgctacgaagcgtgtcgtattccccttaaaacttactgtcgcctagagtatccagacatgctaccccgtttttcgcaccttcttcgtcgcgttgtccctagcctagtcagaatatgcatagcgatgcccgttcatgcttggtcgtgacacatcaaagccaacttaggagtattggtgacggtgttcatcctctcccgcatagctagacatggcattactgacaaggaaggccccgatgcgcaacgtgcgtcggggccttcccgtatgcatgccaagcataacgagcagtgcgccgtcacaaatcctcaaggtcgtctggaatcggactgtcgtcaagattgatggtgaagagacggtatttgccggcatacagaccggcctcgtactcggtggtgaagcccattttgcggaacaattcgactgttcgttcgtcgcgatagtcggaatacgccgtcaccaacggactacgcttgttccgcaaggcgttactcttgatacatatcagcgcatcacgcaatgcgaaaaaccccattcggattcccctgcagtccaccgagcgggcgagtgccgaaatatggtagtgtcccctgtcattgaaccacgtaccgccatccacgagacgaatccagcaaacggacgtcacctcatccgttttccaatccaccatgcgcatggaaagccggactcggtccttctcgccgctcaccgtatatggaagcgccgagatcatgcattcgacctcgtactcccacggttgaaggaaccgatcgccgaccttgatggctgtcgccattgcccctgaccctctttccaccggaatggcgcatcgcatgggggcgatgtcatcccaatgatccaggctcaggtcaacccatcgtaattcgcgtgcgacgttcagcatcaagacgttccatatagcagcggagagccatgcatgacatgcgctcgtctcgttccacccagcgacggtactccttccgtattattctcagctcctcctcagtgggtcttccccgcatgtcggattatcctttcttacggtttcatatacctacagcctaggccattcgtcatacaaaacaggattctgcgcaaaacattttacagccatatcccaatattagaagtaattcttcccgtaagaatcggtttaaatcgtgctttctgcatttctccgtgattagcaaaacagccgccccacctaatggcgggacggctgcatgtcatgcgccgcggcattcctcatgccatcggcatcgacttatggacgctcctcgatgatgcgccggatttccttgagatcatcggcgaaatagatgccgcgctgacgttcgggagtggagaatcctgcagtgatcatgcgatcgagcagcgacttcatatcgtcatagaaaccattgagattgtagaagatgcaaggttgggtcagttggttgaggcagatcttcgaaacgacctcgctaacctcctcaagcgtaccggtgccgccgggaaaggcgatgaacacgtcgccaagttcgatcatcttggtgcgacgttccgtgatattcgatacgacatgcaattcggtgagaccgttatgttcaacgcctcggtccacgaacatctgcgcctcgatgccggtcacttcgccaccggtcgccatgaccgtatcggcgagcacacccatcagcccctcatcggaaccgccgtaaaccagcctgttgccgctttcggatatccacgtcgccagttccacgacggcttccttgaacgcagggtcattgccttcgtgtgcccccaggtacaccgtaatgttcatgcatgtctcgctttccgtccgccgaccagtctacaagaaggggtgtcttccatgcgggccgaccaaaccgtttcggcatcaattacggaaggaccaatgccagtatccggtacggtatgcgagcagcaacgccgcggtcggtatcgccatgcagatcagatagaacagccagtcgaccccatgcaagcgcaacgtacgcgcctgactgcgcggaacgtcgccgccgaatccacgtgcctccatggcggtggcaagcttggttccgcgacgaatcgacacgaccagcaggctaaaggcctgcaggaacacgcgtctgatggcgcttccgtcgcccagacctcgcgaacggcgggacagacccaacgcacgccagtcatcctgcaacaatgtaaccatgcgcatgccggccagaccgccgtacacgaatctcgacggcaaatgcagaatctgcaccagaccatccgccagatcggtcggatcgagcccaagcgcgaaaatcacgccgggcaccgcgatggcggcgacacgcaggaacgtcgcagcacccgcatacaacgagccttccgacaccgccataagaccgaatgtgaacagcgtcgccccggaagcggtgccatacagggtcacggaaacgaaacttcctaccgcggcaatccataccatccaggttttccgcagtaccgtcaatggattcacgccaccgatccacagcagcatgaggtcgatcagcagtgccgcagaggcggagacgacgtccaatgataggaacatcggcacgcatagcagaatggctccgatgaaacgactgaccggattcagtttcgcgatgaaccatgacggcgacgtcgcctgcggctcatcatgacgttcctcatgggccacaacgccaatggtttccatcatcgtccctcctcacttaccacgatgcggcgcgcatccaacgctttgaccaagggctcgtcatgcgtgaccatgatgaccgcggaacccgcgtcacgcgcaccggcgataagacgtaccatttccatccatgtggtgaaatcctgtccgaacgtcggttcgtccatgatgatcaccttcggcgccgccgccagcatggacgccaccgaaagccgcctcttctcaccccccgacaacgtgaacggattggccggtgcgaaccgtttgagattcatgcgttccagcatctcgtcggcgatggcataggcctcctcatcggatttgcccatggatttcggcccgatcgccacttcatcccgtacgctggatgccacgaactgatgctccggctcctggaacaccatgccaatacgcccaagcagatcgcggcttttccatgtgaacggatcattctcacgatgcgcgggcatcatggaatcagccacgcgcacatggccggcaatcggcttgagcagaccggccaaggtcagggccaaggtggacttgcccacgccgttcctgccggtaagcgcggtgacctcccccgcatggaaacgcacatcgatgtgctttcccaaaggaaagctgcgaccgaaactcaaatcatcggtatacagcaccacatcgcgatcatgtccggtttgagtcggagcatagcttgcgatgtcacgtcccggcacccacgccccgccttcggcgaggacatcgcccatggcgttgaacacctcttcaggcgagccatccgcaatgacgccgccttcatacgaatcatcgttcggcctgcccagtacgatcacacggtccacaaggtcaagccacacatcgatatggtgctccaccaccaccatcgtctcatggccgcgctcaagcacctgtctgaccgcgtcatgcacctcctgcacgccttccggatccaggttcgcagttggttcgtcgagcaacagcagtccgggatgcatggcaagcacgcccgccaatgccaaccgctgacgctggccgccggacagccgacgtgtggaatgatccgtgcgcatgtagtccaggcccacgatgtcaagggccgcacgcacccgcttccagatggtgtctcgtccgaggccgagattctcgcagccgaaagcggtatcgtcacctgcacgttcaagaatcgtctgggcgtccggatcctgcatcaccaggccgctcctgccgcgtgccgtacgtgaatcgatgccgtcgatcagcaggctgccttcctgttcgccctcatcatcgccgccgagcacgccggccaatccagccatcaacgtacttttgccggcaccggatgcgccaagcagcagtacgcgctcccccggcttgatttcaaaatcgacatgtcgcaacgcgaaatccttacgcgaagcatgtctccatccccagtcaactgccttcacaccggctgcgaccacggttccgacttcatccgtcgtcatctataggttctccaatccgcggtatccccgaccatatgaagagggtttgcggcgtacgcggcatgtacgtcgcaaaccctcgcccgtcttgagcgcgacggcgctcagaccagttcctgcatacgtccggattcgaagcggtcaagcacgccggtcttcgccaaagcgaactgcaccacccacatgaaggcacctcccatcaccgcgccggaaatcacgcagcagatggtgaacgtgctaccctgcaacacggtccagccggaatgggtgagccaatcatagccgccgttgaacaggccggtcagcgcgccggccagggtgacggaggcaatgttccacttcttgtaggcgaacacggcgaagccgatttccgcaccgagaccttggaacatgcctatgatcagggagcctccgatgccgaacggattacccatgagcgcctcgatgagcgctgccacggtctccgcgaagaacgcggcgccaggcttgcgcacgatgatggccgccagaggacctgcgaacagccacatgaagttgaacagaccgcccaagccaggtgtcagactgtcgaaagcgccgatcggaacggcgtagatgatatcccaagcccagaagatcacgccggacgcgacggcgatgatggccgccacgacgatatcgaccacgcgccacttgttggagtgcttctttactgcggaagactgaatgccagtcatgaattgtgcctttctattccatcaaggcacgggaaaagagagacgtccgtgcgccggcattacccggtatacgttcatacggtcgaagcgcgttcgcttcctctcagccttaacggcccccgtgtctgtgacagatactacacaaggcacacgattttcgccaccgccttaccgtagcgggacacgcatcagcgattccgcgagttgcctgaaggtcgcgccgagaccgtcggtacgcaatgcgccttcttcggtcagtaccgcaggacgtcccgcctcaccggtctcgcgcagttcaggttccaacggcaactgtgcgagcaatggcacctcgtatcccagattctgggatagctggagggagacacgttcgcctccgccttctccgaagatcttcagccgttcgcccttatgctcgaaatagctcatgttttcgaccacgccccgcaccttcatcggcacctgcagcgccaccagaccggagcgaaccgcaatgtcggaggcggatggctgcggagtggtgactaccacgagttcggcgttcggcagggcttgcgccacggaaatcgccatgtctccggtgcctggcgccaagtcgagcagcagcacgtcgggctccccccaccacacgtccgacaggaattgttccagtgaacgctgcaagcgtgggccacgccagagaatcgcacggtcggctccggcgaacatgccgatggagatcatcttcacgccccaggcggtcaccggcataagcatgccgttgaggttggtgggttgcgtgtgcacgccgaacaatcgcggcagcgagaagccgtagatgtcggcgtcgatggccgcggtgtcgtagcccaatgcggcaaaggtcgcggcaaggttggcggtgaccgacgatttgccgacgcctcctttgcccgatgcgatagcgaagatacgggtcttgatgcctggcttgttgaacgggttctgtttgcgttccgccttgagaccagccaccagttgggtgagcttgtcatggctcatggaaccgacctcgatatgaggctgcaacgtggcatccggatatgaggccactgcaccattgatctgattcgtgatggtctgcgaaagcggacaaccttccacggtgagttcgacggcgacggtcacgtcgtatgtgttgtcctcccctgtgaccggcgtcgcgtcgatggaagcgatcatgcccaagtcggttacggaacgacccaattccgggtcgatcaccttgctgagacgttcgtagatttgcgcttcgatcatgcgctcgtctgtcatggttcctccttgttgccgcgtaccagcctagcggtcatgcatgcggcatgccagagcttcgtaggttttgctcacgagaactgcatcacaccgtaccgctgctcagcagttgtttgaactggtcctcattgagcatgggaatgcccaattcctcggcttttgcggctttggatccggcgttctctccgaccaccacccagtcggttttcctgctgaccgagccggccgcctttccgccatgggagataatggcttctttggcggagtcgcgggagaaatcgaccaatgacccggtgaccaccaccgttttgcctgccaaggtctgcggcagatcgttggtttcggccaccacacccacgccggcggtcttccacgcatccaacaccgtgccacgccagttgcctggttcgtgtgcggcagtgaaccatgtgaccacggattcggcgatttccggtccgataccgtcgattgccgaaagttcctcgacgctcgcgtgttcgattgcgtcgagtgagccaaaggccgtggcgatggtgcgcgcggtcggcggaccgaggcggcggatcgacagtgccacgagcacacgccataaatccacgtgcctcgccttttccatttcgtcgagcatcttgcgcgtattctcagcagggcgaacgtacaccggctgcacgctggtcacgccggtgcgcgacaccttggtatcctcacggatcactacggcgtcggccggcacattgtactctgggtattccgaaacggcggcgccgttcacctccagttcggcaagtttcttggcggagagtttcctggccgaggtcggagcggtccagaatgcaggcacctgatgccacagtccggatcctcccacacgcttgcgcgtcttcttggtcttgcctgtattgacgtcgacggtttcatggatttcgatgatcggtgcctcgcgccatacgcgcacatccttcagatcggcggcggtcagtgagaacaggcccgcctcgctggagagcaccggcgtctgcgcatccggcaaccgcagtccggcaaccggctcgtagggttcgggctcttcgccgggttggacgagtatttcagtgatctccggcgcatacgtgtcaacggaatcggggcggtgctcctccggattggtcagcgcgatcgccgattgatcgcccaaatgttcgatatcgaacgccttgcgggaagccaagttgatgatgcgctcggtcaactgcgcagggcatgattccacattcgggcagcgaatgtccttgtcgccctttttggccggagccagttcggcaccgcagctcgggcagtgcgttggcatgacgaacgcgtgcagactctcctcccgccccttgcggcgctcgagcaccgggcccacgagctcggggatcacgtcaccggccttgcgtaccaccacggtgtcgccaatgagcacgcccttgcgctccacttcgaaaggattatgcaacgtggtacgtgacacggtggaaccggccacatatacgggcttcaggatggcgaccggggttacgcggccggttcggccgacctgcacggtgatgtcgagcagatcggtgttgacctcttccggcgggtatttgtaggcgatggcccagcgcggcgcacgtgaggtggcaccgagcgcgcgctgcaatccaagatcgtcgaccttcacgacgatgccgtcgagcgcgtgttcgatatcgccgcgatgttcgccgtagtagtcgatcatgtcaagaatgtcggtgaacgatgtgacttcgcgattatgcggcgaaaccggcacgccccacttttcatacagcgcatatgcctcggattgatggttgatcacgtcatgtctgtcggcacgtcccgcgccccagcgtagtgagccgatgccgtgcgcgtagaagctcagacggcgcgtggcggtgatgcgcgggtccttctgtctgaggcttccggcggcggcattgcgcggattggcgaatggggctcggccggcgtcctcattctcgccgttcaatgcggcgaagtcgtcccaacgcatgaacacctcgccgcggatttccacgaattcgggaatatcgccttccgggccggccagattctgcggaatggtcgaaatcgtccgcacgttgagcgtgatatcctcgccggtcacgccatcgcctcgcgtcagtccctgttcgagcacgccgttacggtacacgagattcaatgccagaccgtcgatcttgacttcacaggtcatcggcagcggtttggattccggccagtcgagatcgcggatcacactgtcgtaccagtcacgcagctcttcgatggaaaacacgtcatcgaggctcatcatgcgcgaagggtgacgtacggaggcaaaatcgttggaaaaggtaccgcctacgcgatgggtcggcgattgcggggtgtccaaggacgggaattgcgattccaatgcctgtaggcagcgaagccgcgcatcataggccgcatcggacgatatgggggcatcgtcgatatagtaggcgatctgatcggattccacccaggccgcgaccttcgcccacagccgggccgccgcttcggcactcagcgaagagacgtcaagccggtcgagtcgcatggcatcggcgtcagtggactgcaatgccgcaatccaccgttcggaaccggggaccagtcgggaggcgtcgccgtcggcatccaccgtaatctcgggttcggcggtgccatcgaccgaaacgtcgaaatcccaagcaagctgttcggaatcgtcatgctgtgtcatgaatgttattctccgctaattgttgagcgaacgcaggaactgcatctgtaccacgtcggcaccgtcgcgctcggcgtcatccatgcgcgaggcagccacggacagcgtgcgtgcaggtacgaacatgccctcatccacgcatacacgcgccgccctgcgtaccagcgaggcgacctcggttttcggccataccggcagaccggcctgttccaacacctgcatggcttccggcacggtggtcggcacgggaatgcattgcgattgcgctcgtgcgatcagttcccgcagttcgccttccaacgagccgatgcggcccgaggcgatgtcatcgctcataatataggctgccgccgcgatgtcgaaacggtcgcacatccattcggcataggccagccgatagtaggcgaatgaggcgtcgtcacggtccaaggccacatgcaaggcgttgaggcaagccgcacgggccggatcccaatcctcttcgcgagccagctggacggcgagtttcagatgcgacaacggataggcgggcgcgtaccgcaccatggcgttcagatgaggcagtgcggccttcgcgcccttgatctgggcaagtatgtcggccagttccatgtgggcgtagaacagattgtcgggaatcagcacggtgcgctcaccctcggtggcgaacatgcggttgtagatcacccgttccgcataggagttgaagtagcgaggcacgcccggattggactcgaacagctggtccatgcgacgcaacgccgcttcgatcatctctacggcctgatcgatctggccgctgaacagcagatcacgggccttcatacgttcggcgtcaagatcgtcggccaaagtgaacgagaagtccggtgtatcgttgccgtcgatcagcgcactggtcacctgtgtggcgagtcccgtcagttccgggtcgcctatggcgttgatgatgtccatcgcacgctgtgccttggccacggagggcatgccatcgtcggcggccaactggtggaactcccccacggcgcgctgcagcagatcgacgcgttggatcgacagtccggatacgtccccgcaaccaaacagttcggcgctttccctgccgaatcttttgtcggaaagctccggctcttcctgcgatccggtcggggagaatcgactgtcgcgcaggtcgaacgtggcatcgaccggtttcagcgcgcccatgccgtccacatccatttccgcatcgaacatgcgatacgtgggcacggggttggccaatccgtccgtatgcagacgtttcaggaattcttcacgtgtgaaggtgaccgtcaccagattgcgcacggtcgggttcttacgcagctggctcatcggatcgtcatcatcgccgttgccgtcgatatccgcatccgtgaaggcgatcatgcctgcgtcgccgatgtcgcccgtaccttgcacatcatcctcgctgtcggattgcggcatgctgaaggtcatgtcatcgaagtcgatgtccttcatcaggtcttcgaactggtcatcgagcgccgcatcatggtcatcggaggaagaagtcgaatccgcggaggtttcggaagggcgtgtgggagccgtcctggccggatccccgtggaagtcgccgtccttcggagccgccttggaacgcgatgggcccatttcaccggtacggatgcgttcgaaggcgctcaatgcttcgctcatcagctcgctgatggcggagtcctgctcggcgacggcttcttccagaccgatggagtcgatgtgcatcgatacacgtcgcacatgcggatcggcaccgaagctcaatgccgccatgagcagaccgatgcgcagattgtagtcggcgctcatgcgggcgcgctccgcatcccccagtttcacccatgcatgatgttccgggtcgtatcgggtggaaggcatcatggacactccggccgaagtgaagccgattgccacattgccgtcttcgaggctgcaacggaattccacgtcgaaacggtatggcagacgcaggcttcgcagcagacgcgccatggcttggcgatacacccattccgagccgccttcggtgagacatgcttcgctcggcgattcatccttggtgtcttcggcaatgtgtcgtcgggtctcgtcggcgatgtcgacgagtctggcgacggcctggatgccgctatcctgatgtgaatcgaggatggccccgaattcatcgtcgggtttcaaagcgatcaatgctggattctccagcaatgccagatcgatctgcgcggcttcggcacgagtgaccgtgtcttccgtgggcaggcatccgatgcgcgcattgcgttccagccaggagcttacggcggcgaaacggttgagattgccttcgatgttgagcgcacgcagggcggcaccgaacggcagggtggaatcccatgcgaagaaatagcagttcgaatagctggacgtatacaggtgcaacggttcggcaccatgtaccgcctccagcatctggttctgctcaagcgcaccggcctcacgcatcagatcggcgaaatagtcctccaagccggaagcgcgcatgccatgtgaacgggcgctcatcgtatcgcgtatggaacgtcgaatggcccccatcggggcttcgcggttgaggcgacggaagatgttgcccgagccgaaaccgatcagcaggccattcatctgcggcagcatgtatgcggcgaagaatgcgatggtcagcgcatcgcggaactccagatcgtaacgcatcgcctccggcagtttggcacgtagttgttccaacgtgtaccgattgccgaccttcagccatgaggcgagccacatcatgcgccctccttcggctcgaccgaccacaccgccctgcgaagccttcaccattttcggcggattggacggcgcacggccgaaacgcatgccgtcgggcagggtcagctcctcctctttgacgaagacgaaccggggctccatgccctgaacatccatggacggatcggttcctgcgaatacacgcgccttgctgtcggccagagcgatctgcgcgaaatggtccttatcggtgaacaggccgatggagaacgcctgtcccttggtctgaggcagctgagcccagcccagcctcaatcgtccgggaacgccttcaaaaccgtcgaacacgcgccttttggtcagaggccccaatcgaacggcattgcgggtcagctcgccgaccacatcctgcggggcgttcagggccgcgccgaacggattgccgaaggtggtatcggacgcgccggcgtcaacgtgatcgccccgcaaacgtcccaaggttttgtgcaccccgcgcataaggcgatccagcatatcccggttcgcgcccggctcatccgctgaaggcgatgatgatgtgaggtgagacatggtagccattctttcaatccaacccgacatgcagccattagaataatgacgtgatctcttcgaagcagcgtattcagacacgtcaccgcatgtgcgcagccattctatccgctcttgccatcatggtgctgattgagtgcgtgttgtgcaacctgccgttctggagaacgcttgccgccagcggtgattccgccgccgcaagcaacacgttggggccgggtctggaacgcaccgccgacggcatgctcaccgtcaccgaccccacgcaggcctatctgcaagtggtcgccgacggtacgtcagcctacatacgcatcgatcccgtatcgggacggacgatcgacaaagcgcgccaggatgccgaaaacaagggcaccgaaccaccgctcaccaccattcgggtacggccggacgccgatcgggtcgcctgcacgattcgctccgtgtcactgtccctgccccgctcgctgtatgtgaaggcggaggccggcagaacggtgcgcgtgcagattctggaaccgaagggttcacggattccgattcaagccgtacgcgccaatgtgcgcgtacctttcgaaatcagtccgcttcgtatcggccttatggtcatcgtgttcgccttgctgctgctatggagaccgaattcgcgtctgtggaaggtgccgcttgatacgtccgccgttcgccagcgcacggccttcgccctgctcatggccattcccgccatcatcaccatctggaacgtcgtatggcagattcgttccgccgtccccctgcagttccatgccgacggcatgtacacctacgatttcgaccagtacgaccatatggcgcaggcgctgcgcaacggccacacctggcttgacctggaagtgccggacgagctccgcgacgccgacaatccgtacagcgccgaaacccggcagcgtcttcttgacgacggtgtcagtccgatctattgggattacgcctactatcagggtcattggtactcctatttcggcgtgcttccggcgatcatgctgttcctgccgtttcgtgcgatcacatcgctatgggtcgagggcgggctcatgttgccttccagcgcggcggtgcttctgctcatgttcggttttctggtgtttgcctgcctgcttacggtgcggctgatcgaacgcatccgccccggttcctccctcgcggcggccagtctgctgtgcgtgttcatgttgttggcatccaacagcgtctatctgtggtatcgcacgaatttctattcggtgccgatcgccgcctccctgttcctgagcacactggggttgtggctatggttgggagccgcgaagccattgccttccgcatcccatgatgacatgcctgcggtggaggatccgccggcgttgtcactgccgcacttggcggccggctcggtatgcatcgccgcgaacctcggctgtcggcccacgttcacggtggtggcactgctggcgttcgcgattttccggccgcagattcatgccatcatccgtcaatgcaaagtgcggcgtgacggtggatccgtcagccacggtacgggcgtattgcggctgctacgcgcaccattcgccgtgctggttcccgcactggtcgtggtcgttccactgcttgcctacaatgtggcacgattcggatccgtccttgatttcggcagcagctatcagatgaccgtcaccgatatgacgaattaccatcagccatttgccaactttctgcttacctgcggatattatctgtttctgccgttacgattcaccgatcagttcccgttcctagcggtctctccgacgcctttgccgtcgtggggcttcaccgaggcgatgcccggtggcttgttcacaacggtgccgcttgccatcgccgcactcgcgcagccattcctgcggcgtcgcatgcaccgatctggccgagcgaatatgtggggtatgctgacggcatgtttgattctgggactgctgaccatagcgcttgactcgcgcctcggaggtctcggatggcgatacatcgccgatttcggctggttgttcgcgttggccgccctgccggcatggctgttcgcgctcgattgttcccgtccacgactgagatggctgatgcgcgcgggtgttctcgcgctgctgatgttctcgattacgatcaccgtgctgtcgctgttcatgccggggcgcgaggatgagttgattcgcgccaattcggtattgttccttgaagtacagtcatggttcgcactgccctgattcgttgcgcatatgccatttacagcgaatattcagcctattctcatgattcaacgagcgaatttacctgttgtctttgaggtacggcgataatagtggcggatatccccctttcgccttgagatgaatatcgtcggagtcatatgtttatgaaaaagctcgccatattgccgaaccaccctcgggccagacgctggtccgccgcactcatcgcctccgccatcgcgctgggcgcatgcctgttgagctacgacaatgtagaggcgcagatacgtcaaaaccgtatcgaacggctcaacgcccgaatagaaaacgtatacaccgccgactatcaggacatggccgacgacaatctcaaggccgagaaaagccaggccgcggccacggaagacgacatcttcgtcaaagagaacccttacggcaccaacaccacgtcgctgtacgtgtatttcaccaccgatgacgccgtctccgtcagctataccgtgcacgcggacggatatgccgacttcacacgcaccgcatatcaggaatcgcaataccagcgcacgcacgaattccaactgctgggactcatacccggcaagaccaacaccatcaccctcacactgaccaacgcagacggcgacgcacgtacgcatacgatcacccataggggcgcctcactgctcggcaacgaggaagtgcagctcgaatcgaccaagaccgcggaaaccggggagaatctcggtgatggcctgtatgcgattctcggcaacgacagcgacgagcaggacttcatgttctactacgacacgaacggcgtgctgcgcggcgagatccccgtgctctactaccgttcgcaccgtctgctgttcgatgacgacggactcatgtggttctccgcctccaccaagcacatggtcggcatgaaccggctcggcaagctggagaaaatctacaatctgggatccgactacatcctgcaccacgactacgccctggacgatgatggcaacatcgtgatgctcgccaccgagctgaaccgcagcgacaacgccgtacaggatcaggtcatcaaactcgacaccaccaccggcgaagtgaccggcctgctcgatttcggcgagatgttcgccgactacaaggcctcctccacgcatgcgggcaccgacgaatcggattccaacgcgaagaaccgctgggactggctgcactgcaataccatccaactgctggaagacggctccgccctgttctccgcacgagagacgtcgaccatcatcaaagtgaacgacttggaatcgaaaccgacgctcgcctacatgatcggcgaagcatccgtgtgggccggtaccgacgaagccgactcgttcctcaccaaatccggctcgttccccgacaccggcggacagcattcgatcacctacgtaaccgatgattcactgtcggacggccagtactatctgtacatgttcaacaacaacttcggcaccgccctgacccgacccgagttcgactggtccgtgatcgacggcatttcgacggagttctcctccgacacggcgcgctcgcagtaccgcaagtatctggtcgatgagaacgccggcacgtacagtgaagtgtcgtcgtttgacgtgccctattcgccgtacgtctcctccgcgcaggagctcgacaacggcaacatcctcatcgattcgggcatgaagggcctgttcgggcaatactcgtccgatggcacgctgctgtccgagttcaggatgacgctcaacaccagctatatctaccgcgtctactcctacgatttccaaggtttctatttcgcctgaccacacccaccgacgactcacgccgattgaggatggtcactatacaatgattcccatgggattcttcgatacgctcttcaccgccaaacacgacacccccatctcgaccgtgaccttcacgctcgacaacgccgcacatacctatgaggacggcaatatcggcctggatgccacaacgctgaccatcacgccctccgataggcgggtggcggtgatcggcctgaatggttccggcaagaccacgttgctgaaactgcttgacggggcattgccagccaccgcaggctcggtccggatcacggccgacggcacggattacgatccatccgtaaagcgtgacctgaagcatgtcgaggattgtatcggacgcgtacgccgcgaggagattccgaacggctattaccaggcctcctcgatacgcgaggcgatcgaccagccgttgaaaaaacataaggttccggaaagcgaacgtcaggcgatcatcggcaatctgttcgctcatttcgacctggcatcggtcgcgaaggaacccgcttccgccttggatggcgagaaacggcatctgctggcgatcgcttccgcgctgagcttctcccctgccgcaatcgtagccgatgaaccgaccaagggattggatgaggtcgcttcggccaacgtggccaaggcgctgttcagctatgacaggcaggtgatcttcgccacgcacgacacggcactcatcacccgccccgaatatgccatcgaccgtacgctcgtggtcgacgagcacaacgtggtcttcgatggcacgccccatgacgccgtcgccttctacaccgacctcatccgagccaagtatgaggcatccagattccctcaatctgccgacgctgacggccgctcagcgtcggcagattgagaaggactagccgatcagttcgttgacggtgtcaagcacgatttgaacgttacgccgaaaatcctccggctccggcagcagggaaatcgccagatagccgtttgacgtcatgtcgaagaagtaaccgggctgtccggaaacgccatgccgctcgatcatggcaagcaccagctcgttttcgtcaagcacgcttggcacgcgcagaagcacattccagccgccttccgcccgcagcacgctgaccagaccattcgggtccgtcttcagcatggcgtgcaatgtctggagattgctgcgcacacgcgcccgtacacgtgtggtttgctccggcgcggcctgaagcatcgacggaatccgttgggcgatgatctcactcatcggcagatagtcgtcggcgatcacgtccagcctgcgtttggcctcggccacgccctcgacgggtccggagacctggatccaaccgactttggcgtgcggtgcggcgagcatcttcgaaaacccgtccagcgcgaacgtaagcacgccatgctcacccgccaatcgtgcgttgccttcgaacggttcgagatcgtaatcatagaacacttcgtcggcgatgatggccaccccatgctcacggcacagttgcactatcacctcgcgttccggcgtcttgacatacgagccggtgggattgttggggttgatgagtatcagcgcacggatacgtccaccatgttcaccttccaatgcctcgcggagctcggcgacatcaatgtaccaggagccgtcgaatcgttgctggtattcaatcgtatcgacgcattcgagacgtgcgatggattcgatgagcggatagcccggcttcggcgcgagcacggcatcgccggcatcgcatagcagcttgatcagccaggaatacgcttccgacgtggagctcaggatatagaggtcatccgcttcgcagcgtccgttcccccgcccgttaaggaacgtcgccaatgcctcgcgcgcataccgttgtcctttcggttcggcggaatagacctccggcaccgatgccggggcaagaccatgtcgggtcggattggaatcgttcagtttgccgagggtcacgccttggcgtttggccgcggcctcctccaccgctatcggattgggctcactgatatcgactcgagaagaaaaacgcatgactccaccctactccccggacgtacggaaaaggccgcctgacgaatcagacggccttgaacgatcgatgctacggaatcacttcatcttggtgcttgcatagtacgcagcgccgatgatgccggcctcgttgtgcagcttggccgcgacgatcggggtcttgatgtcgatgtacggcaggaacttctcggacacgcgggacacaccgccgccgacgacgaacagctgcggatccagatagaactccatgagggagtagtacttggtcagacgcttggcccacttcttgtagcccatgtcgagcttctcacggacggatgaggcggcgtacttctcggcatcgcccttgcccttgagcagttccagatggccgagctccgtgttcgggatgagttcaccgttgaaaatcagggcggtgccgatgccggtacccaaagtggtggccacgaccaggccgttctgccccttggcggcgccgaactgctgttcggcaaggcccgcggcgtcggcgtcgttcaccacggtgaccggacgaccgcatgcctcggagaatacctcagtgacgtccacgccaacccaagactgatccagattggccatgtagccgagcttctctcccacatgaatcggagccgggaaagcgatgccgaccggaacggtctccggaacctcaaaatgctcgagctgctggcgaacgatttcaccgacggccttcggagtggacacctccggagtaagaatcttcagacgaggctcagcaaattcgcccttctccaggttaaccggggcggccttaatgccggagccgccgatgtcaacgccgaaggcttgtgcagtctcaatcatctctgacctctctatgcaggtaatggtgggtgtaatcgaaccggtatccgccatagtaactcgtgccatacccactacacgcgcggaacgcacaaatagtgaatacgattgcatgatttgccatacttaaccgactcaacattccgctcccccgagatggataacgattgcgcccccgaccggccgcctgaaaccgtaaccggacctcacctatatccataccggcgcgtatatatggttccgcaagtttcagggaaggtgaaaacccttactggcggtaacggtgaaaccgatgaccataacggcccaccaccgaagcccgcgacccgcgaatgcggctgatccggtgagaatccggggccaacggtcaaagtccggatggaagaaacggagctcaccatgagtgtatcttcgcatagcgcgcagcagtccaacaaccagtcccgaccggacaacgagcattccacgggagtggccgattccggtcgctggtccaccaaacgcatcgccatgtacgcgttgttcgtggcattggccatggccgtcagtctcatagaattcccgatcatcccgggcgtgcagtggctcaagtacgatccgtcgggcatcgtctgcctcgtggcgggcttcgcattcggcccttcggcggccgtgatcgtgagcgtactcggcttcgtccctcatctgtttaccaatccgtggggtacgctgatggcggtgctcgtggcgttggcgctatcggtgccggcctcgctcatctaccgcaggaacaagacccgcaaaggcgcgttgctcggcatcgtcgtcggcgcgatcatcgcgctcgcggcggcgatcgtaggtaacatcatcgtcacgccgttctatgcgcacatgaccaccgcgcaggtcgtggcactgatcattccggcactcctgccgttcaacgcattgaagttcacgatccacggcgtagtcactttcctggtctacaagccgatctccaacctgctgaaccattgatgtcgaacactcccgtcatcgagctgcatgacgttcgcttcagctatgaccacggcgccacctgggcgttggatggcatcgacctgaccatcctgcaaggcgaacgcatctgtctgaccggcgcgaacggttccggcaaatccacgttgtcccgtgtgatcgccgggctggtcgcgcccgattcgggaaccgtcacgctgctcggcaatgtcgccttcgatgattccggcgcccatgccgacgcataccgcacggcccgtcacggcatcggcgccgtcttccagcatccggaagatcagatcgtcaccacgatcaccgaggatgatgtcgccttcggtccggagaatcttgcaatcgcacatgatgatatcgggaccaggatcaccgcttctctgaaagccgtcggcatgcagaactaccgcaaggccgatccgaccaggctgagtggcggccaacaacaacgcgtcgcgattgcaggcatgctcgccatggattcgcaagtgctggtattggacgagccgaccgccatgctcgacccgcaggcacgcgccgacatcatgcgggtgctcgacgatctgcaggaacgcggcaccaccatcatcctggtcacgcatcacatggacgagctcgtgcacgccgatcgtgtggtccggctggagcggggacgcgtgacggacaccggttccaagggaaaccgtcctacacccccgtcgcattcgaccggcactcgccgacggattgggaatccggccgaaagagcttcgtcgcaatccgctcccatcatcaaggtacatgatctcgcctatcgttatccgaacgccgacccatccgtcttcgagcatctttcgctgaccatcaaccggggcgagacgatagcgcttatggggcgcaacggtgcaggcaaaaccaccttggcccgcatgctttgcgcattggagaccccacaatccggctccatcatcatcgacggcatcaccgttgcgcaagccgtcggctccggcgcatcgaagccgctcaaccgcaaagcccgcgaaaagctccgtgccaccgttggcttcgtcatgcagcatccggaacggcagctattcgccgaaaccgtcgccgatgacatcgcctacggcccacgcaatcagcacctgaccgaggcacaggttcaggagcgggtcgagcagtccctgcggctcttgcatatcgaacatctgaaggatcgctccccgttcgatctgtccggaggccagcagcgtctcgtggccatcgccggtgtgatcgcccgcaatccacgcatactcatcatggacgagccaaccgccggactcgacgaacaggcgaccgtacgcgtgcacgaactcatccgcacgttgcacgacgatggcgtgaccacgctcatcatctcgcattcgcaagcggaggtcgacgccatcgccgatcgcaccatcacgcttgaaccacaagcgtcatcgacgacgcggtctgatgacggcgagcaggatcagtccgcggccgcacccatgaaatcggggcggagcgacggccgcaagccgtccttcatcgacggtctcgacccacgtgtgaagatgatatccgcactcgcactgatgttctccgccttcgccatcaactccggccggcagttgctactgtccgcaatcttcaccggcatgattatcggcgccgcccgactcaatccatggcgattgctcagatccatgcacatgttcctgatgttgtttgcatgctgtggcctgctcaatgtcttcttcgtacgttccggtacgactgtggctcagctgggaccgatcccgatcaccgacgacggcatcaccatcgcgctgttgtacgcctgccggttcgccgtagtcatcgtgctgggagcgacattcctgaacacgaccacaccgacggcaattaccgacgccttcgaatcgttactgtcgccttggaagcgtttcggtatgcatacgcaggagactgcgctcgtcatgagcctggctctacgcttcctgccgacgctcggcaccgaggcgaaatccattgtcgacgctcaggcggcgcgtggcggcgtcatagagaccggttcgcccgcacaacgcatcaaggcgatgacggccatcatcataccggtgttcgcgggcacgatccggcacgccgacaatctgagtctcgctcttgatgcacgctgctatgaggaaggcgtggaacgcactcactggcgcgtcatgcgcgtcaccgcacgtgacgtcgctgcggccgccgcagtcatcgcctatcttgcggcgttgatcgccttgccggcgttatgctagtgattgttccgtctgcggtatcgcgacgattaaggagcagtgatgacgatgaagtcaggaatatcgaagattatcgagccgttcgccctggctcacgtacgtctgattgttggagatgccaagggaaccgtattgcccgatatgacggttctggtcggtgcgcatggccggatcgaacgggtctcgccaagcttcgacacccccgttccggacgaataccattatcttgacggtaccggaaaatatgcgatgccaggcctgattaacgcgcatacgcacctgttctcgcaaggacgcccgttgaatccgaagatggccacgccgaaaggccagcgcatcatcgcggccatggtgcattcgccgttcggcagaccatatgtcaacgccatggcgaaggcgagcatacgtacgctactggagtcgggcgtcactacgatccgtacgctgggcgatatcggttatgaggccgtgacgttgcgcgatgagatcgccgcaaacgaaatggtaggccctcgtgttctggcatcgggaccgttgctggcgattcctgacggccatggcgctcccctgatcgcgttggaaagcgaaaccccgcaagaggcacgtctgcatacgcgcatgaacatcgaacatggcgtcaatgccatcaagatcgccgcaaccggtggcgtcaccgactcccaggtgctcggagaggccggttcccctcagatgaccatcgaacagatgcgcgccatctgcgacgaggcccacaacgcaggcatcatcgtcgccgcgcatgcgcaaggcgcggagggggttcgcagagcgttgcaggctggcgtggataccatcgaacatggcagccgccttgatgatgaactgatcgaactgttcacgcacaatccgaatgcgttgcgcggccattccgcactggtgccgacgctttccgcaggattcccgctgtgcgcattcagccgcgacgtaaccggcatcaccgagattcaggccgagaattcgaaactcgtggtcgacggcatgatcgccggcgcccgggccgcacatgacgcgggcattccggtcggcgtcggcaccgacaccgccatgactttcgtaacgcaatacaatacgtggcgcgaactggcgctactggtgaaattcgccggattcacaccggccgaggccatccatgcggccaccgccgtgaatgcacggattctcaacgtgtgcgcatcaaccggttcattggaggatggcaaggtcgccgacatggtggtgctggatgccaatccgctggagtctctcgccgcacttgcccgtccggcgctggtgatcgccgccggtcatcccgtatggcatccgcatgccaagcggttcgatgacatcgaccgcctgcttgatgaggcgatggaacgtacatgatatgcagggttttaccgacctcacgctatggtagagcgagcgttatcgaaagactttgatgccgcggacagcacgcggaaagttacccagagaaagcgaaacatatatggcacttaccaaaaagcagatcaagcagttgcgaggcatggccaacaagctcaacccgatcgttcaggtcggcaagaatgatttgagcgagaacgccatcaagcaggcggatgacatcatcgaacgacgcgagctcatcaagggctccgtgctcgacggttccggtctgaccgcaaaggaggccggcgaaggcttggccgagcagctcgatgcggagcttgtgcaggtgatcggcaaccggttcgtgatctaccgccgttcccaacgcgatgacgtggagcatatccggctcgttcgcgagtaagcgacttcccctgatggagatccgcgggaaggaaactcctgagaagacaaaggtgggttggcatccgggaatggatgccaacccccctttgcaatgaaaacaaacaatcgaaagtcagcgggccctgcaccgcagcggcgtcagcgcccccgatcccattcgggcttccacgtgtactgcatgtcgtaggcgctggaccagaacatgtactcgttttcgacaccggttacgaaaatgtcgattagttcccgtttgcgtttttcggacagcccttcggccaaccgttcgatatgttcgatcaaccatgcggagccttcccagaactcctcggtcttatacatgtcgacccagctcttgtaagggttggcgtccagcgtgtccgcgaattcacgggcgagacgctggccatagtcggcatatacccacgcacacggcagcacggccacaagaatgtcgaccaattccttgccataggcgatggaaagaatgttcgacgtgtatgcgcgtgcgaatgcggattgccgcacgccggccatctcctcctcactcacgccgtagccggccatatacttgcgatgcacgttggtctccacgttgaagatcgcgctttgcacgccgaccatgaactgcatgacctcggtatcgtcggtcttggtcagggccaacgcgtgcaccttggcgtaatcggagagatagcggtaatcctgcagcaaatagaaggcgaacttctcacgttgcagcgtaccctcgccaagctcacgcaggaatggctgacggtagccttgctcccataccagatcggccgcctcgcgcatgcgctgcgcgaatgggggaagattgtcgagccgaacaccgcgtgccggatcatatggtttgttgattgcagacatcatatcgctcaaagatatgcctccctacgctggtattaaccatcaggttcaaagggtcaggccttacgcctatctcaacccggttgtacgggttcccctgcattacgccgttcattatggcaataccggcagacaccccatctcgctcccgtgacgtgccgccgaacgcggaacgtcgcctcctatgtcagctcagcagatcaagcagatcgtccttggtgagcgagccgacgccgcccgaagcgccaccgtcggtgaattgccgtgccagccggctcttgtcccgctgtaacttcagcatgcgctcctcaatggtgtctttcgccacaatccggtacacgttcacgtcctgtgtctgcccgatgcggtgtgcgcggtcagtggcttggttctgcgcagcctcattccaccaaggatcggcatgaatcaccacggatgcaccgaccaagttcaggccggtattgccggctttgagcgagatcaggaacacaggcgcatcatcgccattgaactcatccaccagctccacgcgcttcctcttcggcgtctcaccggtaatcgcatggaacgcaacgccgtgttcggcgagtcgcacgccaatcaggtcaaggaacgacgtgaactgcgagaagatgagcaccttcttgccctcatccatgcagttggccaccaaatcgtcgatggcttcaagcttggccgagccgtttttcgcgtccgcatacaccaaccgaggatcgcagcaaagctcgcgcagcaacgtgaattccgcaagaatgcgaatcctgctcgtgttgaaatcggcatcccgtgttttggtgagtgcggcgcgcagccgctgttcgtgcgccgcatacagtttgcgttgctcccccgccagcttcacggtcacgacgttctcgaacttgtcgggcagatcggtaagcacgtcctttttcaaccgtcgtttgatgaacaggccgaccaacgcccgcaacttgtcagccatgacggactgttccggaccgggcgccagaatcggctgctcgtaccgttcgcggaatcgcgtataagtgcccagcagccccggcataagaaaatcgaagatgctccacagttcgctcagacggttctcgattggcgtgccggtcaatgcgaagcgatgcgcggcgttcacctgcttgaccactttcgctaccttggtggcgtggttcttgatgtattgcgcctcgtcgagcaccatgcatgcgaacctgcagccggcgtattcgtcgatatcgcgacgcaacagatcgtaggatgtaatgagtatgtccggaccgtcctcgctttcggaggatgcctcggaaacggaggatgacgaggactccgatttcgccattgcccgtagccgccgcagcacgttgcggcgttccgtcttggtgccggccacgacctccacggtaagatcggcagtgaatttctcgcattccgcggcccagttgtagacgagcgatgccgggcagacgatgagcgtcgggccattccccttacgcgcctcgacaagggcaagcagttgcacggatttgcccaggcccatctcatcggcgagaatgccaccgaatcccttgtcccataatgtggaaagccagcggaatccctccgcctgatatggccgcagcacgttgcgcaacgcttgcggtacctcatagcgactcggatcgatgatcttcacatcgttgacatacgaggtgaaggatgcgtttttgcgttcatccggcacctgtgcgtccagtagaaacgcctgatagcccggaatggcgatggttccgccgtcaagttgcgttccggtcaggtcaagatccgaggcaatacgatcgagttcacccaaatcggcatcccgcagatccacgaaggtgccgtcgtgcagccgatggtagcgacgtctgcgccgataactgtcaagcagtgcaccgacctcgttcatcggtacttcgtcggcgatcggcgaaatctcgacaaggttcgattcgaccgacaacccgaccttgacgctcggcttcgacggagacatcaagccgtcgaaggcggcagtggagaacacctgacccatcgatttgagaatctccacaccttcggtgatcagcagcagaatggcgtcttcatcctcttccctgacacgcgccggattggtagcgctccatgtcggaaacagctgacgcgccacttgcacagcgagcgtctcacattcctgatcgcgcttgaccagcgaagccttggatgtggaatcggggttgacgacgccacgcaactccttggctgcggggaccagctgaaatacgaagtccccatatcgtgccacgacttcacaggtcactccgtacaggtcacggtccagataatattcaatccggcattccgcaccgatcgcataggcgacttcctgcggcacatgcaagccgatgccggcgtcggcgagcgcgggaagtatggtgcgtgcgaacatgggccagtcctcttcggcgatgaatacgccgtccggatcgcctacgcatagtgaggagagcgggccgaatgccggttccattgcggcggagcaacggtagagtgcggtatctgcgtagccattggtctgggcgcagatcatataacggctgtgttggcccgttaccgtgcccatgatcaccttgtcggcgatgatgcgtatgccgcgatcttcaccgtgacgttcgtacgatacgttgaagccgaacgccggatttccttcgatgatgttgagttcgccggcatggctcagtccggaggcgaccatgatggacgtgggcttgtgttgcgccggccctgcgatgtcgtcagtctccatggcatgcgtgttctccgatgcctctccgtttgggaggggtaatggcaatgcgtcgtgcaggtcgagcaggtcacagacctcccaatcggtgaggagcaggtctctttgcacggttacggcatcaccgtaggagtatcggttttgcatctgtgagatggcacgtgtagcgagtactcggttgagcaatgtcaggacgctttgcgagaaccggtcgagcatatccggcgtatgggtgaaggccagcttacgcccatatgattcataggctcccgttcgcatgttggatacgaatctcgagatgtttttcagaacgtacgaggtgttgtcgtggccgatgcgcaggctcagcgaccaggtcgttccttcggtgagcgtgatcgtcggttcaagatgcacgctgcccggcagcacgatggccgggccgtcgttgtgggagccgcccgctttgccatggtggtcgggcgccagccatccttgttcttcgcccaatcgctgtttcgcattggcgatgcgtttaagcaggctgagctgggagtccttgttcgacgtatgtcgttcggcatcgattcgcctcatgtagtcggcgatgtatcgtggggtggcattgcccggctggtagccgtggaaacgttccggggtttgcacgaacagcatgatcattgcggcgaggtgcttgcacatgccggtatagcggaatccggttccggcggaacgtccgtcggtgcttcgacgggatctccggccgaagccgtgtgggctttggtaggcgttggcatcatcgttgccctcatccacgtgaccgaatgcgggttccctgccaaaatcgtcgtaatcgtcgtaatcggcatcctcgtaatcgtagatttcgtcgtcatcggagaaactacgatagccgaagctgtcgcggtatcctctgtcgtgagcggaatcggcgcctgcgaaggcagggcagctgcagtagcgtgcgagcagtagctggtcgcccatatcgacggtggcttgcaccgtgtagttgctggaaggcgaagtggtgccgcgtacggaggcgctcagtgtgatacggtccgcttcggggtcgttcagacagtacagatcccgcatcttggcgcgccattggttggtgatgccgcgggcacgctgaagcaccgccgtgttgcattcgctatgcagctcgtcggaaagccacgtgagttcgcctggcacttttcgcctttcgcctcgctctgccattatgttgtcgacggtgctgccgttatctggagcgcttggtcagcggctcccatgggtcaagttccaccggctccgcggtaagcagcgaacgggtggcttcatcgaggtattccttgcggatgatgatctcagtcacatagcggtcgaaccatgcgtcggacgccacgtagtatccgtcgtcgccgttgtctttgccccagctgttttcgaccttccaacggttcggtctgccgtcgccgtcaaggttcacgccggtgaaggtcatggcgtggttgctcggagaatcgccgtattcaaggccttgcgccttatcgaaggtgaattcggtgccgaacagttggtccacgcgcacactgtcgcggtcgaagtatcccgcggaacgcagggagaactgcatgcagtcgcaggcgaaccagatcggatgcccggcgctgatctgatcgatggccgccttcttgaacgcgtcgagcggcacgttgatgaattccatgtcacccgcctcagcgacgttcgcggtgaaacggatgcggtagcgcgtattgaatgggcgggattccatcggaacgttgcatagggtgaccaggtcgttcacgtcgagcggcacgtacttcctatagaattcgatcggagtgatgccgaattcgcgaatctgcctgcgctcgtccttgccggatttcggtttgtcagccttcttgtcgggacctatcccgtcggaaccggcgtccttcttgtcgtcgtcactggtgcgcaccagaaaatcgaatgtctccggcggctcgcccaacgcaatcgcgcacatgcggtatacggtcgatatgtcctcgtttttcagcgtacgaagctcgtcgatcggcgtaccggccgcatgcctatcacgcagatcggccgcgaactcacgtagcttggagttgagatactgtttgaaggcatcggaatccttggaattcgcggactccgggtatgcgctcttcggaacgagcccgtacttgttcaccaaggcggcgaacatttgccaccagccgccatcatcggccggaccatcgttgatctcctgaaagatacggctatcggtcggctcatcgagtgtggcgagcacgttttccagatatgtgttggatttctccatcgcatcccagaagaacaggtatgtttccgagaattcgaagtcgtcgaggttccacgtatgcatgagctcgtagcgcagcgtgttgagcgaggcgaacatccagcaacggccggaacgacgctggttggtgattgacccctgtttcagctcgatggaaaagtcacgcggcagcgagcgctgtcccttgtagtcggtggccgcttcgagtacgccggcggagacggccgcattggcggccacgaggttggcccgatcggagttgaagtcttcggcgtaccgtttgagcagttgtctgtcgattgccttttcgttggtgtcattggattcgatcatgccgttgattgtcgtcgtatgccccgacttgcggcgggcggcggccacatgaatgtgaccttcgcacctgtagtcgtcggaggagctcaggattctccgctggtaggcagtcgcggaacgtgccacggaatttcaggtcatgccagactgcggggtctgcggtcatcgattttcgctttcgattcgttcgatggcgcattccagatcgcgcaatctgcagcgtagctctgattccacgtcgacgccattgcgctgggcgtcacgcagtatcgcgatgatccgatcggcgtactggtggtcgtggccggtatcggacggctgcgactcgacggtgtatgcctgttcgagttgggtccggttcgctgatttggcgacgcgtgaaacgactttggcggctcttggcagtgcgccttgggcgtgtgagataccttcgagcaccgacttgcgttgcttctccttctgtttcatcctctcccataattgcagcgtctcttcagcggacttcggagcatccgattccgttgcaaccgcatcatcgggcatgaatacgtgcggatggcgggtgatgagcttgtcgaccaagcggtcgcatacctcatcgatgccgaatggatcggtctcgtcatgcgcgcacacctgtgcctggaacacggattgcaggagcatatcgcccagttcctcgcgcatgttctcgcggtcgtcggtttcgaccgcgtcgatgtactcataggtttcctcgagcagaggtttgagcagggatcggttcgtctgcgaaccgtcccacgggcagccgcccggctcgtgcagtattcgcaccacggccttgacacgatccaaggcggagaccgcttcgattaccggattcagctttgagcaatactcgaatccttcgggaagttcgtacgcgtcacatgcagcttgagtcataacgccgattcttgccgcacgtcccgaccgaatcatcactgccgccgctttcatgccgatgcgtgccttcatgcggaatcagtctacgatgacttcagggaccatgagatgagaaagaggaacccgtgcgttaccacaatgcagtaatacgtcgtctgattgccgtgagcatggcttgcctgctgtcgatcggcttcgccgcaggctatcatgccgactactccatggccgcagaggctaccgatgataccggcgccggcgagctcgccaccgatgtacttgacacacttaccgtcaagggtcgtgcgccgaagaccgggtacaagcgggcacagttcggtgaagcctggaaggatgtcgaccataacggatgcgatacacgcaatgacattcttaaccgtgatttgacgaacgtaaagcataaatcgcatacgcaggattgcgtggtcaaatccggcaagctgcaggacccgtataccggtaaggaaatcaagtttaagaaaggcgcgaaaacctctaccgccgtgcaaatcgaccatgtggtttccttaagcgacgcctggcagaagggcgcacagaagcttagtaagagcaagcgaaccgaactcgccaacgacccgtataatctgctaactgtagacggatccgccaatcagaaaaaatccgatggtgatgcggctacgtggctgccctccaacacaagcttccgctgcgagtacgtggcacgccagatcggcgtgaagcataagtattcattgtgggtcactcaggcggagaaggaagcgatgaataaggtgctgggctcctgtccgacgcaggccgttcccgactataccggtacgaacgccggtgaacagcctcagaccgcaaccgccgaaccgactcaggaaccttcctccgagcctactcaaaccgagcagccctccaccgagcagacggagcagtctcagacgcaaaccgaacaacccgctccggctcctcaagtacagcaaaacgacagttccaatgtctactaccagaattgctccgccgcgcgtgccgccggggcggcaccgatctatcaaggtcagccgggctatctttccgcattggaccgtgaccatgatggggttgcctgcgaatagcgaacaaccgattcactcgtaagtgatgccggacggaagttggactccgtccggcatcacttgttatcgcctgtcatctgctgttggggattcgcgcagtttcgcgatatcgtcacgcagtcggtcgacggcgtcggtcagttcggcgacgttgctgctcagccgcgtggtttccgattccgtctcattggcacgcttatcggcttcatcgctcacccggtcgacaatccatgacgcgagcgttgcggtgataacgctgatcagggcgatgccggcgatcataagacccacggcgatgcacttgccttgccatgtcaccggagacatgtcgccatagccgaccgtcgtggtggtgacgaacgcccaccatatggccttgccgaaatcggtgatggtagtgcccggagcattacgttccacatccaattccgcaagcgaaccgacgtagatcagcaatatcacgctggaacatacgtagagtgtgatgcgaccacgtaccgccatgccgctggtgcgattgagcacattcaacacagccaccagtcgcagcagtctcaacggtctgaaaatcggcagcatgatcgagatgagcaacagcaggttgttcttgaaccaggtcttcctatcgtgcgccagcgaaatcgaaacgacgtagtcgacgatgaacacgatccagatgacgttgatcgtggtttcgcacagggagacatgcgtccgtgccagcacctcccatgaatacgcgagcaggaacaccaatgccagtacggtcagcggccattcggtcattcgttgccatttgttcaacgtcacagctcccgcctttcctccctaatgccatcatacgggcattctttcggcgtcgagcccggcctgagccttacgcatggctggcatcattcatcgacgagggcgatcttccggctttcggcctttcggccacgcaactcaggcagaagaatcacagccaatacgacggcaaggaccgcagtgagcaggtcggcgaaggcctgcgcggcaatgaccccatgatatccggcgagtccgctgcctgcgaacaaggtgatggcgagcatcacgccctgacggctgacggacagtagcagtgcgcccagggccttgcccgcggattggaacgtacaggtggtcacgagcaccaccgacacgcatacggtgctcagcagctgcacacgtagcatgccggtgccgagatcgacgatgccggtgtcggtgctgaagaatcccatcaacgggcgagcgcaggcgatcagcaccgcggtcatgaccaatgcgagcatgccgaggaacgagtatgcgaatttcagcaatgccttcaaccgactcatgtttccggcaccatagttatagccgatgagcggctggccgccgaaggcgaacgccacgagaatcatcacggcgatcatcacgatcttcaatgcgatgcccatggccgccaccgcatcgttgccgtatggcagcaggaagaggttgaccatgacaatgccaaggctttgcatgagattggtaacggatgccggaatgccgatggcgaagatgccgcttgcctcctgcctgctgatatcgagatgtccgcttcgtaacatgagccgtggatcgatggataggttgcggctgcgtttgagcaggaaccacacgaagtagaggtcggtgcagatgttggcgatgacggtcgcgcctgcggaaccggccgcgccccagccgaacacgtggatgaacagcgggttcaggcagatgttgatggcggttccggcgaccgaaccgaccgcggaggggcctgcgaagccttcggtgcgcagtagattgcttggcgtcatcgacacgatgatgaacggcgatccgagaatgatcagcgaatagaactgcgaggcataccgccatgtggaatcgtcggccccaagcatcgtgaggatcggatcgtggaacgtcaggcccaatatgatgacgatgatgccagtgagcacggctccccaaaagcagaacacgctcagtcgccggccgtcatcgaaacgacctttgccgtagaggcgcgagatcacggagcttccgccgagtccgaagatgtcgccaagcgcaatcatcacggtgaataccggtgtcgcgatggacacgccggccaccatgtcggtgttgccggtgtgcgcgatgaagtaggtgtccacggtgttgtagacgagggtgaccatcatgctcagcacgacgggtatggccagggtcatgtatgcgcgcggaatcggcgccttctcaaacagttcgttatccatatcaggtgtagagggtacaaccctaagcgggacattcatcaatcgacgagacgaaatcgtccacggagcgagtcagggacacatcagggaatttcccaatccgcggcgacatgggttcatcaggattgtccgtatggatcttttgggtaatattctatggctgatttccagcggcgaatcctcagcctttcaaaggcatgcgattgtcgagcgactgaccgttggcgtagcagcgcacgttgcccaatgcgatggcgatgatgcgccgttccgtcacttccagatggttgccgcccgccacatgcggggtgatgagacagcgcggttcatgccacaatggcgagtcggccggcaacggttcaggttcggtcacgtcgaggccggcaccccgtagctcgttgcccgtgagcgccgctgcaagggcttcggaatcgatggcatcgcctcggcccgcgttcagtaccagcgcttcgggtttgagcagtgccagtcgatcggcattcagcagatggtgcgtggccggtgtggacggcacgctcatggcgacgacgtcagcgtatggcaatgcctgttcaagtgattcgaagcctatcgtgtggtcgatgccttccgcttcgacggatgggttacgtcgtacgccgatggtttccatgccgacgctcttgcacagtctggcgaagtgcgagccgatgtcgccggtgccgatcaccaatgcggtcatgcccgatgggcttaatgcacggcccgcgtcagtccagtctgcgttggcttgattgccggcatagacgtgtaggttcttcatgagcgcccacatcatggcgaacatgtgctcggatacgctctgcccgtatgcgccggaagcgttggtgagcatggatccgggttgcagtacgtcgggccgctggtatttgtcgacgccggcgctccaggtttgcagccattcgagtctggggcattgcgagcattcctccggcggtacgtttccgatgatcgcagtcaccgatgcacggaattccttcgggatgcgggcgctccagttcatgctcccccgctgcgtcgagtcgcctacgaattcctgcggcactcccctggccgcacgcgtgaattgcgccttctccgactccgtcaacggcagacagttgacgatgagcttgtgattgttctcaattcccatggtcctaaccctagagtgagcaccagataaccgtctcaaatgcagtctcatttttcggtcttgtgcagctctctgacgactgtggttcgcagccagagaaattgtctcgatcccatcattcgggacatctagcatgggttgcatggcgcagtcgcatgttcttcagatcaaacgcatatatgattccgcgcagccgaccgacggttaccgtgttctggtggatcgggtgtggccgcgcggcgtttccaaggagcgtgcggatcttgaccgttgggctaaaacggaggtgacgcccaccacggacctgcgcaagtggttcgcccatgaccccgctaaattcgacgagttcaaggcacggtacatcgagcagcttgacaggcgcgatgaggccgccgaattcgtgtcggacgtgcgcgaccatctgcgaacaggaaacgtcaccctgctctatgccgccaaggatcccgcttgcaaccacgccgtcatcctacgtgactggatcgccgagcatctgtgacccaccgttgccggtgaacggtgtcagactcccagttcgtccgtatcgaagatgatggtcacgggaccgtcgttagtcaagttcacgcgcatgtgggctccgaaacggccttctttcaccgcaaggccttcggcccgcagtgtttcgttgaactgccgccacaccttgtcggcatggtccggcgaccctgccttcacgaagcttgggcgattgcctttgcgcacgtccgcatacaacgtgaattgcgaaatggaaaggatcgagccgttcacatcgtgaatggaacggttcattttgccgttgtcgtcttcgaacacacgcagattcgagatcttgtgcgccagccacgcgatctgcttggcgccgtccgaatcctctacgccgacaagcagcacatatccgacgccgatccgctgtggttcgaaagtgggatcccgttcgccggtgagttcatcaatcacatccacggacccgtcgctgactttctgaagcacaatacgcatgcctctttcacacctcattcctcgtcgtggtaacggatgcaccgctcattgttcggttttgcccagtggcatcgtattattccatcctgtcaccccatccgtacagcacataccggaatggaggttttgaaccggaacgtcgttatccccggcctccggcattggcggttattgaatttcaacccgttcttttcttcgatggataccggctttcatagtccctcctcaccatgctgcatgcatcgctgaatcacccctatgacgtattcaatagaatcggcgcaatcatgcctgagccactccgagacgatcgccatcaacccttgaatataaaacgccatgatgtagcgtctgtcctggttcggcacatggtaacggtcaaggatcggcgtgaacacatggaagaacatccgatcatagtttttatccaaccccagcgccgccgcgttgttcatggccgcgcggaacagtctctcgtttttcttgatatagctcaggtacggcgtcagatattccggcgtgacgagatacagctcgtccaccggacaggtgcgcagtttcgtggcaaaggcttccacatccctgttcatatgaatgaggaaatggtcgttcatatatccgacgctctccgacagcagatccgtcatcgactcataatgcagatagaacgtggaacggttgacgccagccacctcacagacctccttgaccgtgatataggcgaggtccttccgttcgagaagcttcagaagcgcctcgtccatcctgtcggccgttgcgaaatacttgctttccgatttgttcaaatacgttccgtcttctttcttgggatcctgccatgcagcagccttcgaaaaatcgcccttgcccgtttcatgtattacttctcgcttatttctttcgccagttccatgatttcaaaggcatatttctgcttaccttgtgccagcagcttcttgtagatgggataattgacgcccatccccaacagtccgatgatgccgacgattacgccgaggacgaaggcaacggttgtgccgccgccgatgacattcatggaaaggcacattcccacaccggccaccaatgcggatattatgccaaatgtgtaggtgaaaaccgtggctgggagcttcgccctgttgtccagcttgcggagtgcgaccaccttggacgtgtccttcggcgcgtattcgttggcgagttgttccgcgtaaatcttatcggtgtccatggctttccgtctctttcgtttgatggtcttaatgtgacggtttcatgatatccgtgaagatcagcgagccgaacgacaccgacagtgctttgtgttgatttcagaaatgtagccggcacaggccacggccggatgacggtgcgggcatggggatccgccccttgaagattcgggaacgttccgtatgctccgcaccgtcattatgcggcgattcagttggtgccgatgctcatggtctccggcagtgtgctaccgccgtcgatgaccacttgtgcgccggtgatgtagctggcctcgtcggagcctaggaaggcgaacagttcgcccacttcggtcggcttggccagtcgtttcatcggcacgccgaccgcaatgtcgttgatggcggattccggattgtccggattggattcgaccgccatcttctccaccatcggggtgcgcgcatagcccaactgcgagcagttgacgcggatgttgcggtcggcgtattccactgccaggcatttggtcagccccacgagtgcggccttggtcatggcgtaggccgcttcaccggcatcggccacgatgtcgcccgtcacggaagaggcgatcacgatcgcgccaccaccgttctccaacatgtacggcactaccgcctggcaggtgttccatacgcctttgatgttcacgtcgatgtggaaatcacgcatctcgtcaggcatctgctcgaatggcgcaagccgacatacgccggcattgcagcaggcgatgtcgatcggaccgaaagcgtccaccgttgttctggcggccgcaatcatctgatccttatcggccacattggccatgacggtcacgatgtcggcatccggatacatctcacggatcttgtccgcagtcctgtcgacatcggccgacaggtcgaccatgcagatcttcgcaccgtacttggcatacacttgcgcgattccctcgcccaagcctgccgcggctccggtgatgatggcgactttgccttcgagtttcggttgaaccatgattgctcctttgtttgcttggttcggtttcacgacggattgttcttcagttgccttttggccgttacggccgtgatgcgcagagccggttcagaactcgacctcgccgtccaacgtttcgatgacgaccttggaattcctccaccggaccagcaccatccacagccagatggccacgccgatgccaagatatacggcgaaggaaatccatgatcctacgccctgtccgagtgtgcagaagaacgcgatgcacaccatgatcaccatggcgagcacacggaacaggtcaccgcctggcaccacgttcctgttgttcgcataccattcgggatgcctatggtgaatacgcacggccgagatcatcgtcagagcataggcgcaggcgcagccgaacgacatgaggttgaagaagtcgttcatgaagctgcccgcattctgcaggagaatgaaggtcaggctgatggccagcaggaagatgtttggcagaatcggctgctgatgcttgttgaccttggtgaacacttccggcagaaagtttttcttgcccatcgaatagagcatgcgtacggtggacatccagaatcccagaatcgaagcggtcatccccagcaggatggaaatgcagccgtacacgatcggccagaatttccatcccagcagattctgcatggcggtgatggtcatgaaaccgttcgcggcatcgccggcaagcagatccttgaccggtgcgagaccggccacgcagaagaagaagatcgtgtagatcgcaccgcaggtgagcacggatccgcagatggccttcttcgtgttattgatggggaagtcaccctcttccaccatctggggcacggtttcgaaaccgaaatagggcgtgatgagcaatgccatgccgatgatccacgccggaatgccaagcgtcgaagccttcgaactgaacgagaacatgtccgccaaattggcgatgctccaatgaccggaagtcaggatcagcgctgcggtgataagcgtggtggcaatattggcgaacaggcagaacgcctgtgctttgaccaggaactgcacgtcctgcagactcatgatgaagatgagcaacaggaacacgacgccgatgatcacggtggtctggaaattcagattcaggttgaagagtttgctgatgaacgtcgccacggccatgaccacggccggcggcacggaaatccaagccgccatgataagccaggatgccagaaagccgacatgcttgttaaagccgaccgtattgtagatgagctcgccgcccgccgttttgaacaacggtgagatttcactgtagacgagtgccgtcggaagaatcgcaaccgtcatcagcgcgaaggcgaggaacgttcccgccccgcaatagctgaaaaatacggaatcccaatagcttacgtaggtgaaaatcgagccggtcgccaccgtgtagacgaagatgagtttcagacttttctgcaggccgttgccttctgcggatggaggtctctccttttgtttcatgcgattgtccgccatactttctcctttgaaaatatcagccgaaaaatatccggtgaagacggaaccatgcggcatcattgccggttatcgtccatcatcacttaagtaatgttagggctctttatgcatcgggtccagtcgccgacgggccggccagcccgtcggcccggctagcccgtcgaagcaaggaaccgacgagccgaagcgtcaaccggttccatcggcgggcagacggtgctcttactcgtatctgatgacgagccggcccttcacatcgcccgcttcgagccgttcgatagcctgcggaacctcgtcgaagctgatgcaggtggtgacgggcgacagttttccggtacgcatcagctcgtaaacgccgcgaatatcgtcgggagtgcctccgttcgagccacgcagatcacactgattgacgataagcgactttgaatcgatggtggtctccagcttgcccatgccgacgagcacgaccacgccacccagtccgatgacgtccaccgcgtccgccgtagtggtgccaaagcccgcgaaatcgatgatgacatcgaactttacgtcgttgaagtccttgatggatctacgtacgtccaccgcgccgagttccttggcaagcggccagatgtcctccttgatttcagccacatacacttccgcaccaagcagatgcgccaccctcgcgccaatttggccaagcccgccaagtccgatgatgccgaccttgtctcccgccttgacgccacctcggcggaccaccgccgcataggatgtcatgcccgcatcggttgcggcggcgccgttcacaaaatcgacttcatccgggatgcgcaccaatgcttcggtccctatgacgattttcggcccgaaaccgccatcaaacgatgagccagggcatcctgccgacgtggtcgggcagattgctacacggtcaccgaccttgaagtcggtgacaccgtcgccgaccgcgctgatgacaccggcatcctcatggccaagcgtcaccggcacctggccgagcatggtcatccaaccgggatcagtcagaatgccgacatcggtatggcaaatgccagccgccttcacatcgatgacgaccttgcccggcccggcactcggttccggcagttcttccaatctcaatggttcgttcgttccagtgaatctccaagacttcatattcgctcctttgcattgccgacgctatcgtgcgtccgtgcattcacgaaccgccccattgcgattcaggttctacgctactcgccaaccctcggaaaaccaaagagaacacagtcatgtcactcccctggctcatgtcagcgactcagccatcccgctgcaaaatgcgcgtaagcgcctcgcgcctgaaaatccgttgatgcgtaggaccacgtggcgctgcggctcgggagcgccctgctgctttcccactgccacttgaatcatggggaacagatccggcacgtattgcgcctcgtcgacaatgagacgttccgaacgattccggatgaatcctattccgtgccgaaacacggccttgcgtgcgtcttcttgtagcggcctctaatagccatgcgcgtgcaggtaggcgtcgtcgaagccgaagtagtggccgatctcgtgcagcacggtcttgcggatctgctcgaccatttgcgcacgggtggcgcatacccgctcgtgcgggcccttgaaaatagtgatcacgtccggcatcacaccgctgtaggccgtggttcgccgcgtgatggcgattccttcgtacagtcccagcagttcgccgcccgcgtcgcacatcgtgcccaactcccgctcgttcggctcctgcgccatggcgatccccacattctccagcacctgcttgaacctgtcaggaatacccgcgagcgcgtcttcgatggcccgctcgaactcgtcgtcgctcatcttcatgtcgccgactttagcagctgtcttacaggcttgcacctctctttgcgtccgattttctccagtcactggaggaatcccctccccgacgagagcgcgacagcagggcagcaccatgaatccccatcgtccggcccgccccgcaacccgcaatcccgcgaccacaattcgctgatcacagtccgtgtaaagcactgccgacaacctatactggaacaatgagaatttccgtgcaacgcgtgaatgaagcgagcatcgccgttttgaacgacctcggtacgctcgatccgacgttcgacgtgcagcaaatcggtcttggcctactgttgaccgtcgaaatcgaacccgacgatgacgaacccacgattggcatgatggcgaaccgcgtcctcacactgcgttgcttcgacggaccgcaaggttcgcttcctcaatccgtgcaggaaatccgaggagagatcctatccattccacaaccgctcacctctttgcacagccccgccacgggacgtccccaactcgttgccgaagataccgacgacgagcatgccaatctcacatggatccgcttcaacgaagctctccgctcgggcaacgttcccgtatatgaaggccgatatggcgctcgcatgcgcattggctccatcgtcgacggtccatttcagttcacgctcatttccgattagccgatggaccgccatcgcaccacatgaaaggattcgcatgactcacatcagcccggccaccgaacaggcactgcgtaagctgccgaaggcggagcttcatctgcatatcgaaggcaccctcgagccggaactggccctgaaactggccgaacgtaacaacatcagcctgctgttcgctgatcttgccgatctcaaggcacactatgagtttgagaatcttcagtcgtttctggacctgtactaccaactcatgtccgtgctgcgcaccaggcaggatttcaccgacctcatgctcgcctatctggcacgggcgaatgccgatggcgttcggcgggcggagattttcttcgatcctcaggtacacatgaataacggtctcgattttgatgtggtgctcgatggcctgcttgagggtcttcgcatcggtcatgaacgtttcggcatcgatggcgggctcatcatgtgcatcatccgggatatgcccgtcgattcagccgaggcgttgcttgataccgcggcttcacgggccggggacctgctcggtatcggtttggattccgccgaagtcggatatccgccggaactgttcagtcatgtatatgagcgtgcggcgcgacttggcctgcatctcgtcgcgcacgccggcgaggagggcccggccgattatgtccgtcaggcgttggactccctgcatgtcgaacgcatcgatcatggcgtccgcaccgccaccgatggcgatttggtggcacgaattgcccgtgatggaatcgcgttgacggtgtgcccgttgtcaaaccatcgtctgcaggtggtgcgggacgtggccgatcttccggtacgccaactgttcgacgctggtgtgaaggtgacgctcaattccgatgatcccgcctacttcggcggatatatcggcgacaattacatcgccatggcacggaccggcatgagcttggatgagttggccaccatcgcggaatactctctgaagtcctcattcgcaacccctgagcagaaaaccacttacgccaacgctctggccgactggaagcgcatccatctttagctcttgagccgaagtccagaagaccatcatctggcttcgcacgcacaaaggccggactcgcgcacatgtcggccgacggtttcgatgatcatgaaaaggcaagtcagcaacgtacagttgcacatgccacggaaaaggaattcatgcctttcccgtggcatatcaagacattaccgatatgtacgactgcataaacatcgttcttgcatagcataagcatgcatgtcaatccgccaaacacgacagattaacaatcccataccgcacagttatggtgcaccgagaatcatcaaaaccattcgatttcattattagcacctgtcaccgcatttttatttggccagccacggcatcctcacacctctagatattcacttaaatcgttcaattttcttaaaccataatggccatttcttcctgacggacttcattattccgtcattatcaggtaatcggcctgatatcacagtcctttacattacatatagaaggccttccaatgacagatgtcatttcaatttccagcactcaaatttgcgaatgacccatcatcgtcaggttgaagagaggaagtggctatgagcaggaaaacttcgaataagacgctcatcgcagcgctgacatgtcttacgctcattacgacaccgacattagccggatgcaacggcacatcatcatcgacaagtagcgccgattcatcgtcgacgagaaccgattttatgctcggcggcctgttccccgagacaggatccctaagctatgtcgctccaggtcagatggcagcattcaagcttgctgtcaaagacatcaatgatgctggcggcgtacttggaaacaagattgatagctatatcgccgatgtcaatgacgcagatcacgccgatcagaatacctcagcagtacaatccgtgctggcaaagaacccgagcgtcatcgtcggaaatccatcgagcggcgtagtcaagaatacataccatgagatcgagggggccaaggttacgctgatttcaaacggtgcgactgcgtcctcgctgtcgggtatcagcgattattttttccgcaccgtaccgccagatacggtgcagggcgcagtcttggccgatacaatcgtgcaggatggcgtacagaacctcgccatcgcctgttttaacgacgaggccggcatcggtatccgtgacatcgttgtcaagaaggtcgaggctgcaggtgtcaatgtggtttacggtggtaaagacacgtttgaccccaccgaaaagaactttggatcattggctgcgagcattaaagccactgacgcagatgcagtactagtcatcgcgttcgatcagactgtcccattggtcaaaagcatggccggagtcggcatcgataccagcaagttgtatttctttgacggcaacatgtctgattattcaagcaaattcgagactggattacttaacggcgacaagggtaccatccccggagcggttgctgccgatgatttccgtgaacggctcaagaccattgatgattctctgaccacatatacattcagtgcggaaacatatgatgcagtcatccttgccgcgctggctgcacaggagggcgggagcgccgatagtgagaccattcgcaagactctacccgcagtatccggaacggacaacggcatcgaatgttccacatacaaggagtgcaaagctctaattaagaacggtaagagaatcgcctatcacggcatggccagtatcggcgcattcaacgacaagcatgatccgagttccgcatacatcggtgtctacacctatgacgaagacaatatgccacaattcgatcactcccaacagggaagcgtgtgatattctgcgagccgctaggctgtaagggtgtgaaggtatatcgccttcgcaccctttcaacgcttcgtcaaccgctcattaaaatttattcgatgacttcgggtccaagtttccggcgagcttccgcttgaattgccttgccgaccacgtcgatagtatgcatgttcttctgggagttcctcgtgaccatgaaaatccgtcttgtatggcccggaacaagaggcaacgtgattatggagtcatcgacgtctgctgcgattgccagcgtaggcaatgcacagatcatcatatttagcttaaccgcttttttcatcgcggagtatgaggtgaatacgcctccggtcttcggcatgaatcctgctgctttgcataaactcgtcatataacttggaagataggcgtccgcctgttccatggcccaaaccgaatcggcaagatcttctatactgaccgattcatgtcgcgccagaggattatcccgacttaccagaatctgcatccggtctgacccaatcggagtgacagctcgttcgaaacgttgaaggtttcctcctcggccaagatacgctacgattgcgatgtcaatctgacgggagtcaagcaacggaaggcttaggttaggttccaactccgacactttcgattcaagctgcgggtacttaccgctcagtttctgcaaagccggtaaaacgaatgaggacatcgcgctggagaaggatgcgacatggaccgttcctatcactttgtcatcggattcgcccaatgaattgccaatcagttccagctgtccgagcacaggccgaaccttcctgcaaagttcccttcccgcgacggtgagacggacctgtcttccaatccgttcgaacaaggtgaccccggtttcctgttcaagaagattcaactgctgggacaccgtcgacttgcttacatgcatcacatcggcgacttgttgcatagtaccaagcacctcgaactggacaagcagctgcaatctccaaatattcagcatgtaaaactcctatcaagatggctctcctttgccgtttcgtcactgttaaggatcgccaaacctaatgtacgggaacactgtacgttggaaactgtttcgttaaatcgcaacaaacatactggacttgtaatcaattggacacatgcggaatatgtctcaaggcaacaaggagaaacatcatgatcgcctcaccattcgaaaagcgccccaatccatgggaagatgttgaacgccacgtcggacgttacggagcaccatatttcatccccgaaatcatcgaccacgcggaaggtagctatgtctacacagagagcggccgcaagattcttgatttcacctcaggtcagatgagttcgactctggggcacaacaatcccgatgtggtcaagacaatccgtgaaaccatcggacgtctcgaccatttgtacagcggcatgctgtctcgccctagtatcaacttatgtaccagaattgccatgaccgccccagagccgttaagcaaggtcatcccgctgtccaccggctccgaggtcaatgaggccgccattcgtatggccaaaacagtaaccggcaagttcgaaatcgtgtcgttctctcgctcctggcatggtctgactgaggcaagcgcaggagccacatactcatccgctcgtaaacttggcgtacctggcgcgcccggacaattggcaatccccactccatacgaatatcgtcccgactttatcgacgaagatggcaaactggactggcgcaggcagcttgattatggttttgacatggtcgacgcacagtcggttggtagtcttgccgcctgtatcgtcgaaccgattatctccggcggtggtgtgctcgttccgccgcccggatattttgccgcattaaaggagaagtgcaatgaacgcaacatgctgctgatcttcgatgaagcgcaaacaagtttcggcagaaccggccactggtacggatgccagcatgacggggttgtacccgacatcctgactttgtccaaaaccctcggcggtggattgccacttgcggcattgattactaccgacgaaatcgagcagaaggcccgcgacaatggattcacattctatacctcccatgtcaacgaccctttggtcgcggccgtcggctgtgaagtgatgaatgtcatcgaacgcgataatctcatgctggccgctgttgacaaaggcgaatacctgcacaaaggactttggaaacttgtggaggagcatgaagtcgtcggcgacgcacgtggccgtggtctactgcaaggcattgaaatcatcaaaaacaagcaaagcaaggaacgctctgagaagataggggatctgattacaaaacgctgctttgatcttggactacatatgaacatcgtctgtttgcccggcatgggaggcgtattccgtatcgctcctccgctcacagttagctacgaagaactcgatatgggcctgtcgatacttgacgaggccatcggtgacgtggagaaggacctcggctatggagcataggaagtcctccatcatccatatggccgcaggcactctggcctccatcttacttctgccttgcctagtcagattggtcaggcataggaaagaatggtcagagacgcttcgagacgagatccgtatggtgcgcgactatgacccttcaatcacgtcagatgctcaagtcgtactcacgtattcaggccttcacgcggtatggttgcatcgttgggcgaaccagctgtggatacacaaacaccagcttgcagcccaattcgtatgccagtttgcacgtgtgctgaccggtatcgagatacatccagcggccgaaatcggtaagcgtctgctcattgaccacggcaccggggtcgtaatcggtgaaaccgccgtcataggcgatgacgtggtaatttatcaaggagtgacgctcggtggcgtgaagaaccagcctggttggcgtcatccgcatatcggcaacaatgtactgttcggcgcaggagctgcggccctaggggccatcaccatcgaagatggcgtaaaggttggcgcccattccgtagtgctatccgacgttccagctggacataccgttgttggggctccagcgaagatcgtccgctaggagtatatgtgaaagtttgatagcaggtgtggcgcaggacacccgttctgcgccacacctttttctttacccggatacagtggtacctaccgttccgttatcgaaacaacaatactgaaataaactgcatatcgtaaaggtatatttccaaggagcgattatgccattttccgtgacgcatcaggacatcaccggcatgcatgtggatgccattgtcaacgcggcgaatacggacctcatgatgggtggaggggtatgcggcgcgattttccgcgcggcgggagcgaaccgcatgcagaccgcatgcaatcgcctctcccccatccgtaccggtgaggcggtgatcacgccgggattcgatctgccggccaagtacgtcatccacacagccggaccggtttggcatggcggcgaccatgatgaggagcagctgttgcgcgcctgctaccgcaattgcctagcgatcgcctccgtgcacggctgcaaaagcatcgcgttcccgctgatttccgccggcatctatggctatccgaaaaccgaggcccaggatgtggccgaagatgagattcagatctggctgggcgacaccggcatggacctggacgtccggctcgttctgtggccgtagtcttacaacgaccgtaacccaccaggctgaacgtatgtgcgtcacatttgaccaatactccagtcggattcgcctcacttaacagaagccacgagtcacgacggaaagattcaggccgaaacccccagcagaaaatccaggcaccgccgcctataatcggcggcctcatcgtatacgccgtgaccatggctgccatcgtaaatgtagctttcgcagccaagcgcctcggcgatctgcttcgacccttccgcagtcacgacacggtctccctccgcaccgatcaccaagaccgggcactggatggaggaaagctctccgtagcagtcgaaggttttgcaggcttcggccagaataatgaagcgccgatattcctcatcgctgatacccagattggaggagatcaacgtttcccgataggccttcagggtggactcggaatacacgttgtccgcgaaactctcgagaagccccagctcatccttcgccctggccagccgtatccattcgtcgatgacatgattgaacgtgccgttgggttttgccagcgtcgagcctagaatcagcctgttcaccatttgcgggtgatcgatggcgagatacatggcgatcatgccgccttgggatgcgccgaacacgtcggcgttcttaatattcagctcccgcatcgccgccgcggtgtcttccgccatgtttccgaccgtgtaaccctcgtgtatgttctcggccctgtcgaaaacatacacggtgtattcctcgcagaaatccttgtacgcctccgcaatcgcgtcggccaagcccatcacgctgtgcaccgacagtcctggcagtatcacgaagttcttggttccgctgccgaatacgatgtgcttcatcttccgcacctcctgatgggactgttccatattagccacacggccatacgcgttattgaaagaagccgaccaaatgacacggtgagacaagatgaacagtgtcagaaacttgacaatggaaatcgcgacacagatactatttacgagtaaaacaccagcaagcaaaggatgaagcacactgctttatcctttgctatttacaagcataatcacatgattatgaactatttaccttttctatagaccctgcggtatctttttattcttgaaataatactctttatcacgctcatctacttcccgtaatatcttgcacggattaccaaccgccacaacgcaagacggcaaatcctttgtcactatgcttccggcaccgatcacaacgttatcaccaatcgtaataccggggagtataatcacccctgcaccaatccagcagttttttccgatgcgaacgggcgcattatactgataccctttcttccgcagctccggaagaatcggatgtcctgcggtagcaacggtgacattcgggccgaacattgtgtaatcccccacataaatgtgcgtatcatctacacaagtcaagttaaagttcgcataaatgtttttcccgaaatgcacatggcctccgccaaaattagaatgaaaaggcggttcaacgtaacagccttcaccgatttccgcaaacatctctttcattagagtctgcctctttttgaattcggctggccgggtctgattgaactcataaagacggtcaagacattttgtctgccattccataatctcgtgatcaccgggaagatacaattctcccgtgtgcattctttctttcatcgcactcatttgcatcctcctttataaacccatcaatatctttcgcaacctttcactacctccatagggaaagcaataggacccgaataaaaccactatcttcgaactccctatattttcggaaaggatcacagtgcgcttttccgtttcaccttcatatccgaacttctgctattccgtaatttctatagcattgccgttagcatcgtatatgctgctttcgtaatatccgtctccggtggtcctcggataacttttgactacgtagccgtctttttcgagcctggcggtcaatctatcgacctcatcttttgaaccgacctgaaaagcaatatgcgcatatccgagttgcgggtcaccattcggccccgaaataaccggtatattcatgagctccagtcttgtcgagtcatcaaaagacaggaagtaagatgaaaaaccagtattcggatttacataaagctcgtttcgccttccttgaaaataggtctcaaagaagcgagcgctttcttccaagtcttttacatagatcgctacatgtcctatattcatttcgtcataccttcctagacagaaacaatttcattctatacaattagattgttaaatccgtttaatagctatcattattatgtttgattcaataacaatcctgcgaggttgccaattatgttgtctttagagatgagagacgatcgctccgaaaaggtgcgttatgactatacggactatcccatttacattcggagagctttgctttcctcttatcccggctatgccgcgcccacccattggcacgatgatattgaatttattgccgtcttatctggagaaatgcaatacaatgtcaacggtgaaatcgttactctggatgagaacgaaggaatattcgtaaatgcaagacaaatgcatttcggcttctcactagggaaaaaagagtgcgattttatttgcattcttattcatccacttatattatgtgcaacttatgcctatgaacgcgattttgtactaccagtcataaataacaagaatgcctcttatattaaattaaactctgacactccgtggcatagaacaatatttaaaaacattagaatgatgtattctacaaggaatgaaaaatccgctgtattaaaaatacagaatctatttttaaatacatggatacaactttacgaaaatatcccctctgaaagtcaacacaaaaatcaaaatgccgatctctccattctaagaaatatgataggctttatacaacaaaattacacaaacaaaattacccttgccgatatagccgcttcaggagcagtaggacagagtaaatgttgtaaactgttcgcaaaatacatcaagcaaacacccaatatatatttaacacgatatcgactcgataaaagtacagttcttcttagcaatacagatagaactgtaacggagatcgctacagccgtcgggtttaacgggagcagctattatgcagaggcatttcgcaaatggtacgggaaaagtcccaccgagtacagagccacctcaaacatacaacgaccgcgttcgaggtagttcagggctatcgccttacctatacgggactaacccaacagaaagtccatgcgccgctacccgcatcgaatgaaagaaacaataaacctcgtgaatcgtaaccctagtaaatgaagcaaccctcaacgcaactttcggcgggcacacatcatcattcccatcggcagcgaccgcgtagccgaatcccgaacccttgattcaatgcatggttacgattctgatgccttccctttggcggttccctgtatctccattcggctgatatacgccgtacgatagacttcattgcacgctatccgtaagccctgtgcataaacacaaattattccccaatggctttcttgagcacagcctgtagttcgggatcgaccgcgaacaaatacagtccgtgcacgccacgcttaagcaacacattaagctcattgcgcagattcttttgagaataatcctctttctcacgcaggttggttgcgttggcgttgcaactcttggacttgtcgaagacgatctgaccgtcccggtatgcgacagatggaccgataatcacgccaacatagttcaaatcaaaaccctgtatggaaaatgtggagccgacttcattaatagtatgcgaagcttcagcccatacttgatcggatgaaaggctcttttcctttccttgcggcttgatttgatagttccatggatggcagaagtaattagggtcatcatccgaggtcttttcattgtatccgcgattggcctttaatccaggacccatgtgccattgcccttcggcatcgcaaaacatctcgacattccacagaccatccggactgtccggattctcacgaacgccggtgtaagaccaatcatacgtagcgaccaccctagatagaccatgcccatcaactccacccgccttaagcttggctttctccttgattgccttgaataactcaaccggggaatcgaataccttgactatatagggctcgcgaatgtacttgccggttttcggatccttctcaccgaggtctttcttccacttacctatacaaaccccgcctgcgaaatcgtctacccattggatggtcgattcatccgccgcaatccgaaactgttgacttagccgaatatggctaagcaaatactcccctccccacctatcaagtcgttcgaaaggctccatctcagcatcacgtgacgaccaggtcttatccaactcgtgatggggaaacaaggcctgtagatcttcatccttccactgctgcgcattctgcagaatctgattgggatcaaataccgcaactacgacccttgacctgcgcagcaaatcatggagcatgttctttccggaataaccctgatttccttgagtcagcagaagatgggcctcgtcaacaagaacaatgtccgccttgccctgcggtctgtccggaatgccacgaccgttcggcttcttttcactgaatttgttgatgaactggcttggcttgagcaccacttcatccgacttcttttgcaatccaagtttggttgcgatttggttatagacatgcacctgctgctcatggttgacgagaatatacgcctttcttcgatcgactacattgaacgaagaaccacggttctccatgagcagatcttcatcgtcctcatcatcaagatgcccattgacgccgagctccgtcgatatgcggtagaacaggtggctcagtaacactgtcttgccggtgcctgccgcgccctgcacaaaaatcaaacgcgatggagaggagtcggggaaatctgaaagcacatcggcaatcgcattcatgatcgcagtttccgcattcatctggtcatcactgagctgatggaatggcgaagctttgaataatgcggaatcacgaataatctgttccgacgggaataacgtggaatcctgttgatgcagacccaaccagatatcggagaaaatccgatcaaactcatcttgcgtatagtagtcgccttgggcattcgttctgcgattgttgagatttttcaccgcgtccgagccaagcagataatgcatcagcttattctctatatccaatgtcagagacttgttgaaatgctcattcccaataacatattgccacacggatcttggatcctgttccagtttcttctggaattccttccaatcatcgcgcgaatttggatctgaacgcaggtgttgaaaagtacggttttttatattattcgtttctccaacgtagaccgtgtactcgggaacattcctatactggctctgcttctccgaatggacgacgtataccgtaggatagttgaaaatgtagcgcaaagcacttttctccacaactgacgcatatgccccatcagtgggattaaccacgctttcccacgccgtctcctcattaccgatatcggcatatggcaaatgaacgataatcggttccggaagtctatctgctgtcatacagccattatcgccctctttcttgtcttccacggtattgcacccattaaactcgaaatcatgatttccaattcaaccatcaatctaatccgtgatttcgtctccgcccgtgactgggatcagttccacacgccgggcaatctcgccaaatcagtcagcattgaagcggccgagcttctggagtgctttcagtggagcgatgagccacgcaatgacgatttggaacatgttcatgaggagatcgctgatgtgctcatctacagcatcatgttgtccaacaaacttgggttcgaccttgatgaaatcatacttgacaaactcagcaaaaacgctcggaaatacccagtcgaaatctcacgaggcaacagcaaaaaagccagttgacgactgtaatactccatacagcatgcgtatgtttggcactatcttttttcccttctaggagggggcaggcgaatggctactctcccgtctggaaattcccattgccatgaaggaccagtttgggcttgctcgtcacgtttccatcagccgtttcccgtccgcctgaaacgaccgtcataaagctgccgaatgaaaatatcaagacgaacacgttccgggattttatgcgcatcaaccgcaatatatggttgcccatcaaacacgaagctgaacgcgtcgacttcctcgcctacggaaggcaggcaaaaacacgaataccgtgcgactcggccaagctaaccatgttgggaagagggttctccccataactccaatcgccgcgcaacgccaaagccgaagcttcaggaggcatctgcgccatttgctccatcgggagatcgctgttcggaagacggaaatggctttcaatccaatgaaatagcagtaaggcgctcctcccatgccctatggcggatttgcgttgccgtgcggttgatttacgcaacgagcggaaccaacctgctgtttcgcgtatgcaacgaatacgagtggaatcaagtagaaaacaagactcatcatcttgcggaaatggcgacggccacatctccgctctcgttacgctcatcattattttcagcctccgcggaaagctgattgaaatcaagcgtcatctgatcggtctgagcattgtgtctttgctattcaagagcagtcactggtccaaggcgtctaagtccaacctcctttgacgagaaccccgttgcgctgttgcccgaggtaaacgccaagatgagaccatcattacggtacgctcacggaaacatacgattatcaacatccctgttggacttccgctgtttggtatgggtgagacctagataactttctctttagctctccgtcttcactttccatattctcgaccatgtatctgaaatctctactcttttattctttctgaatacatagaaggcattggcaaaatacaaaaccgcgtatgccagcagaataacagcgtcagaaaaactggtgctttgcgacagaatggcgtctccactctgcgcttccgcaccaaggaaatagatggtgtctgtgattgcatgcaggaacatggtgatccagatatcgcctgttctcaggtagatagcggcgaacaggaagcctacacccgtcgcataaatgacttggaacaatgtggtgacgggattcgctccggataaaatattaaaaccatgccacagtccaaaaagaagactggtaaatacaacaaccggtataaccaatcgttcgcgttccttgcttctcatgacaagggaaatcggaatgactcggagcatgatctcttcgcagattccgggctgcattcccatcagtagtgccacgccgggatttccatagctttcatgttccagtatctctgaaatcaaattgaatgcacctattgctagcacactccacccgagaagaacaaactcgccaaatcttcttgcattgaagaaaccccgcaaatcttttctgaatatgagccaatacaacaacagaatgactatgtgggacaccatcgtaatcactgtggaaattagtcccatatttcccatatatgcgcgatccactgagccataaacaaccatggctgcgactccaccagcgatagcttcaatgaacgtttcgactattcctgccaatgccatggcagcagccgctacaaccaacgcatgcgcaacaggatgcgtttcagaccaattgcattgcatttctcttctcacaggtcacatctcgcctaaattattcttctgaccgcactcatttcggcattatttttgcctaaagtcatgttggcaattccattttcttctgccacatcacttaactcccgaaatacttttttgcatttacactgcttctattcgatatcacatgaaatgtatgaactgcacgcgtgcgaatatcttataccccctaatattatctttgaagctgatctttgcaccgttcaacacgcaaggaagtcttgaaatcctgatatgttccaggacttccctgattcagattcgtgtatgaacgacagtcgatcggtcaacggccgccctcacctgtagcatgacttcagatggccggctacgctggatgcagtaggataaataaggggttcctgggggaattttgccggaagcaacgtacgaggagcttcctgccacgaaaagaagaaatgagagcgaaacatgacacttgaaaccgacagactcattctgcgccgatgggaagaaaacgatgcggaggacctatatacatacgccagcgatcccgatgtgggaccgatcgccggatggcccgcacatcagtgtctagacgagagccgggacgtgatcaggaatgttcttaacggcaaagaggcttatgccgtctgtctgaaagaagacggcaaagccatcggcgcaatcgagctgaagctgaatggccataccgatatgaccgaccaggatgatgaatgcgagatgggctactggcttgggaaacccttctggggacggggcatcatgccggaagccgtgaaggaaatgctccgccatgccttcgaggactgcggcatgcgcaaagtgtggatcggctactacgaaggcaacatcaaatccaagcgcgtccaggaaaaatgcggattcaagtaccagtggaaaacgcaggatgtggatgttccgctgatgcacgaaaaaaggacaggcaatgtgagcctgatgacgagggaagattggctttcaggaaagtaaatcggtatggtgccctcgaactcatccgagggcaccatacgtttctgattaccggactcctatgcctcttcgcgggcgtcttcgacaagctggcgaatcaggttctcgtcacgttggcgaatgaccgccttcgtaaaggaagaacgtcttcggcttcccatccgcatccacgtggcgttcagcccgtctgagagcgatctgcaggcacgaaatcacgtatcgattcgtcccattcgcgtcaaggccttgttccggtacaccaaatcctcgcgaaccgtgaagccaagcctctcccggaaggcatttgcgaatggttcgtatggcccgcgaatcatcaggtcttcgtacgggtccggatgagtatgctgaagtcaagtccgccagagataccgcgagagaggcattatgggaacggttgcaagacaagtggtgtttggtgtgtgcatggtgttggctttcgcatgcgtctgctatgcatgggctgtattcaaaacgcattccggcaccaacttctggatggtctgggtcgtgttcgcggtgttgttcgaagcgctcgggggcggtttcctgttccactggtgggacgcgatgccccgtctgatccgtgacattctcgtggcactcatctgcatcgcggtggtggcgttcggaacggtcgaaggctgcatagtcagcaaaatgggtgcgcagggcaaacccggtctggattatgtgatcgtactcggtgcgcaagtgcatagagccaggccgagccgcgtactgaaattccgacttgacaaggcaatcgaatatctgaacgacaatccgaagaccatctgcattgtttccggcgggcagggatcgaacgagccgttcccggaagcccagggcatggccgactatctcaagacgaacggcattgccgaatcccgtatcgtggaggaatccaagtcgaagaccaccgaagagaacatcatcaacagcaaaaagctgattgccgacgaaaacgcttcagtgggcatcatcaccaacgacttccacgtattccgggcactgcagattgcacggaagaacggtcttgacgatgcgcaaggcattgccgccggttctccgccggacatgctcgtcaacaacatggtccgcgagttcttcgccgaaatcaaattcctgctgtagcacgctgaattaaggccttgctcagaggcgggtcagccggatgccggaaaaagcgtgacggcgcgtcatcagtagtcgatgccgttcaccatggcctgctccagccaatgttctgccacgatcggaatgccgtaatcgcgggccttgcgcgctttggtcgattcggaataggggtcggcggcgaccacgagcctcacctgtttggtgacggatggcctgacttcaagccccatgctctccaactcggcctcccagtcggatcgccgctgacgcatcgatccggtgagcacgattttgtcgcccacgtgcagacgaaaatccttcggcaacggtggattgaaaccggtcgcatcgtcggcaccgattgccgatgcgccgccgatcatgcattgcagattgttttcgacgtgactgcggcggggcagccattcccgtcgttcgaaggacgtgagttccggccagtgctcccctgcctcttcggcggcatccagtcggcgtcgccagccactccattccggatcggcgtccataagtctgccaagcaacaacgccgtggcatgcgcgtcactcaaggcactgtgcgcgtcctcgttgtcgatgccgaattcacggcaacaatcggcaagactgccgacaccgatcaaggatcgcgacagtttcatggtgcacagcatggtatgcgagttcacaggaatatcggcacccaaccgccgatattccgacaataggaatttcgagtcgaacgccacattatgtgccacgaatacacgccccgcaagcaggtcacgtagttcgcgcgcgatgccttcgaattccggcgcatgaatgagttcgacggcgctgatgtggtgaatccactgcgcgccaatgtcacggtgcacgcgaatcagcgtctcatgctcgtcttcaagcgtgccgtccggtgccacgtgcaccaggcctatttctatggccctatcgccgcgtgccggattcagtccggtggtttcgaagtcaacgaccgcatatcctttggaattcacgtacgtaagtataggaaaaaggctggaacccattcggattccagcctttcacaatgcttgattcagtgaatcagactcactcggcatccttgtcgacggcgagttcgtcggccacggcggcggcagcggaagcggcctcgacgctttcggcctcttcgtcctcagctgcttcgccgaggaaggcgctcaggtcgagggtttcaccgtcggacttgaaggtcacggcgcgcatgccggcaagcaggcccttggaacggccgacttcctgcacggcggagccgagctggccattacgcatgatggcctggatgaaagcgttcggatccataccgtactgctgggcgatggaggcgaggaagttgaacacgtcggcctgggagaccttgacgtccatcttctcagcgagcacgtcgagcaccatctggtcgcgcagttccttctcgacggtctcttcggcttcggccttctgctccttggtggccttgtccgggtcggcggtcacgttcttgagctgctgctcgaccatttcggccttgacgcccttcggcaccggaatctccaggccctcttcgagcttggcgatgaaggcatcgcgggcggcggtggcctgacggccttcggcatcctgggaggcggccttcttgaggtcttccttcagctcgtcaagggtgtcgaactcggaggcttcggatgcgaagtcgtcgtcgagttccgggagctcctcggtcttgacggagttgaccttgaccttgatctgagccttttcgccttcgtgctcgcctgcctcgagggtgccttcgaaagtggtctcctcgccggcggacaggccttcgagagcctcgtccagaccgtcgagcatggtgccggagccgagctcgtagctcacgccctcctgggaatcgacggattcgccgtcgatttcggcgttcaggtcgatgttggcatagtcacccttggcggccgggcgatccacacccacgagggtgccgaagcgctgacgcagggcttccagacggttgttgatgtcttcatcggtgatttcggccttctcgacctcgatctccatgccgtccacttccggcagctcgatgtccgggcgacgctcgacggtggccacgaacttcagcttggtctcatccttggcggattccggaacttcctgaacgtcgatctccggctgggccatcgggtggatcttcttggtttcgagagccttggaatacagctccggcacgccattgttcacggcttcgccagcgacggcaccaaagccgatgcgctgatcgatgatcttgccgggcacgtgacccttacggaagccaggcacgttgacctgcttggcgatttccttgcgagcctcgtcgagatacgggttgaactcctccggatcgacggtgacggtgagcttcaccttggtcggctcaagattcctgacgctgattttcacgcttgcgctcctgaaaaatacggttcttcaacagttctgccgttaggcaacctctacatgatagcgcgacttacggactctgcgataagcgacacctgccaatcgcgcgcgccctgctccttaaggaatccggcaacgtcgcgcttttgtggttcgtccgtccagcatagattgcgcaagtactgcggtttgatgataatctccgcaggcgtacgcgtatcgaccgcgatctgctgcaccactttgcgtgccttctccagcgtgcgcaatcgctccggataacgatctttccaataccgtatcgatcgcggtgcgtgcgtctgcgattcgtcgttgttcggttgcgagctcggcatggtcggccattcgcttctcggcatgtcgagcgcctgctggatgaccgacttccaaagactcggcttcaccttgcgctggatgggggcataccgttcgaacatcttctcctgtgcggcgtcggcctgaatgcgcacacgttcgttgatggaacggatggcacggaactgcgccgcattgtgaggcttacgtttcgccgcctcaatgattgagaaatcggacagcaacagagccggagcgatatcgaaacgccgggccaattcgtcgcgtttctcccatagggccttcgccacggcaagcgcctgccggtccttggcgatttccgtgatgcgggaaatgcgcagccacggtaccggatgttccttgcgcggccccatcccctcgtgcagcgcgtatgcgaactcctcttcggcccaatcccttttgccctgcctcttcaattcggttcgcatacgctgttcgagctcgatcagcaattccacatccaaggcggcgtaattgcgccagtcgcgtggcaacggccggtacgaccagtcggctgcggaatgttccttcgccaatgtcaatcccagaaaatgttcggtaactgccgccaagccaaaacggtgcatgccaagcagacgcgccgcgatctccgtgtcgaacagatgatgcggctccatgccgaggtccgcgaatcctggaaggtcctgcagggaatcatgcagaatccacgtggcgtcgcctacggcgcgattgaaatcgttccagtcggcccccgcttgcgccaatgcctgcggatcgagcaggccgatacctgcaccggtacgcttgaactgcaccaaccaatcctcatgcccgtaacggtatccggaggcacgttccgcgtcggcggccaaagagcctgttccggccgccagaagatcgcagtaatcgcggaaggccggcaacgtatcaatcacatcgggtacgccctcacgcggctcggactgcagcctcggctcgtcaatcaacgggaacaccttcctcggattacgtcatggttcggaggaaccaggcccatgattcaacctgagcgccggcatcaagacccccatcggcatagtctaatggagtccaagacacacgaagttcgcagcccatggacggcacaccgctcatcgatccgaaggtggtgttcctggtaaccgtgacggtgccggaaacattctccgcaccggcttcgtccagatgttcgagcatggaatcccaatacatcgacggcgtgaggcaatcctcctgctcatcgggcaatggcaaagacgcaaacgcgacgcaacgccaatgggaatgccaatcgtcaaggcaatcgtgcgaatacagcaccatgatccagccgtccgctgtcgcgcaacggttcccggtcatggcgcaatcattgcggaaataggatttttcgtcgcgatacgagctgctctccaatgccacgccgacgccaaaatcggccatggcgcaaggtatcggaatctcacgataggccacgccgttcactcgccgcatattgcgcacggaaagaacggcatcccacacgacatcgggcacgccgagaggtctgttcatcggcatgtcggcggcatggttttccctgttgtcggcacgcgctgcagtgggcgtgcccaaagggaaagcataaatgtccgccatgattcaaggctaaggcagacatcatgcgattcatggtatttcggggtatttcacttcgcgtcgaatgtgaagatttgcaatccccaccgttccgagtcggtttcgccgacgacttccgccggcgaaaccccgggcaagaccttaatatacgacgaatccatgggagcggaactggtccatgacacgctgcttcatggcctccgacggacccttctgatcttccaacgggtacgggatgcacagctcatgccacttcgggcggccgagctggtgaaatggaagcacatcgatatgctccaccgcatcgccgaacgtttcgcagatcttcgccacgttctcgacgttctcctccgcggaggtgagatccggcacaagcacgaaccgtatccagatcttcttgcccgccttggcgaggcgctgtccgaaatcgatggtgggctgcagcactcccccggtcacgatacggtaggtttcctcatcaccggacttcacgtcaagcagacacaggtcgatatcatcgatcatttcgtccgtatagtttctgttgaggaagccggaagtgtcgaggcaggtgtgcacgcccatctccttggacgctcggaacacgcgggacacgaatgccggttgcatcatcgactcgcctcccgagaaggtgatgccgccaccggtggccttgaacaggtcggcatagcggtcgatctttttgatcatcgcttccaggtagacgggcttgccgtcgcgcatcttccaggtgtcgggattctggcagtactggcaacgcagcggacagccactcatgaacaccgtcatgcgtgtacctggcccgtcgacggacgtgttgatgtcccaggaatgcacgaaaccgatgtcaccgcttttcagcgcattgatgcggtcccgtcgatccatgccgatcggcgattcgaagccggacaggcctcccatcagcgtctggctggcgtaggctttcgagcctttgagcatgtgcctggtggtggtgcggaactgtgcgatctcagacatcgatgtccctttcatttattccgaagtccccctatccgggaaacaaaacgcaaggggcgaagcctttcaagcaccgccccttgccgtattaccgcttcacgcggcgctcatccgtcctagtcgacgacggcgccctggtggaacgtacgggagatcacgtcgagctgctgctccttggtgagcttgacgaagttcaccgcgtagccggagacacgcacggtcaggtgcgggtacttctccgggtgctcgacggcatcctcgagctgctccttgcgcagcacgttgatgttggcgtggtacaggccgtggccgttgccggcgtcaaggatgcctacgaggttgccgatacgttcgtcctcgtcacggcccagaccatcaggggtgatggtgttggtcagcgagatgccgtcaagagcgtcgttgtagtcgatcttgccgacggagaacatggacggcagcatgccgtgggaatccatgccgttctccgggttggcgcccggagcgtacggggtgcccttcttgtgaccggacgggaaggcgccggtggccttgccgtactccacgttggaggtgatggtcaggatggactgggtcgggacggcaccacggtacaccggcaggcgcttgacctggcccatgacggtggagacgacccacttggcgatgtcgtcggcacggtcatcgtcgttgccgtacagcgggaactcgccttcggtacggtatccgacaatcagatcgtcatcggcgccttcgacgtattcgtcctcgtgacccggggtggtcttggcatccttgttgtagatcgggtagaccttggcatacttgcaggcggacagggagtcggctgcgatcgacaggccggacatgccgcaacccagggtgcggtacacctccttgtcgtgcagagccatctcgatggactcgtatgcatacttatcgtgcatgtaatggatgatgttcagagccatcacataggtctcggacagccattccagagccttctcgtagttggccttgaccttctcgtagtccagggtgccgtcagcttccggagcgatcggttcgatcacgcccttgtcgatgacctgcatgccggtcatctcgtcgcggccgccgttgatggcgtacagcagggccttggcggagttcacgcgagccgcgaagaactgcatctgcttgcctacgcgcatcggggagacgcagcatgcgattgcggcgtcatcgccccagtggccgcggatttccttatcggactcgtactggattgccgaggtgtcgatggagatcttggcgcagaagcgcttgtaggcttccggcagcttcggatcccagaagatggtgatgttcggctccgggccaggtccaaggtgctcaagggtcagggtattgagcagacggaacgaggtcttggtgaccagggtgcggccgtcgtcgccgaagcccgcatcggaccaggtcgcccagtacggatcgccggagaagatcgcatcatagtcctgggtacgcaggaagcgcacgatacgcagcttcatgaccaggttgtcgatgatctcctgagcgtcgacctcggtaatcttgccggccttcagatcgcgctcgaagtatacatcgaagaaggtggatacgcggccgaacgacattgcggcgccgtcctggctcttgacggaggcgaggtaacccatgtaggtccactgcacggcctcctgggcggtctgtgccgggcggctcaggtcgaggccatactccttgccgaggttgatcagctgcttcagggccttgatctgttcgtcgtgctcttcacggaagcgaatccagtgctcgatctccggctcggtgaagtcgttgcgatacggcacggaatccttgtcgcgctgcttgaacttgatcagggtgttcacgccatacagggccacgcggcggtaatcgccgatgatacggccacggccgtaggcatccggcagaccggtgaggatcttgttgtgacgagcgaccttgatctgcttggtgtacacgccgaagacaccgtcattatgggtcttgcggtacttggtgaagatcttcttgatctccggatccggctccttgccggcctcacgaatggcctgctcgaccatgcgccagccgccgttcggcatcatggcgcgcttgcacggcacatcggtctgcacgccgacaaccacattgtcgacttccggggagtcgatgtatccggccgggaaagaatcaatgcctgccggggtatgggtatccacgtcatagacacgctgcttgcgctctacggccagatagttatcgtcaagatacttccacagatgcttggtcttgtcggtggcgtcggccaggaaggactcgtcaccctcgtacggcgtgtagttcttctggatgaagtcacgaacatcgatgtccttctgccagttgccctcggtgaagccgtcccaggccttggcctcaagctcctcctgggagaccgccgttgcatcaactgctgccatttccactccttctgggtgtagggttggcgacgcatcgttacgtcgtcgctaattcaaaattctatcggtcctcacctgagaactggctgatattcaagccgaataaaagtgatttatttcacatatccaaggtgttgctcaatgccaagtgtttccaatgcctcccgcaagtcggacggatgaaatccactccatccgcgctccagaggacccgttgcatgttccatgaacatcgcttacttggaaaatcacagattgcgggccagcagacgggccacgttttcggcggtacgggccaggttgtccgccgcatggtcgacggcgtcgcgcatagtggagacgcctggcatgatgccgaaaatcgcgtcgatgcccaggtcatacaactgatcgataccctccccgatgctgccggccagcgccaccaccgtgcaatccggcgacgcctgcttgaccgctcgggccacacccatcggcgttttgccgtattgcgtctgaaagtcgatgcctccttcgccggtgaagcaatagtccgcccctgcggccagccccgccaatccggtcgcctcgatcaccaggtcaacgccggatctcatgcttgcttcggtgaaggccaggaatcccgcgccaaggccaccggccgcacccgcacccggcacggtctccacctcgcgacccagctgcttgcggatcaccgcagcataatgggccagcgcgtcgtccaaccgctcgaccatgtcgggagtcgcacctttctgagggccgaacacggccgatgcaccgcgcacgccggtcaacggattggtcacgtccgaagccagacggatgcgcacgtcggcaagccttggatcaagaccggagacatccacttcagagagttcggccagcgccgcaccgccaaacggcaatggcgcgccgttgtcgtccagcagccgtacgcccagtgcctgcgccatgcccgccccgccatcgttcgtagccgaacctcccagtcccacgatgatgtcgcttacgccctgctccagcgcatccttgatcagttcaccagtgccgtaggtggtggcgatcaacggattgcgcgtggtctcgtcgatgtattggatgccgcttgccgcggccatttcgatgaccgcagtgcggccgtcaccgagaatgccgtattccgcattcgtcggatgaccgagaggatcggtgaccaatacgcgcatgatgcgcccgccggtggcatccaccagcgattgaacggtgccttcgccgccatccgccatggggatgctgacgcattcggcttcgggcagcaccctgagaatgccggattcgatggattgcgccgcttctcgcgcggtaagggagcccttgaatgagtccggggcgatgacgattttcatgggaatcctttcggggaggaatatgaatgattaggttatcggacaatcgttagaacacgatgttcagtaccacggccacaaccgtcatggtcaggccgaccaaggcttcgaagggcagcacgcccagtctttcgccgatggacatgttcattgatttggcggagacgtggaagtagttgccgtgcggcaacgcgtcaatcaccgtggcaccggcctgcatggtgaccgcggcggccaccggcgtagtgccgaaggcgagaatcgtctcgccgaaggagctcgcgccgagaatcacaccggtagaggtggatgcggtggcggcggccatcaggatgccggcgatcggtgcgagcagggcgccgggcacaccggcggcggtaatcaggcgcacgatctggtcgggaaggtcggagctggtgataagaccaccgagagcgccagcgccgatcagaatcatgaccacatcgatcatgcgtgcaatgccggctttggtgtaatcgaggatgcgccgcccctgccccatggccagcagtcccacgatggccgcaaacgggagaatgtacatcgcgtcgacctgaaacatggtgagcgccttgatgcccagcaccgaacccagcggattgatgagcagcagcacgacggcgattgcgggcgcgaccatggccctgccgatggagggcaattcgcgagaggccttgccaccgctcttcgcgcttgcgttctcaccgccgttcagatcgtccatggtaacgacctggccacgatgctgtaccagcgtggccagcaacaccgccatgcccaagccgaacaacgccggaatgaagctggagaccatcactgcggaaggctggatgtcgaagccggaagccgcagcgatggtgttaggattcggggagatgatgttgccggccttgccgccaccggagagcgccacaagcagcgccaatttggacacgtgcatcttcgagccgacttcaatggcgatgggcgcgacgatcagcaccgccacgggaatgaacacacccacggcacagatgaccatcgtggcgagcgccaacgcgaaaatcgcaagtttctcaccgaaggtgaccacgatggtctgggcgatgcgattggccgcaccggattccatcatcaccccggccaacacgcccgcggcaagtacacgcaccaccgtgcccatcacgctttgtgttccagagactacgatgtcaacggtctgcgacagtgtggcaccgccgatgacacatccgaccacggcaccgagcatcagcgcgtaggtggtgttgagcttacgcagaatcagaccgatggcgagcgccaaaccaagcagcgccgcccaccaatgcaatgaaatgtccactttgacacctttcgtaacgatggatacgaaatcttttcgctgcattcattatccgtcgggcacccatgcaaaaccatgtgccttgccccaggaacattccccctgttctaccgaaagaaatggtacgtgtactatttttgtatggaaatcgatccgaatatcgccaccgacatcgtgacgcatctcaaggatgcgctgcgccacgaaatcaacttcttcaataccagcggcatcatcatcgccagcaccgaccccacacgcatcggttccgggcatgacggtgcgcgactggccatcgccagcaagcaaaccgtgtgcgtggatgacgagcatcgattcgccggcgcccggaacggcatcaacgtgccggtgcagttcgacggcgagccggtagcggtgatcggcattaccggcgagcgcgatgaggttgaacctttcggcaccgtattgcagaaaatgaccgagatactgatccgcgagcatctcgaccagctggcccgattcaatcgacggaccatgcgtgattcgctgatcacggcattggcctacggcagcgggaatgttgcggacaacgaacgtctcgcggccatgttgggcatcgatcttgatctgccgtgcatgatcgcatcgatacgcggcgttgaccctcacgacctgctgacgtatcaggaacgaatcgtctccgcattggatcggcaggtcgagggccgtcctgacgtattggccacgctgaccccacaggaatgtctgctagttatcgtcggttccgatgacgagaccgccgaatccaccatccgagccgcggaatcgctgatttcgtcgttcaccgggcatgccacgcactgtggtgtcggcggcagggcatccaccatgcatgattgtcggcgtagctacgatcaggccgtggccgcgctgcgctggggcatcacggcccatgcttcgccacggccggcatccaatgaacgtgataatgcctcgccccgtacacggatcgcatcaacggagcttcaacattgcgatgacgaaaacacgagtctctcgactttcacccgatacgaggacctcgacttggggctcatagttcccgtaattcctccggaacaggcgcaggcgctaacgcgattggtgttcggcgggctggacgatggcgtgatcgacgcatacgagattacgttcgatgcctacacacggcataacggcagcattagcgccgccgccaaggagctgttcctccacaaaaacacgatgcagaaccatctgaaccgcatcgccgccatcaccggttacaatccgcgcaatctcaacgatcacaccattctggcgctggcatttcttctgcgtaggcacaacagccgttgtctacgctgaacggggcaggactggacgaatcggatcagaccgaatcgggccggtcgtcagtggaatccttcgaatcctccgaccagcgcttccattcgcggtcctgctcttcccatttgagattgcgctcctgcacgatcttccatgcgtcaagcgcatcctcacgggttttgtacgggcccatgcgatggctggccggagagaccatgcccagctcaggctgctcggtcaccgtgttaaagtaccactgcttttccatatccatactccttgactcgctttgccgtctactcacggaaggcgttggtgattggcaaccggcgatcgcgtccgaatgcgagtgcggtgaccttcggccccaacggatactggcgacgcttccattcggcacggtccaccaagcgcatcaccgtgtcgacggtggcttcgtcgaaaccatcggccagcaggtcggcgcgaccgtgcgcatgctcgatgtacatggcaagcacctgatcgagcaacgcatattcaggaagcgaatcggaatccttctgacctgggcgcagttcggcgctcggcgccttctcgatcgaattgacgggaatcatcacgccgtcgggcaacggaacgccagccgaaccggattcattaccgacgacatgcagcccgccgatacccatgcctgcggcggccgccttgttacgccaacgggaaatctcccagacgcgcgtcttgagcagatccttgatcggggcatagccgccgaccgcatcaccgtagatcgtggaatagccgcaggcgagttcagatttgttcccggtggccaccgcaagcagacccttggaattcgaataggccatcacgatcacgccacggatgcgggcctgcaggttttcagccgccacgccttccagatcaagctgcttctgataggccacgaacagcggttcgatgggctggatgtcgtaatgcgcgccgatgttgttcgccagatcggccgcatcgtccttggaaccatcggatgagtacatgctcggcatggaaatgccgtacacgttgttgccgccgaccgcgtcggccgccatggccgccaccagagcggagtcgatgccgccggacagaccgaggcacacacccttgaaatggttcttggccatgtagtccttcaatcccaatacgcacgcagtgtacacctcttcgtcgggatcgggtttgtccgcgatgacgccaacgctctggcgttcggcggtggtatcgaggtcgaagagcgccaggtcctccatgaacataggcgagcgctgcagcaacgtgccgtcggcatcgacggtgaagctgccgccatcgaacacgagatcgtcctgtcctccgacctggttgaggtagatcatcggcgcgtttacctcggccgcacgccgcaccgccaagtcgaagcgagtgtcggttttgccctcctcatacggcgaaccgttcatggtcagcagcaggtcgatgtcctgtttggcgagttcggcgaccgggccgccatcctgccagatatcctcgcagatggccacgccgatacgcgcaccgtccacgtcgagcaccatggacttgttgcccgggctgaagatgcggaattcgtcgaatacaccgtagttgggcaggaagtgtttgtcatagccggcccagaccacgccatcgtgcagcacgacgagtcggttgcgtggtttggagttctcacggtcggtgcccacggtgccgaccaccacgaacaggtcatcgagcccatctgcggcgagttcggtggcaagccagttggctttgtcccatgcggccttgcggaaagtgccgcggagggccagatcctcgatcggatagccggtcagggtcatttccgggaacacgaccaccttggcgtgctgcgctgcggccagatgcgcgtagtgcatgaccttgtcggcgttggcgtcaaggtctcctacgcaggtgtcgatttgagcgagggcgaaacgaatgtcagtcatacttgcctagtctattgcgctgtgcgtatcgtccacgcgaacggcgcgcatatggcatgaaaaaccacacgtgcgccgttcgtccgcaccatttcgcccagctcgtcatcatgcgagctcgttcaacacggtaagcgccgcgttggcatagaattccacaccggcctgcaacgactcgtcgagacccacgaagttcggactgtgccaatccgggcatcccgcttcgccgttggatccgatgaaggcgaataccggcagcgtgaccttgccgtattcgcagaaatcctcccccgccatcgaaggacggatcggctcgagttgagcgtattcgcgcacatcgtccgcaacggccttggacagtccttcgtcggaaacaagaggatcctggaaatcatcccaatcgatgtcggcggtgataccgtaccctgccgcgatggcgttgacctgttccgcgaaacgacggccgaccatctcgccatcggacttgtggaagtatcgtacggtaccttggaagctggccttatcaggcaccacgttccacacatggccgccgtgcagttcggtgatcgacagtacgagcgggtggaatggcgagacgttgcggctcacgatggtctgcaatgccagaatcatcgtggcgagcgcctcgatcgggccggtacccttgtgcgggtagccggcgtgtgttccggtggcgtgcagggtcacgtggaatttcacgcagcccgccatcatcggttcggggccgatggccacctgtcccggcgcatagttcggattgttatgcgcgccgatggccgccgagacatcgctcagcagtccggcgtcaatcatggcacgggcaccggttcccgtctcttcggaaggctggaacagcagtttgacggaacccttgatctgcttgcgatgcttggcgagccagaatgcggcgccaagaagatacgacatatgcaggtcgtgcccgcatccatgcatcacgccgtcgttcacggatgcgaacggcaggccggtatcctcctgaatcggcaaaccgtcgatatcggcgcgcagggcgatgcgcggaccgggttcgacgccgcgtatcagggcgacgacgcctgattccagaggattgttcaggatttcgatgtcatgtgcccggagcagcttctcaatgtaggcactggtctcatactccttgaaactgcgctcggggtgggcgtgcagatggtgtcggattgctatcagttccggcgtgatttcgatgtgttcggtcattttcccgcgaactccttgtcttcttccgcgcgacagacggcgtcaacgcttcagcaggtgcctggcgatggaattggcgatgccctgcacaacctgcacaagcacaatcataatgatgaccgcggtccatgtgacggtttggtcgaatttctggtagccataggcgatggcgaaattacccaagccgccaccgccgatgtagcccgccatcgcagacatgtcaagaacgccgatgaacaggaatgcgtaggcgagaatcagcggcgccaacgcttccggaatcagcacggtacgtacgatggtcggtttcgaagcacccatggaacgggccgcctcgatgacgcctggatcaactgggacgagattctgttcgaccaaacgcgacgtagcgaccgtacacatgatgatcatcgggaaaatcgccgcgaccgtgccgatggacgtgcccaccaccttgatggtcagcggctgcatggccgcaaggaagatgatgaatggaatcgggcgaatgatattcacgatcacatccaggatgcggtagagtaccgcgttttcgaatagattgcccggcctggtgccatacaacaccacaccgagaatcggcccgaggaatccgccgaccaccagtgtgatcagcaccatctcaagggtctgcccgatcgactcgaacagcagcggcctcagcacgctccaatcgctgcgacttgccagaacgatactttcttgcgtcatatccgtcactcctgtcccgctgtggccaaagcctgctcatacggcacttggtcatccgccgtgccgaaatcgatgatgtcgctgttccgtgcaagttcggcaaggaacgcgtcaacgccgtcacccgaaaattcgtatgtgatggcgccgatggcgacgccgcgcaccgtgtcgatgccgccgtactgcagactgctgtgtatgccgtgttcggcgatcagctgggagatgttctgcccggaagcgccgatgaccgagccgtccacggcgtcggtcacatcatgctgacggatcagcacggtgacgatgtgccccggacattgcgcatgcagacgttccacccgggatttctcgggaatgccactgaccgcagtggagatgaaccttttggtgactttctggcgcggcgccgcgaacacgtcatacacgtcgcctcgctccaccactttgccggagctcatgaccgccacacgattggcgatctgctgcacgacattcatctggtgagtgatcagcacgatggttacgcccaattcttcgttgacacgcctgagcagggacagcacctccatggtggtttcgggatccaacgcacttgtagcctcatccgcaagcagaatcttcggattggtggccagggccctggcgatgccgacacgctgtttctggcctccggacagttgcgacggatacttgttcgcatgctcgctgaggccgacgaattcaagcagttgcgagactcgtctgtcctgataatccttacgccaatgatcaagctgcaacgggtaggcgatgttctgtgccaccgtcttggtggaaaacaggttgaactgttggaagatcataccaatcttctgacgaatcggccgcaacttggcctcgctgagtgcggatacctcggtgtcaagcacggtgacggttcccgacgtaggcttctccaaggcattgatcaatcgcaccagcgtcgacttgccggcaccggaatagccgatgatgccgaagatgtcgccttcgttgatggtcaggcttacatcgtccaccgcgcgtgcgaccgtagcgcctctgcctgatgcggcattgccgccgcgctgtttgaattccttgaccacgtggtcaaagacgataatcggagtgggttctgtcatactgtcactttcgttgggaacgactcggcgtatgcaccggtttcaggtgccaccggcatctcatcataacgagaggaagccccctcgagacacgagggagcttccccatacgaaatcacttgacttccttggcttccttttcgatcttctgcaggtagctctgcaggtcagaggcgctgaacttgtcggcgaacaccgcggtaccgccggaattctcctgtagcttgtcaagcacgtcttgggtctggaagatctcgacgaccttcttgtagacctcattgttcacatcggccttgcgggtggcgaagatgttgatgtacggacgtgcctcctcggattcggcatcatcctgatagatggcatcggaggctttcagaccggcatcggaaacgtaatcgttgttgatcacaccggcggcgacctgcgggtccttcagggaattggcgacctgctcggccttcagcggagtgactttcaccttcgacttcgcctcatcgatgtcctgcggagtggagaacggcgtccaatcacccttcaacgtgaccagacctgcggccttcagcacgccgatggcacgtgcctgattggtttcatcgttgggaatcggcacggtggagccatcgggaatgtccttgacatccttgtatttggtggagtagatgcccagcgggtagatggccacaccgccgatcggctgcagatccttgttgttctgcacgttgtagttcgccagatacagaaggtgctggaattcgttgaggtcaagctcaccggaatccaccgcaggattttcggacgtatagtcctggaaatcaacgatcttgacatacagtccggcttctttggcctttttctggaattccacccactgcgggtcggtggcccccaccacgccgatcttcaccggattggattcggtgcccttggcatcggccgtcttggagccgttcaccacacgcaggccgaagaatccacccaccgccactagaacgaccacgattgcggcaatgatgatgttgcgaacggtgtgattgacacgcaccggttcttccggagccccgttcggttgttgaatcgaagatgtcatgtctgtccctctctcttatggaatcctgctcgtgacgtggcttccacatcacgtgacgtcctctaccatacgggatgaattcagcggaaaaggcggaaatgcaaggatttcctatcggcgttcgttatagcctgtattcaaggccaacattggcgctgttgggtggaagattattttcgacgcatatgcgtgcacgattatgctatcgcgtagcgtgttacccgacctatgcttttctagactgggccagacggaatgtttacgaaaggttgtttccatgcatgacacctacgacatcaaggcggcgtttttcgacatcgacggcacgttgaccagttttgtgacgcatgtggtaccgcaatccaccgttgacgcgttgcgagcgctgcaggccaaaggcgtgaagatcttcatctgttcgggtcgggcgccgtcctacatgggcgtggtactcaacatgattcccgttaccttcgacggcatcgtaggactgaatggccaatattgcatggacaacaccggactctcctatcgtcacccgctcgatcaggtcgacgtggaaagaatcaccgcatggctggacgagcatacgaacgtcatcgccaactatgcggaaagcgatcacgggtatttcaaccgcgtcgacgaggcgatgcggcagacatggaagagtctgggcaaaaccgcgccgaaggtcgatatctgtgatccgcatacccgaataacggatcatcccactttccaaatcagtccttacgtcgatagagccgtcgaggctgaaatcaccggaatctgcgacaacgtgcggggagtgcgctggcatccggatttcaccgacctgattcccgccgatggcggcaaggcgaagggcatgcaggtcatgctcgaacactacggatggcaccgcggcaatgcgattgccttcggtgacggcggcaacgatgtagacatgctggagtacgcgggaatcggcgtggccatgggcaatgccaccgaagagccgaaacgagcggccgactacatcaccgacagtgtggatgatgcgggaatagccaacgccttgcatcacttcgcgattttgtaacggcatcacgttcgtcacgactaccgtcactatcgcattgccaatatgaacgaatcgtgcgccttgcccgtatacgattacaatcatgcgcacgattcgcaactaaccctccgcaagtcgaaatcgtgcacgcacagcatgaggaagccagccctcttttcacgcacagccggccattccgatgcccataagcgacagcgctcagcccatatgccccagatagcttacgattccggcgagccgcaagacatccgtcatccttcgggccaaacgtgcgcgatcgggaatccacaatgaatgaaacctgatggtcccgaacctatgggagaatcgggaaccatgactactatcatcatgcgcacgaccgaaggcgacatcaagatcgacctgttcgacgacaagacccctgaaaccgtagccaacttccttggcctggccaccggcgagaaggaatggaccgacccgttcaccggccagccgagccacgaaccgttctatgacggcctgaccttccatcgcatcatcaaggacttcatgatccagggcggctgcccgctgggcaccggcaccggcggtccgggctacaacttcgatgacgaaatcgtgccgggactgaccttcgaccgtccgtacctgctggccatggcgaacgccggcctgcgtcgcggcatggatggcaaggtgcacggcaccaacggctcccagttcttcatcaccaccgtaccgaccgagtggctcaacggccatcacaccatcttcggtgaagtcgcggatgatgagtccaaggccgtcgtcgacaagctcgacgccgtggcgaccgaccgttccgacgctccgctcgaaccggtgggaatcacttcgattgaagtcgtgaagtaacaccatcagcaatacacagggttggggaagcctccttcctggaccacactccgatcgtcggtctgaagagatccagattcgatgatcggcaggagtgtggctcaggaaggaggcttctcccgtctctccccatcatgcttcgcacatcatactcctcatccagaggagggaaccgctatatccttcgcaagcggggttcggctgaatccttggcaccggtgatgcgatacacgtcgaacacgccttcgatcttgcgtactgccgcaagcaggatgttgagatgctgcggatcggccatctcaaagctgaactgactggtcgccacacgatccgtaccggtggaaatcgagccggagatgatgttcacgccatgatcggacagcacacgcgtcacatcgctcaacaggtgcggacgatcgagcgcctccacctgaatcttgaccatgaatacgcccttggtactggtccactgcacgtcgaccacacgttcaggctgccgcttctgcaagtccaacatgttctggcaatccacacgatgcacggacacgccctggttacgtgtgatgaaaccgatgatcttatctcccggcaccggcatgcagcagcgtgccagtttgacccagatgtcacccacacccttgacggagatgcctagcgaactggtggtgttcttcttgttgcgctcgacctgtttgagaggcagcgcctcctgctccacctcttcgttgacctcgtcgctgccggcatccttcaccagatgcgaaatcacgttctgcgtggaaatctgaccgtcgccgatggccgcgaacacggcatccgcgttggcgagattgagttcgtcggcgatgccgaccaacgcttccggagtcagcaacgtggtaatcggcagattgcgcttgcgcatggctcgtgtcagctcgtcacggccttcttcgatggcttcggtacgtcgttccttgctgaaccattgacgaatcttgttgcgggccttcgggcttttggtgaaactcagccaatcacgggacggccccgcggtatcggatttggaggtcagcacttcgacggtgtcgccattctccagtttggtgtccaacggcaccaagcgtccgttcacacgggcgcccatggtgcggtggcccacttcggtatgcacggcgtaggcgaagtcaatcggagtggcctcggcaggcaacgacacgatcttgcccttcggcgtgaacacgtagacttccgcggagcccagatcttccttcaaggagccgaggaattcgttggaatccggagtctcgctcgtccaatcggcaagctgctggatccatttgagattatcagcctcggaaagctcctggttctcaccgcgcttgcggtcggacttatccggtgacgacagggcacggcccgcctgaccgttctccttgtacttccaatgcgccgcgatgccgaattcggcgcgacggtgcatatcccaggttcgaatctgaatttccaccggcttgccgcctgggcccaccaccgtggtgtgcaggctctggtacatattgagcttcggcatggcgatgtaatccttgaaacggcccggaacggggttccaacgcgcatgcacggcacctagcgccgcataacagtcctgaatggtgtcgacgatgatacgtacaccgaccagatcgtagatgttggcgaaatcatggccgcgtacgatcattttctggtagatggagaagtagtcctttggacgcccggtcacataggccttgatatgctgctcgtcgagatcctcattgatctcggcgaggatctgcttcagatacacgtcacgctgtccggccctgcgagccaccaataccacgatctcgttatagatcttcgggtagagcaccttgaagctgagctcttccagttcggttttgatggcgttcatgccgagcctgttcgccagcggtgcatacacgtcgagcgtttcatgcgccttcttctgcgcattggatggcttgacgtaacgccaagtacgagcgttgtgcacgcggtcggcaagcttgaccaccagaacacgcacgtcccggctcatggccaccaccatcttgcggatggtttcggcctgtgcggaatccccgtattccattttggaaagcttggtcacgccatcaacgaggcccgacacggtatcgccgaactcggcacggcactcctcaagcgtgtagtcggtatcttcgaccgtatcgtgcaacagacccgccgccacgacaatcggtcccatgcccagatcggcaagaatctgcgcgacggccagcgggtggatgatgtaaggctcgccggacttgcgccgctgcgtgcaatgctgcttgacggcacgctgataggcgcgcgccagaatacccatatcctcatcgggatggtggtattcgcacatcttcagaatcggttcaagcggatcaagaggattcgtgctgatctcgcaacccaacatgtgggccgaacgaacctcgttctcatcgtcgcccatcttccacctcctcttgcaatgctccctatcctacccgtgccgcacggcatgaccgacgcatccgaccgcgtgttgtgcggtcggatgcatgcgtggcgaacagcctcaggaggccacgccggtcgagccgaagccgcgttcggcgcgatccgaacccggcaacgacgccgccggcacgaatctcgcctcgacatagcgctggatcaccaattgcgcgatgcggtcccccggctggaatgtcacggtgtgttccggatcgaggttgatcagcggaaccttgatttcaccacggtagccggcatcaatcgtgcccggggcgttgagcacggtgacgccgcgcttgacggcgagccccgaacgggggtgcaccagggcgacgtagccagccggtagcgcaatggccacgccagtaggcaccagcgcccgctggaacggctccaaggtgacctcctccgtcgttttgaggtccgccccggcatctccggcatgggcataatacagttccgcaggttggtcgggattcagcgactttaccagaacctcgacgttttccggctcgttgtatgcttcgtcgaatgccatcaggcagcgcactcctgacagacgggctgcccatcctcggtggtgtaggccagctggctgcgatgcttcaccaggaagcattcagaacagatgaattcatctccctgcatgggaatgacggtcaccgaagcgtcttcattgctcagatcggcgccgggcaactcatagtcctcggcaatggcgttctcgtcatcgtccatatcgttggaggaattctgcgagcttttgcccagagcctggagcgactcctcgtcctcgtccttgttacgcggggaatcataatcctgtgccatcgcgattcctttcgtcatctatggtgcctatgcgccatagaatacatgacatttaccccgcataggatacacgattcgaaatactcgtaaaatccgacacgtgcggcacaatggaaatatctgatgcccgaagaaggaaagtggtgcgctcatgcctgaaaatccgttcgaggaagcccggttcgatcatgtgggggaaaccggtgaactcgtctttgtttcaggtgccggaaaattcgccgtaaaggtcgatgatgcgcttgagagagccattttggaggcgaaacagattcgttccgaagtacaacgggagcaccagccgcatacgtccacaacgttgccgatctcacagattcagtcgctgattcgcgccggtgccgatcccgcgcgagtcgcggaacgatacgctttgagcgaggctcttgttcggcgtttctcggccgcggtcgaaacggaaaagcagtatgccatcgagcagttcctcgctgtgccggcaccgaaggagagccgcgtacgcacgctttccgagctcatcgaacgcacgttcgcggcggcccgcgtccgtttggaggacgtgacttggaaggctacgcgacgcggtctggagccatggaaaatcaccgcgcaattcacatccaacggccgcaccatccgcgccgaatggacatggaacatgcacgacaacgccgtgacttgcctcaatgcaaccgccaagaaactcatcggcgaacaggacacgcctaaaacgggaggcgccgaagatcatacggtggatgaggattttctggcatcgttgaatctgcctggcaattccgcgcgctccgcccgcatcgaacagaccgtctcagcctggaacacgcctgagccgaccatgccagccgcccggccgaaatcagccgttccctccgtgccgttgtcccccatcgattcgggcacgatcgcaacgaccccgccgattcccgaaggagtcggcgccgtgccgatgccgcagtccccgagcgaatccgacatgcaggcgcagcccgaacaggactcgccgcagacgaagggcgaaacatcgtcccacacggcttcgacgcctgacgaacatggccaaggcgccacgaaggcgaaacgtcgtgccggacgttccgcagtgcccagctgggatgagattctgttcggcgactgaccttgcggcacgctgctaggccatgtcgatcagacagggaatgtccgattccagcatggtcagcgatccgtgcacgctaggcaggtgcgtcgctttctcggcctgcgtccgtgagtcgacgatggtcacggattgtgcggccgacacgatgacatcacccaacatcggttccacatacggttcgaccggcccgtacacgccttgtgcaatcgcttcggcacgcgtgcgcacctgcgcccgctcctctaggaaatcacgccatctcatggcgatgtcctcagggttctcgccatgttcggcatagagcatcacgcaacgtggttcgccgccgatactcgccacaccttgggatagccggggctccccggctatgtcgatgcgttgttgcggatcagcggtgatcatgccatgatccgcgacgacaacgatcagcgtccctttgggaaggctgcgtctgagcagcccaagctgaccgtccacacgttcgaaggccccaatccacttgtcggaatcccaaccatagttatggccgaccttgtcggtatcacgcagatagacataggtcaatcccggccttcgtgcggcccttgcggcaaccgcgatcctcgtgcgcggatccgtattggagatgtagtcggtaccacgcaatgaagactgcgtcaacgccgagaacgcgaatttaggcaatccggaactagtgacgcgtacaccctgttcggcaagacgctcgaataccgtgggctggcgttgcagatcaagtggggccatcgcgtttttgaatgatatcagctggcagatttcgccattgttcggattcagctgcgtatatccggtcatgccggtcaatccggggcatgtgccggtaccgaacgaggccatggcggccaccgtggtgcttggcatgcaggtagcaatcgggcgttggttgacggaatcgttcatcagcgaacggaggtatggcgcatggccgagtctcatattgagattccagtagccaagaccgtcaaccagcacgatgaccgccgatcgcgcatcgggaagtcccaacacggtctgcagggagagcggatcccgatgaatcgcggtcgggattggatggccaagggctgcggaaatcgccggcagcaccgccgaaagatgcagcgctcccccgcgttcgcccattttcgccgacctgccgtcgccgtatcgcgcgggcgaggtcatggaaagcagctcctgcatatgcggcacttcaatactcatgtcttccattcaatcaccgcgtcgcgtcagaagccggcatatcgggatcgtatggacgttcaccgaacgcgaaatcatcacgctttcggcaggaccgcatgcattgcgatgcatggagttcgacattaccggctggtaatatgggcaggttgattaccgtccgacgactgtgagggagaatcactgcatggtatcgcaccgcaaaccggcacaacccgctttcgacccgcgtacggtcaaggagcacatcgtcgagacgcctctgaacgaggaaatgagcaagtcgttcctcgagtatgcatactcagtgatctatgcgcgtgcactgcctgacgccagggacggtctcaagcccgtgcaacgccgcatcatctaccagatgggccagatgaatctctctcccgaccgcccatatatgaaatcggcacgtgtggtcggcgaggtgatgggcaagctccatccgcatggtgattccgcaatctacgaggccatggtgcgtctcgcccaaccgttcgcgatgcgtctgcccttggtggatggccacggcaatttcggttcccttgatgacgggccggcggcatcccgctacaccgaagcgcgtatggcacgggccgcactcggcatgaacgcggacatcgccgaggacaccgtcgatttcacccccaactatgacaacaagcttcaagagccgaccgttctgccctcggccattccgaatctgctggtcaatggcggttccggcatcgcggtcggcatggccacgaacatggccacgcataatctcggcgaagtcgtggcggcggccaagcatctgatgcgtcaccccgatgccacgttggaggatctgatgaggtatgtgccaggtccggattggccaagcggcggcgtaatcgtggggcggagcggcattcgcgaggcatatgagagcggccgtggcgcactgaccacccgttcggtgacgcatatcgaaaacgtgacggcacgcaagaaggccattgtcgtgacggaactgccgttcatggtgggaccggaacgtgtgttggagcgtatttccgaaggtgtgaagaatcgcaagctggagggcatttccggtgcgatcgacctgacggatcgacataacggcacacggttggtcatcgagatcaagaccggtttcgatccaaatgccgtgttggcacagctgttcaggcacacgcccctgcaagacaatttcaccatcaacaacgtagctctggtcaacggtcgtccgcacaccatgggattgaaggaaatgctcaaggtgtgggtggatcatcgtcgtgtggtgattcgccgccgtagcgaattccgcagacggaaggcgttggagcgcctgcatctggtcgaaggcctgctgttggccatggtcgatatcgacgaggtcattcaggtgattcggtcctccgatgacgccgaggccgcaaaaaccagactgattgccgtattcgatttggacgacattcaggcgcagtacattctcgacttgcgtctgcgccgcctgacgaagatgagccgtatcgaacttgaggccgaacgcgacgatctgaagcaacgcatcgaagagctggagcgcatcctcgcctccaacgaagccttggacggtgtggtgatcgatgagatggacgaggccgtcgccgcatatggcacaccacgacgtaccgtgctgttggacgaggatgccgacggcggtctggtaccggtgaccgcgcatggcgatgatggtgtttccgccaccgcgctggctgccgcccgcaccgccgcgaccgtgtcttcggcagccgccgacgtggccgccgccgcgaaagccgcgaaaaaagccggcgaggataatgcgaccgcgaccgccttgcagatcgatgacgaaccctgtgcagtgatgctgagcgccaccggtctgatcgctcgcacccatgaggatgccgtggaacgttgggaaaaccgttccggctcggatgcgcgaaccaaggatgaccagatcgtttcgatcttccgcacgaccacacgctcctcatacgggctgatcacttccgcaggtcgcctggtgttggcgcatgtggtcgagttgccggccgtcgccccggacggcccgttgaacgtttccggcggcgtgaaagccgaggaattgctaggcatgacggaaaacaccaatccgattcgcggcgaacgtgtaatcgccgccatcgcaatgccctccgtggacgatgccggcaaggatggcgatggcgccgaacctgctccgctggcgctgggtacgcgcaacggtgtggtcaaacgctggaatcgcgagtcaccaaccaccatggattcctggagcgtcatcgacctgaaggacggtgatgaggttctggccgcggccgaagcgcgggatggggatcgtctggtgttcgtatccacggattcctcgctgctgacattcgaggcgaagaacgtgcgaccacagggccgtaccgccggtggcatggcgggcattcgtttggccaccggctgctcggtcgccgcattcgccgtggttccggccgaaaaggtcgcttggacgtatgacgaaggcgagaatggtctgttctccgcttccggcgccgtggtgctgaccgtcgctggtgattccgaggcgttgccgggtacggagaacggcgcggcgaaggtcacgccgttggagatgtacccgaccaagggccgaggcactggtggcgtacgttcgcaacggttcctgaaaggtcagaatacgctgatcttcgctttcgtgggcgcatatccgattcatgcctccacggaaggtggctccggtgtggagttgcccaaacccgacatgcgtcgcgacggctccggtacggatatggccgcccccatcgccgttgccggttgatcgtcagcgatagagtttcatgccttgcgggctttccgtgaagcctgcggcatggagcagccgcatgtatttgttgcgttgtttcagcgatatgccgttcatctcgttgaagctgatgctaccgccggactgacgctgcagcgcgtagacgagttccgaacaggcctggcgcaaggtgccttcggcatcggtaaacgccatgatcctatggcttttcggcacggcgaacagcacaggctcaccctccttgaatacgacgatcgaccccgttctgcgtgccggcttcgcaccacgcgagccatcagccttctcggttttcgtcggctcaagttcaggccatgcgattgccgcgcccgtaaggctcgcgggatcggtcacctcaagcgccacacaggattggctatgccactggttttcactgcgcaacgcgtccacggtatcgtgaccggcgaattgcgccgcaccgaagccatctacgaacaggccccgcaccagcatgccgtgctcttccatacgtttcagaacgggatacagccttgaaaatccgccggcaattcggtctttatcgatgagtggggccgcgatgacgccgtatcgatccagcaatgattcgatccgcgctatttcacgttcctccatgccaccgttcgatgtcgccgttccattttcgatcggccttggcgcgacgaccgcggaccacaatccgcccagtgtcatcggcaccgcagtatgcatgcgtactcgcctgcgtaaggtggcccttggcgcacgtgcgattccggaaccttgcatcaatgcccgtacgggagcaaaagagctgttggtcaccctgccctgccatacgagtgaccaaagcgcttcctcgaattggctttcgccccatgcgggaacgatgatttcgcccgtggtttcgtccacttgcgcctcggcatgccgctcccacaccgatttggcggtcgccgacaactgtgacgcatggaaggcgccaccatcctgcaatgccgtgatgatggcctgcggtacggtcagggcctcatcgtcttcggctgtatccgatgcgaccgtttcggagaccagcggcgaatcggccggatagaatgcgatgtttccgacctccttggcggccgtgtcgccgcccccttcgccaacccagatcacatcgccggaggctatcagctcatcaagcatggaaggatgatatccgcgcactctcgtcgaaaacacggaggactcccagatctgggcggccaaagacacaccttcgagctgttcgatgacacgcatcagaccgtcaatgccctcatagcgttcaccgccgaccggaccgactccctgacggtcaagcaggaaagcctggtaggtctgcgggctgaccggtttgatggcgttacgcgccttggcaagggacctaaagcggatacggcgaaagacgtccctatgcagccactgctgcgacgacgttccataatcggtttcgccaatggttcccgcgcgaggagacgaagagtgcgcaatcagcgaacgaacatcagcggagtcggaatccgtcaatgcggcatcagccaatgcctcggcatcagcgaagtggcctgtaagcagatcccccttggcatgaagcatatcgagggcgcgcacagcctgaacggcatcgatgtccagatcggcaatcatccggtccgcgacaaatggaccatgcgttttggcatagcgggtcactcgaccggtaacgtcgcctttatccagatcgttccagaaggtcttttcggctaactcgtgcgcaacctgtctgatcacgtcggcatccagtacggtggacatgtcggtgccgccaagcagacgttccagcacctctggatccatggacagcaatcgcgtgctgcgctcggcctgcggcacgtcgtattggtacatgaccgcacccacgaatccgaaaagcatgctttccgcgaatggcgacggcgtttcagtggtcacatcgctcagtgcgatcgttgcggagttcagtccggtcatgattcgccgcaacgccggcaggtcgtacacatcctgcaggcattcgcgcgcggtctccagcagtagcgggaagttctgacgtgcacgggccgcgttaagcagttgggcggcacgcagtcgttgctgccaaagcggcacgcgcctgccgggatcagtgcgtggcaggaacagcgagcgcgccgcgcattcacggaatcgtgccgaatacagcacgctttcgccgacttgcgcttcgatgatgcggtgtagatcgtcgagatcgaacaacaccagttcacggatcggcagggcaccatcgacatccggcaggcggatgatgatgccgtcatcggccgcatacacctgcccatcgaacccatatcgctgcctgatgcgcgtggtgatggccatggcccacggctcgtgtacgcgtcttccgtatggcgaatggatgataatgcgccagtcgccctcttcgtccctgcaacgttcgatgaccagttcacggtcattcgggattatgccggtgatggcacgttgctcttcgagcaggtcggccagattcccgatggcgttgtcatcgagtccgtcacggcgcagtcgcgcgatgatcctcgcatcgaagcgtgattcgacatcgacaccgtcaacgttcgcatgcctgaagttttcagccgtccgcgcgcgtagtccttgggagatctcacggaggaaccggccttgggcgagaccgaagccatagtcccgcccatcaccttcgccatgccagaacggtagccgcgcggtacgcccgggagcaggaaccaccaccacacgatcacgcgtgatctcctgaatctgccatgtgaaggtacccaaggtgatcacgtcgccttcgcgtgactcatagaccatctcttcgtcaagctcgcctaccctccgcgggccgggaccgcagtccgtttcgggaagcaccacggtgtacatgcctcggtcggggatggttccgccactggtcacggccaggcgttgcgccccgggacgtgcggagatgagtccggattcctcgttgcactgcagtggtgggcggaatacggaaaagtcctcgctatcataggcaccggtcatcatgcccatcaccgcatcgaagatcgaccgatccagatccgtgaaggaggccgccttgcgcacccgcccataccactcgtcaggatcaagatcgtccatggccgccgcggccacggtctgttgggcaaggacatccaacggattgatcggaatcgtcaacggttcgatatcacctgcccgcatactttcgatacaggcggccgtaccgatgatctgttcgcgcgtgatcgggtagaacaacgcatgcgacactcccccgacttgatgatcggcgcgtcctacccgctgcaatcccgaagagatcgacaacggcggtgcgatctgaatcactaggtccaccgaccccatatcaatgccgagttcaaggctggaagtggccaccacgcatcgcagttggcctcgtttgagccgctcctcgatttgcttgcgcctgtctttcgacacggatccatgatgggccatggcgatcgcatcaccatctgcatgggacccgaccagcatggtggtcgatccaatcacggaatcgtagtgcccggcgaatccttcacgtccttccggtgaaccaacgtcgtgaggctcggaacggcacatgccggcatgcatgtcgttgaggcgtgcggtgagcttttccgccagccctcgggagttgacgaatacgagtgtggtgcgatgcttcagtatttcgtcgagaacgctgcgttctatggccggccataccgaaccgcctaccagtcctggcgaagcgggactcccggtcgtcgcttttcgaatgatgcccttgcgttcggcaagcgattccatggccggagtcactccggaaatacgcggagtacggggattcggagaatccacaccgccagcccgacgcctggcttcggaggatttgggaccatgcacatactctagaggttccacgaccttcaaatccattgcggggcgcgttccggaattgatgatccgcaccgcttgcgcgccaccaaggaatcgcgcggcctcctcgggtggattcacggttgcggacagaccgatacgttgcaccggatgaccgacgaggccatccaaccgttccagactcaaggcaaggtgcgcgccacgtttggagcctgcgacggcatgcacctcatcgacgatcaccgtctccacggtcgaaaggatgcgccgggccttggatgtgagcatcaggaacaacgattccggagtggtgacgagaatatccggcggatggttgacgatggcgcgccgctccttcggtgcggtgtcgccgctgcgtatgcagacccggactttcggcgcgggcaatcccgaggccttgcactgatcggctatgccgcacaacggcgtttcaagattcttcgccacatcgacgcccaaggccttcaaaggcgagatgtacaacaccctgacgccgcgcttgggctttcccgacgtgtttccaccatcaccgacggtacctgcggcagactcccccatcagcccgtcaattgccgaaaggaacgcgcacagggtcttaccggagccggtgggcgcagtcaccagcacgttcctaccggagcgaatggccggccatgcctgcctttgcgtgtcagtcgggcatttgaacgcatgctcgaaccatgccttggtaggctccgaaaacaggttcagacattcgtacatacgttcgattatgacatcggtcacagacgtcagcccttatcgtcgtcgacccactcaagcacatcgccgggctgacaacccagcgtctggcagatggcgtcaagcgtggagaatcgaatcgccttggcccgtccgttcttcaacaccgaaacgttgaccggcgtgatgcctatcgcctcggccaactcgttgacgctcatcttgcgtctggcaagcatcacatcgaggttcacacgaatcgccatatcaaatcaccgccgccaactcatcacgctgttcgatggcctgcatcagcaatgagcgcattaccagcatcagcagctcgaacgcggcaatcagcagcaaggaaaccagacctgcgcccaatatggcgaatcgcaccagatcccgttcgacgcccaatatatcggccaacaacatcgaaggcgacatccagatctgagacagcatcagcaggaccaccaatacggcctcggctccggcgcacgcaagaataccgttcgtccaatgcaccgcctcgccggaaaacacatcgcgccgcctggcgagggtcaacaatcgccacaacggaatcagcgcgatctcgaagcaggcgaccatcagcgcaccatcgatcacgtacagccaatgcaacgcatcggcatgggggtgcgcggccgcgacgccgcccgcaaccacgaacagacctatctgcaatcccaaacaacacacggcgaacagtatgatcagcacacgcaacgcaccaatcaccccgcaacggcataccaaacgatccgacatgacagatctcccatcctatttttgaatatcgataataatctatcgaaactcgatatgcaaatcttgtgaaagtaagtacatcgatatattcctatcgtttttcgatagcttacgatggcgccatacacactacgtaccatcaccgaaaggctccgcatgacggcatttcaatcccaggcacaaccggtggccaatcccctacctgccgcatccggcccgcagaacgtcaagccggaggtggattccacaaccaggcggcgggagatggcgagccgaccgatcacccaacgcaccattgtcaccatctgcgtggcgctggcaatcacattcgccttcgaccggctggtctgcgacatcaccccaacatggctgtccggctacgcggtgccgctgttctgggtgatatgcaccacggcgctcaccgcgctgcactggcggaccgcccgcaagcgtccgctcgtctggctggtctcaggaagcatcatcgccatcggtatatgggaagtgctgttctcgtccgtatggtcatattcgaacaatctggaatacgcgttgaccacggcattggcccagcccgccctgctgatgctgcattgccaactggtcaacggccaatatgacgtgcggcacccgttccaagtcgcgtggagctggatcaccggctggttcatacagccattcgtgaagctgaaaggtttcttcgagccatgtgcaatcctgttcgcccgattcgccaccgcatcgggaaagcgctcgaaagcccgcgaaatcggcatggccctgcttgtttcgattcccgtgctgttggcgatcgtcccgctgctggcggacgccgaccttgtgttccgatatgagctggcgaacgttttcgggcacatcgacccgacggatttcatccttcatgcgaccatcgttcttctgccatggccgttcctgtgctcgctgctcatcggacttgatggcaagcccgcatcgccactcccggaacgccgcatcacattgggcacgacaacgaccatcgtggtattgctgatgacactactcgtatacgcgttgttctgcgtggtgcaattccgctttctgtttgcgggattgttcatgaacggctctatcgcattgcctgacggactgacctacagcgactacgcgcgcagcggcttcttccagctgctgacggtcacggcgatcaatctgaccatcttcgcagttgcgctcaccttcacgccgtgcacacgctcactgacggtctcgctgatcgcgttgatgacggagaccgccatcatgctcgtttctgcggcgttgcgcctcggcctgtatattgacgcatacgggttgacatggctgcgctatgtctcgatgacgttcatcgcactactggcagtcgcgatcctgctgtgcctggtccgactgaaagtgcagcgccttccgttgatcgcaacgctcgtcgcgctgttcatcgtctggtatgtggcgcttggcttcagcaatccctactggatatgcgaaacctacaacgcattccacggctttggtacagtcgcatcgattcagccgattcgttgaccgccgcacttcctgcgcagggattcatgcatgacgatcatgagcacaaggaaaacgaccagataccacgggaacaaggtgatggtgacatgctgtgcgatcaggccgaacaccggcggcatgcacatcgacccgacataggcgcaggccatctgcatgccgacgatggcctgcgacttgtcttcgccgaaatacgtcggcgtggagtggatgacgcacggataaatcggcgcgcagccgagtccgacgaccatcagaccgacaatggtgccaagatgctgcggcaacggtagcaacatgaccacaacgccaagcaacacaaggacctgccccatgcgaatcatggtcggatcattgaatttcatggtgacgaaaccgctcagcaaacgaccaacggtgatgccgatgcagaacagactggcccacatggccgccgtggtcttgtcgatgcccttgccgagtgccatgtagctgctggcccatagcatggcggtctgttccagtgcgcaatagcagaagaacatgatgagaatctcgcgtgcgccgcggatggcaagcacccctcgaatgccaagtggttcgcgagatggctcctgggcaagcccttcggcggcgaattgctcagtgatgtctgccgaaggttccgtctcaatgctttgcggttgcggaacccgttgcttccataacggcaggctgaaaatcaatatggccgtcaagacgatctgcaggatggagatgtaacgatacccccatgaccagccttgtcccgcattcaacgcatatcccatgatgtatgggcccgtcagcgcaccaataccccacatggcgtgcaaccagctcatgtggtggctttcgtaatggatggccacgtaattgttgagggccgcatccacgccgccggcaccgaggccatatggaacggcgaacaggatcagcacccaatagctcggggccatggagaatccaaacagggccagtgcggtcaatgccaccgatatggcggtgaccttgccggcgccgaatcgcagggtcatacgatccgacatcaatgcggagacgatggtacctgccgaaatgaccatggaaatgccgcccgcccatgatacgggagcgcccagatcggtactcatggtgggccatgcggcaccaagtacggcatcgggcaggccaaggctgatgaaggccacgtagattacggcaagtaggagattgaccaatctcgtctcctttggcgacatacggttacgacaacgttttctcgactagtattctagacacatctatctaccgatcggtaaccagtggcttgcattatcgttcgggaaaatttcagtgtccaccggcatgcccgatgcggcggaaccggaccggacgacgatcaggtatcgatcttggaacggtcgaaatcatcggcgttctcgacgatgaacgccttgcgcggcggcacgtcatcgcccatgagcagactgaagatctcgttggcctgttcggcgtcctccatgcggatacggcgcagcatgcgcgtacgcggatccatggtggtgtcggcgagctggtcggcatccatctcacccaagcccttgtagcgctgaatgtcatcgttataggcgatatgttcgcgctcgagctcggaaagtttgccggccagctcgtcatcggaataggtatagatgtactcgcccttatgcgcgccggtcagggcgatgcgatgcaatggcggaacggcggcatacacgtgaccgtgctcgatgagtggacgcatgtagcggtagaacagcgtgagcagcagaatgcggatatgcgcgccatcgacatcggcatcagtcatcatgatgattttgttgtatcgtgcctgctcgatatcgaaactggccccggaacccgcgccgaccacctgaatgatggctgcgcattccttgttcgacagcatttgcgccagtgaggccttctgcacgttgagaatcttgcctcgaatcggcaacaacgcctggaaaccggagtttcgtgcggccttggcggtgcccaatgcggaatcgccctcgacgatgaacagttccgccacatcatcgttgcccggttggcaatcagacagtttcggcggcatggaagcggattcgagcgcattcttacggcgggtgacctctttggtcttacgcgcctgaatgcgggcgtgcatctcaccgacgatcttttcaagtacgcggccggattgctccttgtagccgcgcttggaaccggtgatcatctcgccgaactgcctgtcggtcatgcgggtgacgatcggtttgacctgcgcggtacccagcacatccttggtctgcccctggaactggggttcggcgatgcgtacggtcaccacggccacgaggccggccatgatgtcgtcgcgctcgaccttcatgttggaatccttgagattcaccttgagcttgcgcgcgttgtcttccacggccttgcgaatctgtttggtgatgccttgcaggaaaccatccacatgcataccgccgccgggagtttcgaccacgttcacgaagctgcgcatggtggtgtcgtaaccgttggtccaacgcatggcgatatcgacggcacagtcgcgggtgaccttctgcgcgtgcagttcgccgccttcgcctacggcttgggtctcctcgacataagtgtcgtcaccggtgatgcgccaaatgtcggagactgcctcacctttggagaggaagtcgacgaagtccttcaccccaccgttgtggcagaattcctcgacacgcgcgtgaccgtagcgctgtcgcgccggttgcgacagttgctccggttgctcatcaccggtagcgttctctgggctctcgacttcttcggcattgtctaccgctacctcatcgaagccttcgatcgccgatccgatattatccgtatcgtccacctcgtccgtagcgtccaccacggcatccgacgttccgtccgccggtgcgtcgatctcccgcatttcgtcgatggattcgtcaccggtttcgggaatattctcgtcaatgacggtgattttcagtcccggtaccagaaaactggtctggcgtacgcggtcgatgagctgctcataactgaattcggcggtgtcattgaagatttccggatcggcccaatatcggatacgggtaccggtggtcttcggactgaccttgccgatgatctccaactcggtcggacggttcttgcgcgtgcgtttgaacggcgaatcgggagacggatgctccggatccgcatcggcgtacacaccgggatgtccctggtggaacgacatgtgatgcgttttgccgtcacgatccacttcgacgtcaaatcgggagctcaaagcgttgaccaccgaagagcccacgccatgcaaaccgccggaagcgccataggaggaattgccgaacttcgcgccggcgtgaagcttggtgagcaccacttccacgccggtaagcttggttttcggttccacgtcgacgggaatgccgcggccgttgtcggcgacttcgacggaaccatcggaatgcaacgtcacgacaatatggttgcaggcaccggcaagggcctcatcgacggagttgtcgatgatctcccacagacagtgcatcagaccctggctgtcggtcgtgccgatgtacatgcccggacgcttgcgcaccgcgtccagaccttccagcacggttaggctgcctgcgccgtaattatccttggccatactcctcattccacggttgtgtcggttacacgagagaagtcgggaaatccacttctttcagggatttcccgacttcgtccatacgtttttccgttcgaatcactgatccaggaagtcgcgtagcgtctgcgaacgggacgggtggcgcagcttcgacatggtcttggactcgatctggcgaatacgttcacgggtcacgccgtacacacggccgatatcatccaacgtcttcggctggccgtcttccaagccgtaacgcatcttgataacgccggcttcacgcggagacagggtttcgagcacctgcttgaactgctcctgcagcaacgagaaggcgaccgcatcggacggtgcgatggcgtcggtatcctcaatcagatcgccgaactcggaatcgccatcctcacccagcggggtgtgcagcgaaatcggctcacgcccgtacttctgcacttcctgcaccttctcgacaggcatatcgagctcgcgcgccagttcatccggcgtaggctcacgacccagatcctgcagcatctgacgttgcacacgggacagcttgttgatgacctcgaccatatgcacgggcacacgtatggtgcgggcctgatcggccatggctcgggtgatggcctgacggatccaccacgtcgcataggtggagaacttgaagcccttcttccaatcgaacttctcgacggcacgaatcaggcccaggttgccttcctggatcagatcgaggaacaacatgccacggccggtgtaacgcttggcaagcgacaccaccagtcgaaggttggcctccagcagatgatccttggccttcttgccgtcattcgccgcccacttgagctcacgcctacgcttgaaatccatctgactggcctcggtgtccaacagatgctgggcatacaggccagcttcgatacgttcggacaggtcgacttcctgttccgcattcagcaggcttacgcgtccgatctgcttcaggtagtccttgaccggatcggcggtggcgccggcagcgattacacgacgcttcgggttgccggacggagtcagattgtcgtcgtcatcatcatctcgcacgacgaaagcgcccttttccttgggctcctcaggcttcttgcgttcctcgtcgtcctcatcctcgtcatcttcaggctcggattcctcatcctcgtcgagatcggcctcatcgtcttccgcgtcgacgtcgtcgagatcatcgtcgaaatcgtcgagatcggcctcatcgacctgatcctcttcgccatcaagggtatcttcgtcctcgatcggctcctcctgcctcttggcgggagctttcttcttcgcggtagtcttacgcggggtcttcgtggccggggccttcttgtccgcagctttcttggtggaggccttgcgcgagggggctttcttcgtggaggtggtcttatcggtcagatcagcctgttcagtgctcgccgtcgtttccttagtggccaaacttatcctcctgcatgatcctgccggaagcatataccacacgggcccacttctggcaagggcaaatcgtcaactatgtgagtaaaccatcttccaaggacgattattccccaatcggcgaagtcccccagcgccattcatccgactcacggtgtgtcgcctatggtttcaccgatccacgccggaccgacatgccgatgcacggccgagcagactatcgctgccagcgaacacccctcatcgatcgcgagggcgcgcatcgcgcacggcatggcgcgatcgtctcccagccaccacaggacgtaactggttaccgccagcggctgcacatgataggactccggcaccatcgcgatgatatcgagcaacatgccaatgccacggccacaacgcgccatatcgggatgcgcggcggcatcatggaacgatgcgctgagcaactcctccagacgacgcgcattgcgcggcagcatgggccgtgaagcgaagtcgagcagaaactcacgcgggcaacgttcctcatcgatgatgatcgagatcaacagggcatcacgaatggccagggtccggctcataccgaccgcgagcgcggccatgtccgcccgaccgagatcgcctccgcaccgtagcgtctccatccaatgatcgagtggctcccgcaaatacatgcgaatggcgtcacacataccctgctccctgcaatgttcacgaagtattcgacccgtggcgtccagttcccgttcggaaaatggcatggggcgttcgccgtcgcccgtttgtgatgtccgcggctcctgcacgcgcgaacatgggccacgttcctgcccatacccgcacttcctgccatcgttgccatcgttcacaccgtccatgtcatgaacctcctcggtcgttctcggttttcgggtcctaacaggcccttggaaggcactatgccgtatcgcacggcttcatccgttctttttccgcccctgtggtcggaggatgcgcccctcggcgtttcgtaacggtttttttccgtggcaggcgttgcgaatattgagattcgctcttgtcgaaaggctgtggataactgaaggtatgagtagctccacggatttggaacagatcgagtcccgcattgtcgaattggtgaaggatttcgtcacgccgcatgccgacgatgcggtggcttcctcctgcaaagacgtcgccgatgcggtggcccgtcaggcggtcacgtccagcgaaggcggcaaaaggttgcgcgcgttgctgacgctggattccttccgcgcattcgccgccgatgccgctaaggaggccgatttcgacgcggtgttggatctggcctgcgcggttgaggtgttccagaccgctgccttggtgcacgacgacatcattgatgactccgatttgcgccgcggcaggccgtccgcgcatcgggcactggcttccggcacgcatagcgatgcgataggacgtggcttgggcatcatgttgggagacatgctcgcaacatccagcgtggatatcgccaaccgtgcggcacgtcgcctgtcacgttccgatgatgtggtcggcgcgtttctgaccatgcatcgcgaggtggagatcggacaggtgctggatcttgccgtggagttgaatccgctgaatgatcccgaggaactggtccgtgcctcattgaatgtgttccgttggaagaccgccagttataccaccatcgcccctttgaaattcggcatgctcgccgcaggattggatgcctccgccgctcgcgaccttgccatgtcgatcggtctgccgttgggtctggcgttccagcttgcggacgatttgctggacgtgatcggctcaagtctcaacaccggcaagcctgtcggcggagacattcgtgagggcaagcgtaccgtattgctggccgacgccctcagcggcgccgacgagccggaacgtgcggagcttatcggcatgtgggaagcgccatcccgctgcgaggaacaggtgagacgggccatcacgctgtttgcgtcaacaggagccatcgaacgttcccatggtcggattcgtaatctatggaacgcctcgaaaagcatcatcgacgcgttggacgtgccagatgaccgcaaggagttgctgatcagggcctgtgcgcggttcgtgccgaccgtcgtctaggagaggcggcggcaacactcccccatgttctcgttgcggaatccgcgaaagcctgcttgtagactgaggtgaggataccgcttgtcgagagattttcagaaggaaccatacggatcaaccatgagtgaagcttcacacgcacccgaagggcaagtcatcgaaggccgctatcgggtcgtcagcaaaatcgccgaaggcggcatggccacggtgtatcaggccatggacgagcgtctggagcgcaccgtcgccatcaagatcatgcacacccaattggcgcagggcccccatcgcgatcagttcgtacaacggttccaccgcgaggccaagtcggcggccgccatcgccaaccctcatatcgtacaggtgtatgataccggcgaattcaatggtctggactatctcgtcatggagtacgtgcatggcgtgaacctacggtacgaaatgaaccagcagagcacattcagcgtacgcgagacactacgcgtcgtgggcgaaacactggatggccttgcctcggcccaccgtgccggcgtggtgcatcgtgacatcaagccggagaatatcctgctcaacgatcgcgggcatgtgcagatcaccgatttcggtctggcgaaggccgcctcgcaggccacgttgtcttcgacggggatgctgcttggtacggcggcctatctggcaccggaaatgattgaaaacaatcaggccacccctcaaggcgatctgtattccgtaggcatcatggcatgggaaatgttgaccggagaggtgccgttcactgcggataatccggtgacgctcgtattcaagcatgtgcatgaggatgtaccgtccgtgtccacaaaatgtcccggcatcaatgcggatgtggccgcgttcatagcgcatatcgccgcccgatccgtcgatgcgcgccctgccgacgcctccgtggcgttgcaagagctgcaacgactgcagtccaaactgtcgattgaggattggcaatatcgtttgcccccttccaccgacgtgactggccccgatgatgccactgcgcccatggtttcgccgattcccgaaccaccagcacctccgacgaagaccaccgtcatgtcgccggacgccaccacgcaactgccaccatcactggcgttcctgcaggagaacgctccacggcggacacccgacgccacgcaggtaatcggaacaggtacgggcaacggcggtgccgcaccgtctttcaccgggcagcggacaccaagcgagaatggcgaggtcaaggagcaacgcaacaaatcgcatggaccgctcatcgcagccgcagtcgcggcgctgctggtaatcggcggaatcggcggcggttgggcatggtggtattaccgtggtcccggaagctactggaccatgccgacccccacgggaatccaatgcgcaaccggacagacatgccgcatcaccaatacttcatggagcgaatacgaacggctgctgaaggtcgccaacattccatactcgaccagcaaagcctatgacgacaccatcgccaaaggcaacatcatctccactgatccggcgaacgtgctcgaccatgtcagcaagaggaacggtcagaaggtgaaaatcgtgatttcccaaggagtgaagcaggcgaccgtgcccgccgatattctcgatgcgaccagtgcgaacggcaaagatccaatcaatgcgctaaaaaaggccggcttcgatgacatcgaacaaaccgccgcctccgacgacgattattcgatggacgtgccgcaaggcgcattgctgagcatcagcgtcgatccgggcgcgacgttgcctcataacacgaagatttcggttacgctctcacagggtccgaagcccgtgaccatgccggatatcgtcggcaagacgcaggatgaggcgcaacaggcactggatgagctcaagctcgctgcgaactggactgaacagttcgatgacaagattccccaagggcaagtgatttcagcttccgccaagtccggtgacgccctgcattggggagatgaggtggatgtggtcgtttcgaagggtccggaaacggtgaccctgccgaattatgtgggccaaaaggcatccgaagcaaaaagcgcgctggaaaagctgggcttcagcgtgaaaatcagttcgcagttgaccctggattccagccaggacaagaaagtggcctcacaggatccggtcggcggcactgaggttcgtttgcgccaggaggacggcacgccgaccaccgtcaccctgaaaatgtactcatccctgttctaagtcatcttccgggttcccgcaggcgggaacccggaaggaatcaggcctcttccttggctttgagttgctccttgatcttctgcgcgtactcatccacgtattcctgaccgctcatcttctggatctccatggtcacgcgatcggtcaaggaacgcagatcgtcatgagtgatctggtccgccggcttcttttcgacttcgatcggcttgccgtaaatcaccgcggtcttgcccttgcccggaatgacctggccgggcacctgcaactcacgtgaaccgatgatggccgtcgggatgatcggacagccggtctcatatgccaggcgtgcggcaccggtgtgccccttgtacagtcgtccatcggggctgcgtgtgccctcgatatggatgccgaacaggtgtccgtcctcgagaatctcacgggcatgattcaacgcgccgagcgacttggaaccgccggaacgatccaccgggaacacgccgacggaggtgaaccaccacttcttgaaccgacccttgatgcctttgccctcgaagtactcggccttacccatgaagtgaatcatgcgtgggctggtcaacggcagcagtgcgtcgtcgatgacggcaagatggttggccgcaatgatggcgccgccctcgtgcggaatatgctcaagccctttggcggtcggccccaagcgatggatggcgatcggtcccaggcctttcacgaaaaaccagtagagcattcttcacgatcctcccagcggattggcctccgcttgattagagttataggtatgactgacctcaacaatagcaatgccgacgaagaacacccaaacgccacgtcgaatgatggcgccgatgaccttgacgccgcctggaccgaattcacccaatcccacgccgacgatctgaaggccgtggagcagtcacgcaacgccaaacgcttcgagaagcatgcgcaacgccgcgagaaggaagcgttgctatcgatcaacgacctcgatcacggcacgttcaccgacgatatcccgcaaggccgtggacctcgtgatttcaccggctcaagctggcttgacacagataatgtcatggaccgttatggcgatgatttcgtgccgccgaacccgaagatcggtcacgtcaaaccatcgaagctggtgttctgggcattgctggtcatcggcgtggccggcatcatcctctcggtattcgtgccggcattggccgcgattctgggatcgatcttcggcgtgtgcgcgctggtcggcgccgcaggcctgattgcgcagcacaagggccatgcacagacgcgcactgacccctttgacgatggtgcacgcgtataggtacatacagttagtggctgttggttgcgagtaacgggtcattactcgcaaccagcagccactaaccggccatcttcaggcttccaactgcgaataacgggctactactcgcaaccaaggacctcaaagaggcaattttaaggctcttgattgcgagcattcccggcgtactggcaggttcaggccttcattgcctgagcggcggtaatccacttgtcgagcagggccgtggcattgccggaatcgaccgtctcctcggcgatggcgtaagccaccttgaagcgttcggtcagattggcgtcagccggcaccagatgaccgtcggccacgatggcggatgccgcgttcaacagtgcggtggtgcggaacggcacatccttaccggcgaagaagtcgcaggcgagctgggcgttcagtgccggctcaccgcccttgagatcctcgacggtcaccttggcgagaccgagttccacggtcgggtcgaattcggtctcggtaacctcgccatccttgaattcccaaacggataccggaccggtcggagccatctcgtcaaggccttcgctggaggtgtagaccatgccggtttgcccgttggccgcatagacggcggccatgaccgggctcatcgcacgattggcacaaccgacggccatatgcttcggggacgccggattggtcagcgggccgagcacgttgaatacacagggcacccccagagcggcgcgcacggggcctacgaaacgcatggctggatggaaggtgcgtgcgaacgcgaatgcgatgccgcattcgttaccgacttcagcaacctgctcaggagtcaggtcaagcggcagccccaacgcttcgaaacagtcggcggtgccgcacttcgaggaggcggcacggttaccatgcttgacgaccttcacaccggaggccgcagccaccacggcgcccatggaggacagattcacggtggcggctccgtcaccgccggtaccgacgatatcggtggtttcgccgtcaatgttcagtgggatggcatggtcgaccatggccttggccgcaccgcgcacctcgtccgtggtcaggcccagttgctgctgggtggcgagtaccgcacccactgcggccggatcggcgttgccattcatcaggtcatcaacgaaccactcggactcctccgcgcttaagtggtcccctccgaccagcttggtgaggatcgacttccatgtgatttcggccatgatgccctccttggcgtttcggcgcgccagcgatgtatacgtaacgccgccaattctatcgattccagatttccacaccacccctcgtccatatcacgaacaaggcaagagctcccacgggtgcgagtgccagacgtaaagctgacgactcataccaatgggagctccgttaggtcagcgagacctgtctatccaaggcattgtggtgcccgtttgagatgcgccttccgtcactgctcgttctggccgtggcacatcttgtacttgcgaccggaaccgcacgggcactggacgttcttaccggttcccgggaaggtacggccatcggcccatggtgagcgcaattcctcactcttcggacgcttgttggccggaaccttgccttcggcgtggctaatcggctgcatgccgacgatgcccggctcggccttatgctcttcagcaagctcgtcaatggcggccttttcggcttcgtcatcggtctccggctcagcgggagcgaactgtccggtgggctctgcctcgccttcaagccccatcacggcttcggctgcgttcacggcctcgtcttcatcggattcggtttcagtgtcctcggtgacggccacacgttcgatatccacgtggaacagcagctggatggattcctccttgatggcctcgatcatggagttgtacatctggtagccttcgcgctggtattcgaccagcgggtcgcgctggcccatgccacgcagaccgatgccgtccttgaggtagtccatctcgtaaaggtgctcacgccacttgcggtcgagcacggcaagcaccacacgacgttcgagttggcgcaggccctcttcgccgagcttctcttcgaagtcgagatactggtccttggcgtcggcgacgatgaggtccttgactgcctcgacggccttgtctcccttgagcttggagacggcatccttcgcggcgtcctggtccaccgcaatcggatatacggaggcgagtgccttgaacaggccttcccaatcccagtccttcggcttatcggagcccttgttggcgcccttgatgtaactcgtcacggtatcttcaatgaaacgcaggatatcgtcatggatatcctcgcccttgagcaccgcctgacgttcggcgtagatcacggtacgctgtttgttcatcacgtcgtcgtacttcagcacgttcttacggatttcgaagttgcgtgattccacggccttctgcgcggtacgcacacccttggacacgctcttagcctcgatcggctcgccttccggcatacccttggccatgacgcgagccacgagctgggtgttgaacaggcgcatcagatcgtcttcgagcgacagatagaagcgggattcgcccggatcgccctgacggccggaacggccacgcagctgattgtcgattcggcgggattcgtgacgttcggtgcccagtacgtacaggccaccgaggtcgacgacctcctcatgctcgtccttgacctgctccttgatttcagccaaggtgcccggccaacgcttctcgtattcgtccggagtgtcgtccggcgagtagccctcggacttgagcttggcgtcggcaaggaattcgacattgccgccgagcatgatgtcggtaccacggccggccatgttggtggccacggtgacggcgcccttacggcctgcgacggccacgacggcggcttccttgtcgtgctgcttcgcattcaggacctgatgcggaatcttggccacgtcaagcagtgaggagacgatttcggaggattccacggaagcggtgcccagcaggaccggctggcccttcttgtgacgcttggcgacatcacgcacgatggcggcgagcttttccttcttggtgcggaaaatcagatcgtcctgatcctcgcggatcatcggcttgttggtcggaatcggaagtacgccgagcttgtaggtgcccatgaattcggcggcctcggtctctgcggtaccggtcatgcccgacagtttgtcgtacatgcggaagtagttctgcagggtgatggtggcgaaggtctggttttcggccttgacctccacgccttccttggcctcgatggcctgatgcaggccttcgttgtagcgacgtcccggcaggatacgaccggtgtgctcgtcgacgatgagcacctcgcctccggtcacgacgtagtcgcggtcacgcaggaacagctccttggccttgatggcgttgttcagatagccgatcagggcggtgttgttcggctcgtacagattgtcgatgccaagatagtcctcgaccttggtgatgcccggatcgagaatgccgacgaccttcttcttctcatcgacatcgtagtcctcgtcgcgggtgagcttcgggaccaggcgcgcgaactggcggtaccaacgagtcacgtcgccttcggcaggtccggagataatcaacggggtacgggcttcgtcgatgaggatggagtcgacctcgtcgacgatggcgaagtgatgtccgcgctgcaccaggtcggatttttcccaggacatgttgtcgcgaaggtaatcgaagccgaattcgttgttggtgccataggtgatgtcggcgttgtactgcttgcgacgctccggcggcttctgatcggtgatgatgcaaccggtgctcatgccgaggaatcgatagacacgacccatcagctcggcctgatagctggccagatagtcgttgacggtgacgacgtgaacgcccttgccttccaacgcgttcagatatgccggcaatgtggcgacaagggtcttgccttcaccggtcttcatttcggcgatattgccccagtgcagggcggcgccgcccatcagctgcacatcgaagtggcgcagtccgagcgtacgcttggacgcctcacgaacggtagcgaaggcttccggcatgatcttatcgagggattcgccgttgtcgatgcgttccttgaacttggcggtctggcctttgagctcctcgtcattgagggccgcaatctcgtcttccagcgcattggtcgccttggcgacgttctcaagtttcttgatctgtcggccttcgcccatacgcagggctttgtcaacgatatctaccacaatcactcccttggtgtatgcgtgtttccttaggcgagattagtcttgccgcaccgttttcggaaaaacatcgtccattttacggtatttttccgcgtgttgcgttccggcatgcaaaaaagggatccgcacgataagtgcgaatcccttcaatgatcggtttcggcgattgccgtcaccgaatgccgaaaatcacttcttgacattctccggagtatcgatctcgaagacgccgtagctccagccgtgacggtgatagacgacggacggacgacctgtctccttgtttacgaacaggaagaagtcatgcccgatcagttccatctcgtacagcgcctcgtcgatggtcattggctcggcgacatgcagcttgcgacggatgacgatgggagtatcgccaacctggacttcaacggattcaccagggccgagatccgtagccacggcatcggccgggctgttgttcggttcctcgaccggctccacagtcggttccggctcaaccacgcccatgtcgaccgggaccgggttggtgtagccacggcgatgatccttgcggcgatcgcgggtgcggcgcaggcgcagggtcagcttgtcaagagccatatccagtgcgctgaattcgtcggcgctggaagcttcggcacgcactacggtacggcccgcgatgacggtgatttccacgcgcttggcggtgtcggcctgacgcggattgccctcatgcgacagtacgatctgcacgcgctgcgcatccggagcgatagcggtcacacgattcatcttgctttcgacaacgtcacggaacctttgcttgatctgcgtatgacgtccggtaacgacgatttccatgtggacctccctagactcaagcggtgttacccgctatatgtggaccaaacggctgctccgccgcttgggtagttttattgtagccgcaatcgtacggatttcacggaataccactacaagaaaaccgatatttttctgatttcctttttcgtcatacctattgctatcatggtgcgtttgagacctcttgatgaccgcgatcatgaagatgattgaggaacttccgggctccacagagcacgatggcggataacgtccgcccagggcgacctgagagatagcgcaacagagaacagaccgccggtctttggaccggtaagggtgaaacggtggcgtaagagaccaccgggccgctggcaacagtcggtcgcatggcaagcctcatcgggagcaaggccaagcagaaggcgtttgagggctgctcgcccaatgccttcgggtaggctgctagagcctgacggcaacgtcaggtcgagatggatggtcatccgtgccttacggcacgacagaacccggggtataagaggtctcaatccctttcttccacgaacagttcctgtgcaatttcccgcaggatttcggggttatgccccttgcgccccccggcactccacaggcggcgccttcgcacttcaagatccatcccggcggtcttacgtgcggtacgacggcccaactcccatgcggcatcatcgaatacgcctcgcgaatcggcttcggcgcatactcgttgcgccaacacacgatcgacgcctttgcgggtcagttccgtcaccgctcccctgcgccccataagacgggcggcgcaatagcgcaccgcggactgtgcataggcctcatcatcgataagccgcactcgagtcagccgttcgatgacatcatcaaccacatcgggcaaatagcccttgcccaaaagtcgttcccgcagagcccctgatgatcgaggagccgcatccagcaggcgcaacgcggcctcacgacacgcatcaaagtcagacgggtctcgcggcgtgtctgacctttgtccatcgacatgccgacgcgacacgcgcatggccgcgcgtcggcgttccaccggcgagtcgcgccgattccaggaacgcccatattcgtcagcgtgcggctcccgatgcgaagagggatcctcacacacgacctgagtcggccgaagatcccgttctctcagaaatgattcagcgctgatcatgcatcaggccttggtcgatgccggtttggcgccctttgccgtcttcgactcgcctttgccgctttcgcttgccgcagtctcattcccatcgccgtcttcagcgaactgatcagtcggttcaatcagtccaaacgcagccttcacccgattttcgatttcttcggtgaccccaggattgtccttaaggaactgacgtacgttttcacggccctgaccaagctggtcaccatcgtaggtgaaccaggagccggattttttgacgacattgacttgcaaggccatgtcgagcacggaaccttccttggagataccctcgccgtagagcacgtcgaattcagcggacttgaacggcggagccatcttgttcttcacgaccttgaccctagtgcggttgcccacggcctcgtcaccgttcttgatggtctgtatgcggcggatatccatgcgtaccgaagcatagaacttcagcgccttgccaccggtggtggtctccggattgccgaagaacacaccgatcttctcgcgcaactggttgatgaagattgccgtggtgccggcctgggccagcgcaccggtcatcttgcgcaaggcctggctcatgagccttgcctgcagaccgacatggctgtcgcccatttcaccttcgatttcggccttcggcaccaacgcggccacggaatcgatgacgatgacgtcaagtgcgccggaacgaatcagcatatcggcgatttccaacgcctgctcaccattgtcgggctgggacacgatcagcgaatcggtatcgacacccagcttgcgggcatacaccggatcgagtgcatgctcggcatcgatgaacgcagcgacgccgcccttcttctgcgcattggccacgacatgcaacgcgagcgtggtcttgccggaggattccgggccgtaaatctcgacaatgcgacccttcggcagacctccgatgcccaatgccatatcaagagccaacgaaccggtcggaatgacctcgacgtcctgctccgggcggtcccccagacgcatggccgatcccttaccgaagtttttctcgacctgtgccaacgccgtttccagcgcggcctggcgacgggggtcaatgccgttggcggcttggttctgcacggcgcctttcgtcgctgcattcgtctgtgccatggctactccttcttccaagaacaatggcgaatctttccattcaccgtaaagtccgacggttctttcatgcaagcccgaacgaccatggtggtcgaaggacgcatattccgacacgccggtaggccgcaaagcattggcatgacacggtttctaccgtatccccgcccaatgccccagccgggccttgtcgaacatctgtggataactataccccatcgtacgaacatctgttcgaatcgtcgtttccgaacgtcacactcaacgaacgggcatgggaggcgcattgtgatccctgccccaacgtttggaatcggggacgttcatctgatcacacagcacattccagattacgcgaggctcctcccccgcatccagtgcctcaaccaccgtcatgccatgcaattcggtcaggctctggtcatgggccagcgatcggccatagctccgcccgaacacctcttcaagcaactgccaaaattcgcgttcctgcacgcgcccaagtgtacacagtccggaccacatacgaaaaggcgcccggcatcaccgggcgcccaatatacggagattccctccacgccgcgggagggcaaagcctcctacgctcctacggagtcgagatagtcggcgaccatgcgcagcatctgcgcgctactcaggccgagcgactgcgcaatggaggtgagcagctccgagctggcctccttctgcccgcgctcgacctcggacaggtatccgagcgaaacgccggccttctcactgacctcccgtagcgtcttatggtcacgggtgcgcagatcgcgcaacacgtgcccgatcgcctcccgcagggagacctccttggtctcggcgacgatttccgccacatgaggcgcagcatgcatgcgcaccttgtcggcatcttcttcctgccacatgcgggtcaacgccgcttggcgttcatctttggctctcttggccgcacgggcacgaattacctgctgctgcgcgaacatcaccgcacgacgttgagccggagtgagctccctcatacgagcggtaccaggctgtgcggcggagaccatcttcttgagttccgcgcgttccttggtgagtgtcatcgcttccattgtcgcctgcccctttcgttgctttcaaacgtccattgtggataacacccatcatcggaaattattcctgtgaaatagctgaaagagagctcagattttgcaaaacacgttgcactacagtcattcttacctgttcccgcgtcccctgtaaccgcaactcaatcacttttgtacaccgacagcgaacattgccgaatccgtcaggcatggaaacaccgacgtatgcaaggcctgccggcttgtctccatccgggccgggaccagccacgccggtggtggacaatcccacgacgcagtcgccatcctccggttgtgcatacagatccgcagccgcctcggccatctgacgtgcgacctcaggatgcaccgccccctcacgagcgagcaaatcggcatcgacgcccagtatcgacgatttggcacgaatgtcgtacgtcaccacggaaccgagaaacaccttcgaagcgccgggaatgcgtacgaaggcatccgccagcaatcctccggtcagcgattcggcggcggcaatcttgaaatggcgctcctcgcaatatgcaagaacggccgcggccagctcatcgcaccgtgcgtgctggcccgcgaccgtcatcggttctgcagtcatagccgttacttggattccttcttgcgcccgccgaaggtgttcaccagatattcgccgccggaatacaggcacaggatgagcgccagatagatcagcgcataggtgatggtgtagtagatggtcatccacagcggagtcggctgcaggctgtcgccggccagtttccacatcggcagcatgagcatggccaggccgatgcattgcgccagtgtcttgtacttgccggcttgggaggccgcgatcaccttgccgccggtgtcgatgacgaagaagcgcatgacggtgatgccgatctcgcgaatgaggaacagggccgtaaccacccaaccgagaatctgattgccgaattcattgaacgccgccgccacgatcagcgtgccgcaggtgagcagcttgtcggcgatcggatccatgagcttgcccagttcggtgacctggttgtacttgcgtgccatccagccgtcgagtttatcggtgcacgcggcgatgatgaagatgacggccgccgcccagcgcatggcgacgttatcgaccccccatgcgccggccttgacataaagcaccagaaacacgattacgaggatgattcgggagaaggtgacgaggttcggtggcgcgttccaaccatcgagcagcgacgatttacgtttgtcttgcttttccataccgttcacgttacctcgagacttctaccttgtgactattgcatgccgtcggagccgtcctgctgcggcgcgcccgacgtaagggatgaggtctcccccctgatgaaggcaagcacggaaggcaggtcctgcggttgcaccaacacctctcgcgccttggagccttcggaaggaccgaccactccacgagactcgagcagatccataagcctgccggccttggcgaagccgacacgcagtttgcgctgcagcatggaggtggagccgaactgcgtggtgaccacaagttccgcggcctgcaggagcacatccatgtcaccgccgatgtcctcgtccggttcgatggccttcttctcggcctccttggccatctcttcgatgtcttcgcgataatgcggcttgcgctgggtgcgcacgaattccacggccctacggatttcggattcatcgacccatgcgccctgcacgcgcagcggcttggcctgccccatcggcaggaagagtgcatcgccctgtccgatcagcgtctccgcaccggtggaatcgagaatgactcgcgaatcggtggcggatgaggtggcgaaggccaatcgtgacgggatattcgccttgatcagaccggtgaccacgtcgacggacggacgctgggtggcgagcaccagatgcacgcctgcggctcgcgccagctgggtgatgcgctgaatggagctttccacgtcgttcttggcgaccatcatgagatcggccatctcgtcgacgaccacaagaatatacgggtatggagccaccttgcgtttggagcctgcgggcgcatgcaccttgccggcacgaacggcggcattgaagtccttgatgtgacggaagccgaagaattcaaggtcgctgtatcgggcatccatctccttgaccacccattcgagcgcctgagcggccttcttcggatcggtgatgataggtgtaagcaggtgcgggatgccggcatacgccgacaactccacacgcttggggtcaaccatgatcatacgcacctgatcgggagtggagcgcatgatcacggaagtgagcatggagttgatgaaactcgactttccggagcctgtggcaccggctaccagcaggtgcggcatcttggtcagatcggccgtcacgaagtggccttccacatccttgccgacaccggtaagcatcgggttcggatcgttcatggccttgtcggagcgcagcacgtcgccaagcaccacggtttcgcggtcggtgttcggaatttcgatgccgatggccgacttgccttcgatcacggacaggatgcgcacatcggagctggccaccgcataggcgatgttcttctgcaggttggtgaccttctcgactttgacgcccggaccgagctccacctcgtacatggtcacggacggacctcgcaggaagccgatgaccttggcatccacgccgaactgctggaaggtgccggtcagggcgcgaatcacacggtcattctccggcgtgtgcacggcatgcggcacgcctttcttgagcatgccgaggtcgggaagatgatacggggcgtccggaacgtcaggctccggcccatcgtcgccatgcgagccatccatgtcgtccacgatctcgccggtcgcggcgtcgaccatcacggcatcgccattggccgtcccgtcttcgtcgatggtggcccacggatcgtcggcaacggcaccgacctgcttgacctcgcccgctggagtggcggcggtcggcatggtgccgcttgccgtgccgatgggttcggatgagagggagcgacccgcagacggttgcgccatggccgtggtattgccggggaaatcatcggcggacggagccgcggagccatccatcgatgagatggtgcgcgcaccgccgaccggctgatacggccggtacggatcctgcaccatggtctcggccgtctcgccgtggctggaggccgcattgaggaaggcctcatcgccggcatagtggtcaagtttgccttgttcgtccttgcctcgcctgcgcaaggagaaccactgcgacattctggagaacagtccacgcgtcgcctgatcgtcatcgccggcgtcggtgccgtcgtgggatggcacgccttcggcgaacgcaagcgtggtgtcgcctacacggacctcgttcgggaactgttcggcttcgtcgtccgcatgcgtcttgcctgagccgacgccgaatctgtcgcccatcatacgcaggccgtcgggaatatcggtcacccgggtatgggtgatcagcagcagcgagaagaggatcaccaccacgaagatgatgatggcgaatgccttggaaagaccccaggccaaaggacatcccaatacgtagccaagcaggccgcccgaccgttgcagcagcgccatgtcgaaagccggcgaatccgaagccatggccgcatcgagaatcgaacatatcgaccataggatcatgagccagcccaacgccatgcgagcattctcgctacggcgttcggttttgcgcatgagactgaacaccacaagggccaagaacacgggcagtaccacgctcatcaggccaagagcgccggatgccaacgcgtgcagggcacgtccgaacacgccttgtacacggaaccattcggaagcgcagaagagcacggcgagaatcaccatgacgaagcaggcgatgtcgcgccggtatgcggtgaggatacctgtcgtggaggaccgctcgggatccatgaccttggtatcacctgagcgtgccttgcccggggagcctttgccgcctgtttgtccgttggaagatgctgttcgtgccataacggtcctgattttacccattggcacgcccatgtcatgccgtcgctcccgattcgaacacaatctctaactcaaccgaacgtcgtatttcagtaaaaacaacattgttaagtacctttaagcggatttctcccgaaatcactgaaatcgactgaaacactcccactgttacttaagcggttcagtcgctagcgtgggcaatacacgttctatctcgacgcagagtacgtgttcacacgatcaaggaagacaacgaaggaacatgggaacagtaacgaaaagattgctggcaacggccgcggcggcctctaccatcctcggtatgagcacccttccagccattgcggcagaagacaatccgacctcttcgaacaacacggtgaacatcagtgacgtcaatgccacggacgaaacgagatccttgttcgccaagcttcgcgacagcaaggcaggcgacctgcggttcggccaacagcacgcaaccgatgaacatatcagctcaaccgcttcagaaggtgacgtctacgagatgaccggcaaatacccggccgtattcggctgggacgctgggctcgcgctgcgaggtgcggagaaaccaggctccggcagcgacaagcaggccaatgccaaggcactggcccagaacattgtcgacgcagatgccaagggcgccatcgtgacgctatccgcacactggtacaatccgggcaccggcggcgatttcaacgacaccaccgccgtcgcatccgaactgttgccgggaggcaagtattccggcaccttcaatgaggagcttgatgccatcgcggccaccgcacaacaggccaagcgcagcgacggcacgatgatcccgatcatcttccgcccactgcacgaaaacaacgggggctggttctggtggggatcgacgcacgcatccgccaacgagtacaaggaactgtatcgctacatcgtcgattatctgcgtgacgtcaagggcgtgcacaacctgctctacgcctactcccccggcggcgtattcaacggcgactccaccgactacctcgccacctatccgggtgaccagtgggtggacgtgctcggctacgacgaatacgacaccgataattcctccgacgattcgaacgactggatcaacacggtgatcaaggacctcaagatgatcggagacgaagcgaccagccgcggcaagatcgtcgccttcaccgagttcgggcgttcgggagagcgcaagttcaacgaatccggaaccggagacaaggacaccaagttcttctccgaactcgccgatgccatcgccaaggaggtcccgaacatcgcctatatgatgacctgggcgaatttcggcggctccggcgaaggattccagtcgtacaccccatggaagggatccgatggggaacaggacttcaaagacttcgccgacagcaacgcgaacctcatggcatccaaagataacgtcgattattcgagcgctccggcggccacggagcagaccggcaccgcacgcatcgtgacccctgtgggaggcaatcgcgtaaccgacacgaaactcaccatccgtgtcaaaaccgaagggctgcagtactcccgtctcgacaccgaatccgccaccgtgaccaccgaccgtgggcagaacgtgaagctcacatactcctgcaacggctatttcatcggcacactggaccttgaagcggcaggcatcaagctcgatcagtccaaactcaccttgaccgcacatgtcagcaccaaggacggcagggagcttgcggccgccgacggcgacggtacggtaagcgtgaagctcggcgccaagccggaacagaccgtggacgatgtggaaagcttcgattcctacgattccgatgccgaattgcagacggtctactcgcccaatcacagcacgaaggccaatctcacgctcaccgacagtccgaaggacgacggcaccaaagccggcaaccttcattatgatttcgtaagctaccccgactacaacggtttccagcgctcatacacgcccaagcaggattggtccggcttttccaagctgaacatgtatctcaaggcggatggctccgaccacaagttcgtggtgcagatcaacgccggcggcgtgaccttcgaagcctatccgaaaatcgacggcaaggacgggcacgaagtgtcgctgaacttcggcgacgccgacggcaatggcggcgatttcgcaccggcttcctgggataccgcccatgccggaacgaagctctcacaacagctgctctccgaagtcagctccttcgccttatacgtcaacgacaatggcggcgaccgaccgaaatccggcgatctggtgctcgactccatcacccttaacggcaaacacgacgcctacgtgccgcaacagacaccgtccacgccgagcgacgccgaaccgcagatcgtcgatgatttctccgaatatgcggatgacgaagccctcagaagcgcgtgggacagtcgcaatcataccgaagtattgtcgttgactgacggtccgaccaacggttccaaggcgctgcgtttcaagtacggtttcggcaacggcggctggtatgacgtggcgcaatacttgggcggcaagaactggtccggcgaaggcatgctgaagttgcaggttcgcggcgacggctccggcaacgccatcggactgcagatcggcaccatggatggcaaatatttccattacgacatcaagctcgatttcgaaggctggaagcagctcgagattccgctggtcggcaatggcgaattgacccagacgtggcccgacgacaccaataagggcaaatccatgaccgatgccgatctgacctccatcaaggaaatggtgttcgcatccaacaagtggaatgccgaaagcaccggcatcgacttcgccatcgccgatatccaggtggtcccggccaccggctcccccaccgacgccgatgctccgaaggacgacgccagcgaaggcacgaagcaggacgatgccaaggatgacgtcaaggacacctccgccgacgtcgccaatcaggatccggcgagctgcccgatcaccgacgactcatccaacaccgcagatagcggcaacggcacttcgaccaacccctccacgcagtccggcacgcagacgtccgatgcggcgaaatccgccgcgcagacgacgacggccaaaaccctgtcgaacacaggttccggcatcatccacgtcattgccgcgatgaccgtgttgctgctgctgggaggatgcgccgcatacatcgtccacaggtggaaggcacatgccggacaacggtagacccccgcaaagcaacatgacgacatgatccggtcaagccctccgtgatttccacggagggcttttgccatatctggcgtaagcgtcacacggttcgcgctatcatcgggaatatgactcccgcagaacgtgcgagcgcagtcgcatttgctctgaagaactgcgcactggaagcgatgacgccgggtcctgcgacgatgcaggccgcagccgattacgaacgcggctcaatcgatgtgttgcgcctgattgaaatcgccgacgatgagtccgattcgcgaatcagccgctatcgtctggcggacggcagcttggacgataccgcctccgatcatgcctcaagcctgttcgcaagaaacgtgctgctggcggaacgcggttggaaaacgaccggagacctgagtgagctgaccgccatccataacggactgttcacaggggtgttcgatgatgccggcaagctacgcacttcgaacaccacgcgcgaacgcagtgacgaccgggcccgtgccaaggatccggaagcgttcttccccgcctcgctcatcgagacgggtgcgatgaacatctccaccgaactggcggaacagcataatctgacttgcctggaccgcgacgagttcattcgaaaactcgccaaaatctatgacgagctcggctacctgcatccattcaaaggcggcaatgcgatggtgctgcgcatcttcgcttcgcgtcttgcgcatgatgccggctgggaccttgattggggcccggtgacgcgcgaaacatatcgcaaggccaagcatgacgcctaccaaggcaagatcatcgcgttcgaacgcatgttcgaggcgatggtacgcccggcgaatcagacacgtgtgttcctgatcgccggatgggaccaaggtcccgcacactgacaaccccgctcggaccgttctcagtcgatgtcaccgaggtgatgttgcgtgtaggcatcggcctgtgcgtcaatggcatcgtagtcgccggcgtccgcatgcccgatgatggccatcgcgttgtcaagcagggcgggattgagcgcctgtagccagtggatgcgcggatcccggccgaaccagcccatctgtttgcgggcaagccgttttgttttctgcgcgatgtccatgaacgtgtcgttcagatcacgcagaccgtccagatagtcgacgacctgctgatagccgagcgccttggcggcggtgatgccgagccgagggcgaatccgctccacctcctcgatgaatccgccttccagcatctgcttggtacggatgtcgatgcgacgatccaactcttcgcgtggcagatcaagaccgatctgcacggtgggaatcacatatcgatagtgtggcaggcttgccgaatacggacgaccggtcacttcgatcacttccagcgcacggatggtgcgacgcggattatgtggatccatgcgcgccgccgcctgcggatccttggccttgagctcgtcgaacagcgctccggcaccctccgtcctctcacgttcctccaacctgtcacgcacgttcggatcggtgccggggaacgaaatgtcgtcgattgcggcacgtgcgtacaggccggaaccgccgaccaggatcggacgaatgccctgcccctgcagttcggtgatcttctcgcgtgccaactcctggaagcgagccaccgacatggcgtcatccggatcgatgatgtcgatgagatgatgcctgacctgagcccgttcctcggcgctcgccttggcggtgccgatatccatgcccctatacatctggtaggcatcggcgttgacgatttcggccctttcgcctttggacgccagcgctttggcgatggcgatgccgagtcccgtcttgccggatgcggtaggccccacgatggagaccacacgtcgcgactgttcctcagtgacggacggcataggtctagcctgccttcggatcgggatcggcgatgagattatgccggcctgcaggggtgacggtggcggtgacgaaatctcccacctgcggcatcggctcaccttccggaatgccgacatgcacgagcactccggtcctttcgcgaccggtcacgcgatgggtggcggcatccttcctgccggacgcaccggtgaccatcacttcgacgtcacggccttcgaagatcttgagattctcttcggtaatgcgctcctgcagggcgacaagacgctcgaaacggttctggaccacatcatgcggcacctgttccatctcggcggccggcgtgccggggcgtggcgagtagatgaacgtgaatgcagacgagaatctcgcctcctcgaccacgcgcatggtctcctggaagtcctcctccgtctcgccggggaagccgacgatgatgtccgtggagatctgcgcgtccggcatggcctcgcgaatcttacgcagaatatccagaaacttcgcggaacggtaggagcggcgcatcgcgcgcagaatcctgtcggaaccggattgcaacgggaaatgcaactgatgcatgacattcggcgtttcggccatggcggcgatcacatcgtcagtgaaggctgccggatgcggcgacgtgaaacgcacacgctccaggccctcgatctcgccgcaggcgcgcaacagcttggaaaaggcgaaacgatcgccgatgccgtagccgaaggagttcacattttgcccgagcaacgtgatttccttggcaccttcatcgacgcattggcgaatctcggcgaggatgtcgcccggacgtcgatcatgttccttgccacgcgtggtcggcacgatgcagaacgtgcacgtgttattgcaccccacggagatggccacccagctcgatacccgagaggcgcgatcggtgggcagctggctcgggaaataattcagttcctcctccaccttgacctgcgcatgcccttggacgcgggcctggtcgagcagctgtggcagagagccgatgttcttcgtaccgaacacggcatcgacccatggggccttctcggcgatccgctcacgatcgagctgcgccatgcatccaccgacggcgatttgcaggttcgggcgttcgcgcttcatctcggcccacaggccgatggtgccgtacatgcgttcggcggcattctcgcgcaccgcacacgtattcatgacgatcaggtccacatcatgatccatatactgttcctcggtggccggaacatagccggcactctcaagtacgcccgcgatgcgttcggaatcatgcacgttcatctggcagccgagtgtatgcacgtagaacacgcccctaccccgcacgggggccgtgtcgacggtcggttcggccagtttcgaggcacgctccgcctcggtcatcatgtcttcattcataacgcaccatgctatcggcagggccgcccagagattgatgaacgaggcgacaatcatggcgattgcgtgaatacgaagcgcttcctcggtcttttcacagtgtcgttaggggcatcgtgggtacactgttgcccgtgatacttgacagacaaagccgcatcaacactgccgatctcaaagccagattgaagaatgtggacttcggcaagggggcattccctgccgatcagatcaccgaattcatcgatcagatgcaggtgtatgagggtgccatgtacgagatcagcaccaagctggaaatcctcgattcggagttccaggtacgcttctcgcatgatccgatccatcatatggaacgtcgtctgaagtccgtcaattccattctgggcaagctgaaaaggcgtgacctgccgcttaccgtcaatgccatcaaggacaacctgttcgatgtggccggcatccgcgtgatctgcaactatcgggacgacgtgtattccgtatccaactatctgtcggctcagaacgacattcaggtactgcgggtcaaggactacatcaggaatcccaagcagaacggctaccgttcgctgcatgtgatctatgcagtgccggtgttcctatcttcaggcccgcactacacaccggtcgaagtacagtttcgcaccatcgccatggactattgggcgagtctggaacatgcgctgcgctacaagacggatcttccggatgccaagctgtccgagcattcgcagacgttgctcgattgtgcgcgcagcctgcagaacatcgaaacgcagatgcagaacatccatcgcgacatcaacggcgcaccgcaggtcggcgaagccccgaagaccagctgatcatcatctgcgccgttccgcaccgagcaccgcatcatccgactgctcgcaccgccgcaaccgtggcaccctgaccggtatctgcgcaagcacggttcccgcgaaaatcagcgcacagccgacataggcacgcatcgtcatgacctcaccaagcagcagtgcaccgccgattacggaaaagaacgattcgagggacatgatcacggatgctcgcgtgggtggcaccaattgctgtccgaccacctgcagggtgtaggctatgccggcggatccgacgcccgcatagactatggcgaaccacgcatggcccgctcccgcccagtcgacggagccttcgacgaacgaacctacccagctcaacacggcggttgtggcgatttgaccgaacgagagcgcgatcacatccattttccggccgaacgtatcgattaccaggatgtgcgtggcgaacaacacggcggtaaataggagcaccacgtcggcgatggtgatgaagccaaagccatcggtgacgcacagcagatagaaaccgaccacggctatggccacactgatcacgacgctcagatggatgcgacgacgtagcaccacgaaggcaagcagcggcgtcatgacgatatacagtgcggtgatgaagccggaacgccccgccgaaccactgtagagcacgccatactgctgcaccgtgctggcagaaaagagcaccacgccgcagatgacgctgaccgccacggggctggcggtccatttcggcagatccatgaccttgccgtccccgagctcaagaaccggccgttcgcctgcatcatatgccgttcgagatccggccgtggccttgccgcgccgtctgaaccataacaacggcagcaacgaaagggcccccagcgtgaatcgcgtggcgttgaagaacaggggcgtcatggaagccataccctgcacctgcgacacgaacgcgaatccccaaatcatggccgtcaatatcaggcaggccatgcctccgatctctttgctcttcatgaggaacaaccgtaaagcaggccgtttaccaacaaaaaggcctgaccatattctggtcaggccaacaagcgacgcgaacgtcgttactcgatgtgcctcagttacggctgccgaacagacgcaggatgtacaggaacatgttcacgaagtcgagatagagattcaacgcgcacagaatcgagatcttcttgatcatgtccgggccttcgcccgcgtactgggcgaacagggcgcgggtggcctgggcgtcgtagacggtcatgccggcgaacagcaccagcccgatggcggagatgagcatcagggcggtgtcgcccggtgcgaagatcgccagcagcacttcggcgatgatgagcacgataaggcctgcaagcaggactggtcccgccttgagcatgttgaacttggtggtgcggccgagcatggtcagcgcgaagaagaacccagcgcacaaggccagtgaaatgccgatggtgccgaggtcatagacggcgaagatgatgctcagggtaaagcccatgagcgcggcgtacacatagaacatgacgcgcgccgaggaaggcgtcatcctggtgatgcgggcaccgagatagacggccagcacgatctgaacgatggccggtgcgaatacgccgaagatgccggtgtattggaggaacgtgatgtacaggccggtcatctgcgtgacgatggcgaccacggcggtgacgagcagaccaatggtcatctcgccgtaggcccgggtcacggaaacgcgctgtgcctcctcataggcataggccgcctgggtgttgatggccgcggtgccgttctgcgcgtagccgtactgctggtactgggactggccatactgcggctgctgggcattgtattggtactgatattgcggctgctggccgttgagattgttgttgggggtgttgccgccctggggctgttgaccgaatgtcataattgctccttacctcgattacgcataacagtacgggatttttctgactatttcatgaatatcccgtaccaatatgacggaatcggcacaaacccggacttattcatcaacgcacattgcgacgccggtttttgcgaatcccatgccgacacgccacggcttccccccttcatcacatacggaacaacgcccacatctagactggtaggaaacggtcccgacgggaaggtcagcatgtcaatcagcgccacggaaaagcctttgggcaaagtgttcacctccgactatcagttcaccatcccttccttccaacgcgcctacacatggcaggcggacaacgtctcgcagctggtgagcgacctgcaggacgcgtgcgcgaatccggacagcccctactttctgggctccctgattctcgtcaaggacggttcggccagataccaggtcatcgacggacaacagcgcctcatctcgctgtccatcatcatctccgtactgcgcgagttggaaaccgacccggaccttatcggcagtctcaacgagcttattctcgagccaggcgacaaactgcgcggcatcaaggcgcaaccgcgtctgaaactgcgcgaacgcgacaccgacttcttccgcatgtatgtgcaggaaggcgatttggagggattgttcgacctgcgcgacggcgacatcgaatccaacgcgcaacgcaacatcgccgtcaatacacgacaggtcttcgatgagctcgcgaagatggaagaccacgaccgacgccgtttcgcctcgtatctggtcaacgaggtcacgctggtgatcgtgaccaccgacgatctggccggggcacatcgcatcttcgacgtgatgaacatgcgaggcgttcccctgaccgcatctgacgtattcaaagcgaaatcggtcgccgccatctcgccggtcgcacgtaccgtctacgcgacccgttgggatgacatcatggatccgcttggcgacgattcgcaacttctggaggaattcttctcggacctgcacctgatcgtctcgcacaaggccgtctgcacgcaactgctcgaggagttccgcaacgacgtactcaaaccgtatgtcagggatcagaacgtcatctcgttcatcgacgacgtgctggcgccctatgccaacgcatggcttatcatcagcagaccgaccgacgcgaacctgccggacgacgtggtaggccagctcgtggcactcaacgattatcagaccaccgattggaaaccggtcgccatgtgggcgctggtcaattccatccgcaatctcggcagcgacgccgcccgcgtgttctccaaacccggagcgcatacgagggaaaccaccacgaacgggaagaacgacgaagacctgcaactgcacgacatggcacgcctgcgcgacgttctgtccgcgctggaacgcgtcactggcgtggacagcctgaacagacaaagcccgctgtaccgacgtacgcgttcggcgagcgccatccgcgacctcgaacgaggccacaccctgcaacagatccgcggattcctcatcaccgacgatgaccgccggagcgcgctggcccacctgcgtggcgagctacagaccggtcccgcgctgaagcgtctgctgctcattcgcgcgaacgagcagcaggcgggattgcgcatcacccgaccgcgtagtctcaacgccgttgcgatcatgcccgaacaggtcgtgtcgggttcgtcgttcgccgattggccggaagccgtacgtgaccattgggccaaccgtatcggcaatcttgcgcttagccaggccaatgaacgccagctcgcgccgctcgcatcctttgaggaacgccgcgaccgcatgctcctgtcggcgagctccaaacgattccccctgaccgcgcagcttgccgatatcgcccaatgcactcctcagaccctgcaattccgacaggatgaaaccatccggcttatcgccgatcattggaacattcgctacgatgcggaacgtaccgacctgtccacgttaagcgaggaattcctcaccagaaaaaccgaggccaagacgccgacctcgaaacgcgtgaccatcatgcagattctggaggccgggttgctcattccgggcgaaacgctggtctgggaccgaccgcgcaagggcgaacgctgggtggtgaccgtcaccgccgaaggcaagctacgcatggatgacgggcaggaatacgcctcccccaccgctgccgcccgggccgtcggcggcggcagtgcgggactgaccgtatggaaacgcacctcgaacggccaaaagctcagcgacatctggaaagcctaccgactcaagaaacgctgaccccccttcagccaattcctccgacggactcaatggccggcaagccattcgacggcgagcttcgtacggttcgaaatattggttttggcgagaatgtcgctgatgcggttacgtaccgtgccctcgcttaagaacagtttcgccgcgatctcacggttgtcaaggccctcggcgaccaactccaccacgtcacgctcacggtcggtgagatgcgcgaaacggtcgggagcatccatgcaccctgagtcctgcggttcgttcggtcgcactgcctttggcgccgcaccattggcgaaccgcaacttcgcgagaacctccgcgcccatgacgatctgccccgccatgacggcctgcaccgccgggatgacggaagagacgtcctgcttgatgagatagcctttcgtgccgatctccatggccttggcgatatacgcctcatccgcgaacgtggtcagtacaaggatgcgggcgtccggatgagcatgaaggatgcgctcggacgcggtcaatccgtccatgccgggcatctgtacgtcgatgagcagcatatcgggagcgttctcgtcatatttggacatggcggcttcgccgctgtttgcggtccaaggcacctccgcggcaccggtcgccgcaagaatcgtcgccagcgacgagcagacgatcggatcatcatcggcgatggcgactttcatgatgaggtctccttcgacttgggaatcgatacgaacacccgccatcctccatgatacggcccgcagacggcgctaccgcccaaggcccgggcgcgttcctcgatatcggccaggccgatgcccccatcgtcacggggtttcgccggcatggcatggccgtcgtcctgcacgaccagctgccacaatgccggcatatcacgtaacgtgatatgcacggtttcggcgtcactgtgcctgacggtattgttcaacgcctcacgaatcgtggtggcgaagcaacgcgcgatcggggagggtgcatcatcaatggcgttgtcgagcatcacctcaagacccaccgcctgcgaggcggcatcgatctgcgcggtgaaatcggtaccttcctctttcaggtcatgcaccgatctgcgcaccatggtcatcgcctcgttcaccgtcgcatgaatatcctcgaacctccgtgcgtcggcatcccgaccggagatttgcgccaccacttgagatgcttcggactgcatgatggcacgggtcagtagatgcccgacattgtcatggatctcccgggcgatacgggtacgttccgacaggatggccgaacgcaccgaggccgcacggtcctcctcggattcggagagccgattgcgcaactggcgaatctggtttcgccgcgtgtcctgcaggcgcttggtctgcaagagcagatcgtcaagccgcataagctgcagtccgacgccgaatcccagcatggtcaacatggccaataccgcaatccacgcccaatcccatggaagattcgcaatgttcctacgaaccgcaagacctgcgagaggtatcgtccagacccatcgcgcacacagggccgcgcacttgcccatatccggccatgcttcgccttggcggagcggcccgcatccacgaatcgccgccgcatccaccgcaatcaccggcaacagccagcacatttccgggcaccataccgcattgagcgagaacgcacagaccacggcagacgtgacgatgccgaatcgtgtatattcgccgacggcggcacagcagatggcgagcaccatcgcatagatcagttgcagggaggcatcgccgatcacggcgatgccgagaagcacgcccatgatcatgagcagaccttggaatgtcagtcgccgcatgccttacctgtttcgcctcgccgtcataccactgcttcaagcgtaatgcacgtgcttcgatgttcggcgacgacggcgtccgaacgtgacaattgtcatgatgaaccgtcatgggcgtcatgaacgacgtgatttcatgcaccatgtcggagaattcccgcgaacgacaatggaaccaacggagcaaggagcattccatgaacgaagaccattccaccgtgagcgcggtacaggtgacgcatctcgtcaaacgttacggcgatatgctggcgctcgactattttgacctcgacgtacgtcagggcgaaatcttcggcctgctcgggccgaacggttcgggcaagaccacggcgatcaactgcatactcgcgctgctcacgttcgacgcgggtacggtacgcgtgttcggggaaccgatcggcccgaccagttacgcgctgaagcgtcgcatcggcatcgttcctcagaacatcgccgtgttcaatgagctcaccgtcgaggagaacatcgattatttctgctcgctctatgtcggtgacaaggcccgccgacgcgagctggtgaacgaagcgctggatttcgtgggattgcaggactaccgcagattccgaccggcgaaactgtccggcggactgctgcgccgcctcaacatcgcatgcggcatcgcgcataagcccgacctgattttcttcgacgaaccgaccgtggccgtggacccgcagagccgcaatgcgattctcgaaggcatccagaagctcagccgcgagggcgcgaccgtaatctacaccagccattacatggaagaggtggaacagatctgcgaccgtatcctcatcatggatcacggccggcacctcgcgctcggcaccgccgacgagctcaaagccatgattgacgccggcgaacggatcagtgtggaaaccgccgacctaggagggaccgcggacggctcgaacaccgcaatcatgctcaaacgactgcgcgcgctccccttcgtgttggaggcggcctatgacggccgcgaactgaccgtgcgctgccgccggggcgaacacaacctcatcgacgtattgaacgtactcgaggcgaacggcacgaacatcgggcatctgacctcgcatcagccgacgctcaatgacgtgttccttgagctgaccggcacggcgttgcgcgactgaaaggcgtgtgatcaccatgttgcagacgttactgatcacgttgaaactgcattttcgtcagaaaatacagttattctggctgttcgccttccccatcatcctggccaccatgttcaacgggatgttcggcaacatctccgaaaactacgcattgcacaccttcgacatggcggtggtcgaagacgcggcctggaaggcgaatccgggcctgcagacgctgattgccggcatctcgaccgatgggggctcttcggactccgatacgacgggcaaggtcgtcgacgacgacggcgatatgccgaaactcatcaacgccatcccgacgacatcgagagcctccgccgacaggctactcgccgacggcaaggcgcaaggctacctgtatgccgactccagcggccggttgcatatggcggtcagcgaatccacgcagggcagcgtcacggatgtgatggccaacagcagcggtctgggcatctcgctgaccatgctgaacaacatcgtcaacctgtacaaccgtaccggcatggtcattaccgacattctcgccaccaacccgacggccatgatggacggacgactgacctcaagcatcggcgcgatatccggatacacgaaggaagtgaagctcacgaacttcaaaccggacggaaccgcccgttactattacgcattgctgggcatgaccgcactgatggcgatgaccttcgccgtgagcacggtgacgatggcgcaggcgaatctgtcgacgctgggcgtccgccgttccgtggcaccattggccaaatggaaacagctcgcagccggattcctggccagctggttctgctcgttcctaagcctgacggtcgcgatgctgtacatccgcttcggatgcggcatatcgctcggcgggcgcgaatgggccgcgatcggctcctgcgcggcggcatccttctccgcgagcgcattcggcatgttcatcggagccctgccgaagatgccgaccggcgccaaacatggattgtgcacggcaatctcgtgcatactgtcgctcttctccggactgtacggttcgttcgccatgggcctgagcgatatgatcgcccggcatgcgccattgctcagcctcataaacccggcccagcagatcacgaacctgttctatgacattctctactacgacagcttcacaccgctgttcaaaaccataggcatactgcttaccatgagtgcgatctgcctggtagcagcggtcgctttcctgaggaggcaacgccatgaatacctgtaaagccgcattgcggatcctccatgcccgcaaactttacgtcatcatctatcttgtatggatcggcgcgatgatgttgggcatcagttggcagatcatgcatgcctcacgaaacgcggacagcaccacctatcagccgagcgccgcccaagtggccataatcgatcgcgacgcagacgccgacggcctggcatcctcgctgcgttcctatctgtcgacggacagcgaaatcgtcgacattacggacgacgacgaatcgttacaacaggccgtcgcctcgaactacgtcgatctgatcgccatcatcccgaaaggattcgccgaacggtaccagcggtatctgaatgaggccgacggttccgccgctcagcccgccatcgagacggtggtgagctacacctccggttccggttcgctcgcacagttgaaggtcaacgagtttctttcgctgacacgcacctcgtatctgggacttccctccggcgcacgtaacgtgtccgatgcggcacggacagtattggacatcgcgaagaaagacatcaaggaatcatccgtcgccgtcatccaggcgccatccaacgataccgataccgtcaagccggccgcctcggcattcgcaagcaccatcaaaaccggcctgtatccgctcttgctggtcatgccgatatgcacgttcctggtgatcggcacattcaacgaaagcgagatccgccgccgactctatgcctcgccgaaacgttcggtatcgctggaactacagcaggtggccacatgctgcatgttcggcctgctggtatgcatcggctacaccgccgcgatcttcctgctgatgacgatggcgggagtgccgttcgaaggactgacgattgccaacgtcggactgtcgttcgtctcgctgctggtctatacgttaatggccatcgcctgcggtttcctgctgggatcggtcgttctttccgaaatggccgtgaatggattcgtcaacgtattcggcctgctcaccatgttcacgtcgggcatgtcgttcgcagtggacatgatgccagccccgatgatcatgatcggcaagctgctgccgggatggtggctgtgcgtgtccatcgacaacgtgttcggactcggcacggcttcgaacaccggcgtggactatggcgcatgggcgtcgtcgatcggtctggtggcgttgttcggcgtagcgttcgtctgcctcggtctggccctgggccgtatccgtcgcacccgtccgaccttggcctcccctgcgaccacgcagctggcgaagtaaggatgccgatcgaattcgcgatatcggagtactcgaccgcaatcggcagccagtcccacgccgttggcctatcgcaacggcatgctccgttcctgacgttgcgataggccaacggcgtgatatgcatgagcctacggaacgtgcgtgtgaaaaaactggccgaggagaatcccgtctgggcggcgatcgtggcgatcggcagttgcgtggtcgtcagcagttccgcggcggcgcggacgcgcacatcattgacgaactcgatcggcgtctgaccgagcaactcgcgaaagatcgcggtacacgtggtgcgtcccaccaatccggccgccgctatctgcgccaacgtgatctgatgcacgtaatgctgctgcacgaaatcgaccatcatggcgagtgtggcgacatgcggatgccgtccggcatggtcgtgcatgccgtcatcgccgcgctcgcgtgcgatcacggtcagttcacgcagtatcgcatagaagcagctgagtacggtcaatggcgcagtgtcatccgccaatgtcatatcgcctaccgccgaagacctcataccatccggtcgtccgaatttcgcatcgtgcagttgcacgatgcggccgatcaactcgcttccgtgcacatcatcggggttcaggacgacgtagggcgtcgactcatccgtcaccaacggcatcacgaatcgctcatacactgcggtgggagcgctcatacgtgcgggattgagcagcgtacaagagaattcgcagtcggtgccgtcttcggtgaacccataatgcaattggcgtgagttgacgaaaatcgcctgtccttcctcaagacgaatgacctcgccattcacgaaataccacatgtgaccgtggatgatatgcgtgaattcaaggtcgatatgccaatggcattccgcacgcatgttcggatattggtgcaataaggagtgttcggtgaatgaaaagaacatcggcgcgtcgtattgcaccatttccgcgccgttgggcaggcgcccccagccggtgatcggcatgaattcataaggtagacgctctgcccgttcagattggttcatccaacgctccgccaactcgattcggtaaatagtgcaaaatctaggaacgatagtacaacgaaatgcggtgtcgccgaacgacaagggcattgaatggtactcagcatccatcaatcgattgacgtacgacgcaggaggagcatcatcatggcggacaccatcagccagccggcaaaggacgaatgggaacgtatgctttccggtgaactgtatgttgccgacagtccgcagcagcaggacgcgaacatgcgcaaacgccgcctcgtgcaggccatcaacacgtcgaagtacgacgcgttcaaggaacgcgaggagttgttccgcgagctgttcggctcgctcggcaaaggtggtttcctggaaccgccgttcaattgcgactacggctgcaacacgtacatcggagacaacttctatgccaatatggactgcatcttcctcgacgtcgcgaagatcaccatcggcgaccgcgtgttcttcggaccaagagtaggcctatacacgccatatcatccgatcgacgccgccgtacgttcctccggtccggaaggagcccgacccatcaccatcggcagcgacgtttggttcggcggcaacgtagtcgtcggtcccggcgtcaccatcggcgacgatgtggtgattggtgccggctccgtggtggtcaaggacatcccctcacattcggtggccgtaggcaatccatgtcatgtcattcgcaggatcacggatgccgaccgtgaatactgggaaggcaaagccgccgaataccgtgcgtggaaggattcgctcaaaagctgatgtgagtggacggcggacagctgccgccatcccgtgaatcacgaccgcgcatggtacggcgccggaatatggctgacttgccacggcctcatgttccggcgccgtttttcgtacccgccgcacccacattccgacttatggaggccatcttgagagccgttgcaacttggcatgattttttgcgtcagaccatgacgctggccctgcccattgcgtttcagcagcttatgctggcgctctcgtcctgtgccgacacgttgatgctggcgggggtcgggcaggatgagctgtccgcggtatcactcgccacgcagttccagttcatcttcagcctgtgccttgccgcattgacgctcggcatgagcattctcgtcgcacagtattggggcgccggcaacaaggaggcggtggaaaaggtgctggcgttcatcatgctgtacgccggtggattgtcgttgctgttcttcgccgcgaccttgctgctaccggattcgctgatgtcgatcatgacgaacgacgccacactggtcgctctcggtgcacagtatctgaggatttcgtcggtctcctacctgttcatcggcctgtcgcagatctacctgtgtctgatgaagaacgtcggcgccgcgaccattggcatgacggtgagcacggttggcgtgatcgtgcatgttgcgttgaatgccatgctgatttacggttggctgggtctgccggaactggggattttcggagccgcgatctccacggtgatttcgcgcgcgatcgagctgatatggtcggctgcggtggcctcacgaaacgacaggccacgattgcggttgcgcatgatgttgcatccggacgtaatgcttcagcgggatttctggcattacagtctgccggtactcggcaacgagctggtgtggggctgcggattcaccatgtacaccgtgatcatgggtcatcttggcgcggatgcggtggcggccaactccatcgccaatatcgtcaaggatctgctggtctgtttaagtcttggtctcggcaatgccggtggcatcctgatcggcaatctgctcggtcgcaatgcgttcgaagaggcgaggatcatgggcgatcgactatgcagactggtggcgctggtcggcgtcggcacgggactgctgatcgtcgccgtacgtcctctggcattgcggtgggctggattgacgccacaagccacgcactatctgtcggtcatgctgctcatctgcgcatactatgcggcctgcggatgcctgaccaacctgaccatcgcaggtatttttccagccggcggcgacgcgaaattcggtcttgtctgcgacgcgatcgtcatgtgggccatcgtcgtgccgattggtctgctatccgccttcgtaatcaagttgccggtgctggcggtctacgcactgctcaataccgatgaatgcatcaagatgattcccgccctgatccactatcgcaaataccgctggatcaacaacgtgacccgccaataacccaactttccgcagcaatcatggagcgaaccggccacgattgggccgagcatacgaaaaaaagggatggaatccgatgatcccatccccctggtaggttcccacctacttcatcaaattacgcagaacgtactggagaatgcctccattgcggtaatagtccgcttcacccggagtgtcgatgcgcacgatcgcatcgaactcggtcttggaaccatcctcatgggtggcggtaacgtgaaccgtcttcggggtgaagccgctgttgagttcctcgacgccggaaatgtcatatgtttccgtaccgtcgagaccgaggctttcataggactcacccgccgggaactgcaacggcagcacacccataccgatcaggttggaacggtggatgcgttcgaagctttcggtaatgacggccttgacgcccagcatgacggtgcccttcgcggcccagtcacgcgaggaaccggtgccgtattccttgccggcaagcacaaccagcggcacgtcgttgctgatgtagtcgcgggatgcctcgaagatcgtagtcggcttcttggccaggaaatcataagtaaaaccaccgggggtgacttcttcgcctacggaggcgagcagctggttcctcaggcggatgttgccgaaggtgccgcgcaccatgacctcatggttgcctcggcgggaaccataggagttgaagttcttcggttcgacaccgcggtcggtcagatacttgccggccgggctggtggccttgaacgcacctgccggagagatgtggtcggtggtcacggagtcgccgagcaacgcgagcacgcgggcaccatgaatgtcactgaccggatccggggtggccttcatgccgtcgaagaaggtctgcttacgcacgtaggtggaattctcatcccatgcaaacagctcgccttccggcacatcaaggcccttccagcgatgatcgccatcgaatacggaagcgtaatccttgaggaacatctcacggctgacggtaccgtcgaccacggctgcgacctcttcgttggtcggccagatgtccttgagatatacgtcgttgccgactgtatcctcgccgagtggctgggtctcgaaatcgaagtccatggtaccggcgagcgcgtaggcaatgaccaacggaggagatgccagatagttcatcttgacatccgggctgatgcggccttcgaagttacggttgcccgacagtacggaagtgacggtcaggtcgttggcattgatggcttcggagatttccggcagtagcggaccggagttgccgatgcaggtggcgcagccgaaaccgaccagctggtagccaagcgcgtcgagatcgtcctgcaggccggcggccttcagatagtcggccaccacttgggagcccggggcgagcgaggtcttgacccacggcttcggcttgagtcccttggcatgtgcattgcgggcgatcagaccggcggcgatcatgacggacggattggaggtgttggtgcaggaggtgatggacgcaatggccacgtcaccgttcttgatgtcgaagtcgccacggaagtcggtggagacggcaaccggctcctgcacggtcttgtcggtctcgtaatccggcagggtctcggcgaacctggccttggactcggtcagcacgatgcggtcctgaggtcgcttcggcccggcgatggacggcacgaccgtaccgaggtcgagttcgaggtattcggaatattgcggttccacgtagttcggatcggtggtgtctccccacagcttgttggccttggcgtacgcttcgacaagtgcgatctgctcttcggaacggccggtcaggcgcaaataatcaagtgtgacgccgtcgatcgggaagatgccgcaggtggagccgaactccggacccatgttgccgatggtggcgcggttggccaacggcacggaagcgatgccttcgccatagaactccacgaacttgccgaccacgccatgcttgcggagcatgtcggtgatggtcaggaccacgtcggtggcggtgacgccctccggaatggagccggtgagcttgaatccgacgacacgcggcacgagcatggaaatcggctggccgagcatggccgcttcggcctcgatgccgccaacgccccagccgagcacgcccaggccgttgacggtggtggtgtgcgaatccgtacccacacaggaatcgagataggcgagttcacgaccgtctgcggcggccgcggtcatgatgaccttggcaaggtattcgatgttgacctgatggatgatgccggttcccggcggtaccacgcggaagttcttgaacgcctgctgcccccagcgcaggaactggtagcgttcgccgttgcgctgatattcgatgtccatgttctgtttgaccgcatcggccacgccgtatttgtcgatctgcacggagtggtcgatgaccatgtcggactgcacctgcgggttgatgacctccggatcgcctcccagctccttgaccgcatcgcgcatggtggcgagatcgacgatgcacggcacgccggtgaagtcctgcatgaccacacgggacggggtgaattggatctcatgactcggctgtgcggccggatcccaatccaacagggccttgacatgatcatccgtaatgttggcgccgtcgatgttgcgcacgaggttctcgacgaggaccttcaacgaatacggcagatgatcgatgcccggcagatccgcaatgcggtaatagtcgtaatccttgccgtccaccttcagggtgtccagctggtcgtcgcgcacagacatgctacctccgagctttcttggatgtataacaacagctgattatccgttgtcaacgatacagggaggttaattcagctctggcgtgtcttcttgaagtatgggacaatacgcggcagtttcggcacgagccagatgcatagcgcgaacatgatggccgacagcgccagcgcgaccatggtggcacgcagcatctcccccgtcggtatgacgagcgcaaagaaacgcgcggtgaaaggcacgaacatgccggccacgccagccatggcgaacgtcagcaccagcacgcccctccacgagttcaaggggctcgccacccgtgccagcacgaaaatgcccatcatgagcagaatgatggcattgacgccacgcaacatggccaattggacgctcgaacgctcgacatcccatcccatgaacatcggcagcagccatgacgtgcacagaatcgacaggcccgtagcgacacctcctggcaatgcaaagctcaccacacgcttcaaaaagccaggaatataccgacgtgtgttcggcgccagcgccagaatgaacgccggcatgccgatggtgagccctccgatataggtgatgtgacgcggtagatacggaaatggaatctgcgtcagtaccacaccaagtgaaatcagcgcggaatacacggttttgacaagaaacaggctggctacgcgttccatgttggccatgacctggcgtcctcgggccaccacgtcaggcagatgcgagaatttcgaatcgacgagcaccacctgcgccacggctttggtggccggcgccgcattgcccatggcgatgccgaggtcggcctccttgatggccagcgcatcattcacgccgtcgccggtcatggccactacgtggtcggtcaggtgcaatgcctggacgatggctttcttctggtccggcagcacgcggccgagcacatccacatcatcgagcacgcgagccagttcctcactgttggccggcagtgcacgcgcatccatgaacaccggctcccgttcgccggtcaatcgtacttttctggcgatcgcaccgacggtgacgggattgtcgccggaaatgatgcgacagcgcacgccctgctcacggaaccaggcgagcgtcgcctccgcgtcgcctctgatgtgttcggaacacagcaccaacgcaaccggctgcgatgtggaatcaagcttcggatcggtctcgtagtcggacgaggcggccccgtcgaaacgtacgatcagcaacactcgattgccgtcgtcggcgaaatcattgacctgacgcaatatgccggaataatcgcagtcgagatgggagatgatgacctccggcgcgcccatcgtccatacggcatcgccatcgtagatcgagctccatttgcgggccgacgaaaacggcacgcgtgccgtaaccacacccggggcaaagccctgctcccccagccccgcaagaaccgcctgtccggtgccgttcggctggccttcgttcgacagatcgaacagtgcctgcttgatccgatgctcatccgcatcatccgccaatgggacgatacggttgagcatgatgccgccgtcggtgatggtaccggtcttatcaaggttcaggcagtccacacgggcaagcgtctccacggactcgagttcctgcaccagcgtgttccgtcgtgccagtcggattgcggcaagcgcgaaattcagcgaggtgagcaacaccaggccttcgggaatcatgcccaccacaccggccacggcggagacgaccgcggaacgccattggccggtcgtaacggcagtgtcccagcctcccacggcgtgaatctgcgaccagatgagcagcacgcataacggtacgaccagaaaggtcatgaacttcagaatcgtgttgatgcccttgttcaggtcggagacggttttcttgtagactttcgcctgtgcggtcaacgtagcggcataactgtgttcgccgaccgcctcgaccttcaccaacgccatgccggagatggcagtggaaccggaatagattcgttccccatcgcccttgcgtacggtacgcgattcaccggtaagcatggattcgtccaactccaggccccatgtacgcacgatccgagcatcggcgggcacctgttctcccgaacggatccacatgagatcgccaagcacgatttcgttatgcggcacctcgacgtccaccccgtcgcgacgcaccagataatccgaagcgacgagaatcgacagtctgtcaagcgtacgcttcgccttaagctcggtgatgatgccgatgccggtgttgatgatgatcacaaaaccgaaaacggcatccttccaggacccggtaatgagcaccatgagcatggccgcgagaatgatgccgttgaacaacgtgaacacattcgcacggatgatgtcgaccaaggagcgcgaggtcgacgacttgacggcattggcctgcccgccgtctttcagggtcttgacttcggtggccgtcagacccgactcgccgatcgggggcatggaaggacttgcactcatgcttgtcagcctaccgtccccgacttatccatgccggactttcctgtgaaagcacggtgaaataaccaccatatgccgtgacgcggcaaacgccatgttcgttatttcgtggtgacgaccatgtcacgctcatgcggatcgttgttgccgatggtcattacggcatcggcgatgggaaccgcatcggtcatgcgatcgttgatggtcagcacagccgcatacagcttcccgtccttgggtacatgcaccggattgagcagtgccaccgcgattcccgcctcgcgggccccttgcaatgccgcatgccagtcgtcgcgattggcatcggtcacatccatgccgccgatgacgatgatgccaaccttgctctgcgtcatgtcgcgtacgccttgaatggccgtttgctgggcgtcgatggtgccggtgacgggaacatacgtcggcttgagtttgccctgctccatggcatccagtaccaagccgtcagcgtcgatgtcctgcgagccgatgaacgccactttggtgtcggcacggtcagggccgacgtgggcgacggcggaatcctgcgattgcgtatcccccacggccccgttcggcggcgtgcaggcggtcagggagaccgccaatccgatcgccagcattgccatgcccgcacgtcgcaacgcgttgtcactcaccgcttatgcttcctgaacaatgcgacggtctccacatgatgggtcgtcggataaatgtcgaaagcgtggatgtcggccaactcatagccaagaccggccagagtggcggtatcgcgcgcaagactcgccggattgcaggcgatgtagatcacgctgcgtgcctcggagtcggcgatctgcccgcacaccttggcgcgggcgccagcacgcggcggatcaagcaccaccacatcgggtctggccagatcgttgcgcacattgcccaaggtcttcgccacatcaccggcacggacatccacattatccaaatggacatgtcgcagattgcgttgcgcattgcgtacggccgtcttaccgccttccacgctcagcatgcgcgtgcgttccgcagcaagcgaagccaatggcagggtgaacaggcccgatccggaatacagatcccacacgcaggccgattgggcaccgttcagctctctccggaccagatcaaccacgtggttggtcaatgcgatcggtgcctgtcgatgcatctgccagaatcccccggcatcgacgccgtactcgaagtcccggtctgcgacggtgactttttcggtcagcgcacgcgtaccggccgtcacctcgccgtccaccaacaccgcatagttctcttcgaccgcggcaccgtcacggggttcgggtacggaaagcctgatctgggaaccgggagtgaatccgccatcccatacatgctcgcgttcggccacgtcgagcagcgcgcggctagccaacggcatcgtgtcgatcggcacacgaacatgcgtgccgcgccgacgcatggatggccgtccgtcggcatcggcgatcatttcgatacgggtgcgccaatgcagtcctcgttcggcttcatcttgcggcatgcgatcgatcggcacttccactgccgtatgccccagccgcaacatctgctcgacaatcgagcaggtcttccacttgagctgcccggcaaggctcacatgcaccagatcggcgccgccaacccctccgcccatggcaaggggccctgccaatggccatatcggttcggcacggtcttcgctggcctccagcacttccacgacctcaccagtccagaagcgctcttccctatcgtgtggttcatcaagttccacacggaccaattctcccggcaatgcgaaacgaacgaaaacgacccgtccgtcaatgtggcccacgcaacgcccttgatcggcatatcgttcgatgcggatggtcgcttccatcagtgctgttcctccaagcaatcatgttcgccctgaccggattcttcggacaaggccttgtgccggtgcatcggcgtagcgacgatcagatacgagacccagatcgccaacgcccagaatggaatgcccataagcaggcgtgcagtgccaagccagccgacatgattggcggcatacagtggcacctgtacgaccagacgcaacgagaacacggcgatccacagcgcggtgatgaccgtataggcccggttgagcgccttgtccgatctccaatcgtccagccacgcacggaaatgctcggtgggcaacgtgcggatgaactcgatgaccagacccaaccctggtacgcgtgcgatcagcgacgtcgtaagcagcacgatgtagaacgcgttggtcaggaagccgaacatgtaataattacgcgcttcatggctttgccacgcccaaatcaggcagatgcccacggcgagcaggccgctgacggcacccatcaccgactggcgctgcaacaaccgtacgatcacctgaagcacggccagcgcagcggaaacgccgacggtcagctgcagattggcggtgatgacgaacaacaccacaaacacgacgcccggcagcatcgattcgaccacgccacgcggaccgccgatggcgtcgattacggagaagtcgtcgtcattgccggcatcggcgagagcgccgagaccggtacgttttctggtttcagtcattggtcgaaacgaaaaccttcgatcagcgcacttcggagaacatcggaccacgggacagggtggtcttgacctcgacctgatgatcggagtcgaacggccccttcggtttgcccggaatatccgtcttctcgtcgttgccttcctgttcggcggcctctttggcggccttacgttcggccggtgcgaccggaggatgcattgggatgaggtcacgtggggcaagaggatcgtcgccgcgctccaccacgatattcgcaaagaattcgttcaatgccttggtttcgtcatgttccggatcggtggcggccttgcccgagaagatgccgcgtagcatccaacgcgggccatcgacacctacgatgcgggtcagcaccttacggccgcccttgactacaaccggcaacgacagttcggtgccgaacacaccgtcgacttcggaggcggctttattggcctcgatcagatcggcacgcacatcatcccatagtcccatggtcttcggggctgcgaacgcctcgatctccaaactggacgagccataggtgatggtggagccgagcacctgctgcgtggcgcggttcgccttcacacgcagttcgatgccctgcagaaacggcagatagtaggatcccagatcaagatagtcatcgtaatcgggcacatcctcgtcgtccacgtcccaaggaccgcgttcatcgccgcgtccttcgtatacggcggaaggctcgggcagctccatgacctcctgggcctgggccgcggcctcatccacagcctgctcttcggcggcctgctgagcgtcctcgctctggcgcttcttcttgccgaatccaaacaatcccatgatgttcctcatttcataacggttgcaaccgtgaccagcctagcacccacgcttaatatgagctgggaattcgtggcccgttcctgcgagtcgcgtctcagatgtcgtaggtgatggtcagcggcgcatggtcggaccagcgtttgtcgtaggtcggggccttgtcgatgacgaatccgcaagcggattcggccagctccggcgtggcgaactgatagtcgattctccaacccacgttgttgtcgaaggcacggccacgttggctccaccacgtgtacgggccctggatatcgcccgcgagattacgcatcacatccacgaactccagctcacccagccacttgtcgacgtaggcccgttcctcgggaaggaatccggcatgcgtttcgttggccttggcgttcttgatgtcgagcggggtatgcgcgatattgaaatcgccgcatagtacggactgcctgccgccatgcaccgcctcatctcgcagctggcccatccgttcgagcatggtgtcaagaaaacggtatttctgttccatcttggccggatcatcggtattgcctgcatgcacgtacacacataccacggtgacgatgtagccctgtggcgtcttcacatcggcctcgatccaacggccggaatcgacgtcatcgtcaagccccggcaagccgtaccgcttgtcaatcaccggcaatgccgagagcagccccaccccggcacgtcctttgatacggcatacctcgttgagacggtccagttcactttgatcggcgatcttaccggcggtggagtattcgaacccaaattcatcgaaaatcggatcgatttcatgctgtggcgcacgcacttcctgcatgcaccagatatcgggcgtgtttctgccggcccaaatttcgatgcccttgcgtttggccgcacggattccgttcacgttcgaagtcgtaatgctgattgtcatagcgccagcctaactcacatgcgagaaaacctccctcgaaaggagggaggttttcagcggtgcaggcggtccgaaccgttcaccggccttcgcgtagtaatcgtcggagcccatcttgtagctgaccttccccccgtccgatcgctgggttcggggaatccggattcagcgatcggacggtgcggcccaaggcgtgtaggagaagaccgcgccactccactgtggtcatcagtcgagaccgagctggagcttacctcctggaatggcgtccaacagatcgcgggtgtactgcatctgcggatggtcgaacacctcatcggtggtggcatgctccacaagcttgccgtgctgcatcaccaccacctcatcggcgatctggcgaacgaccgccagatcatgggtgatgaacaggtaactcagtcccctttcggcctgcaggtcgttgagcaggcgcaacacctgatcctgcacaagcacatccaacgcggacacggcctcatcgcagacgatcacgtccggattgagggccatggctcgcgcaatggcgatgcgctgacgttggccgccggaaagctcgttcggatagcggctcatcacggattccggcagctccaccatgtcgagcaactcgcgtacgcgggcggcacggctggtcttgtcgccgatgccatgaatgcggagcggctcctcgatggaacggtagatggaatacatcggatcgagcgaaccgtacgggttctggaacaccggttgcacatggcgacggaagtcgagcaactccttacccttgaagcccgcgatgtccttgcccgcataggtcacgctaccggaggtcggttcgagcagcttcagcaccatgttggccacggtggacttaccggagccggattcgcccacgatcgccagagtggtgcccttcttgacggagaagctcacgtcatcgacggccttgaacatctcctttttgcgtggaagcttgaactcacgggtcagatggtcgacggtgatgatggcctcgccgtttttcagggaggattcgttcaccgcatgctccatcacggccttcgcgtcgcccccatgctccttgacggagatgatgcgctgcgatgccagcgatggtgcggctgcgaccagtctcttggtgtacggatgctgtggatgctggagtacctcgagcgacggaccggattcgacgacctgccccttatacatcaccacgatgtgctgggctcgttccgcggccagacccagatcatgggtgatgaacagcactgcggtgcccagtgaatcggtcagcgtatgcagatgatcaagaatcttcttctgcacggtcacgtcaagcgcggatgtcggttcatcggcgataagcaggtcggggcggcaggcaagaccgatggcgatcaacgcacgctggcgcatgccaccggagaattcgtgcgggaactgacgtgcacgggtggcggcgtccggcaatcccgcttcggacagcaaacccgcgatgcgatcgttcatggtggaaccaatcacatacttcttggcgagataccacgcatcctcggctttcacgccggccttgatgagatcgtcggcgacacgccagcgggtttcggaacccggcacccactcatcagtgaagtacgccatggtcgtatcgagatcctcgccggtcttgccgatgttgactagggcttccttggccattgccaacagttccggcagctccttggaaccaaggaaggtctcgtcatcgtcgcctttgagctccaccccttcgccggccaaggccttggcgaattcagagcgtttttcatggtcgatatccatgttgttggcaacaagggcctctttgacctgagtcccgatgcgccataccggattcagattgctcatcggatcctgcggcacaagtcccattttggatccgcgcagcctgtcgtagtccttctgcttcaagccggcgatctcctggccatcaagcttgatggagccgccgaccacatggcccgtgcccggcaaaagccccagcactgccatggcggaagtggatttaccggaaccggattcgcccacgatcgccacccattggccgggatacacgctgaaggaggagttacgcaccgcgtgcacggcacggccctcatcggtggtgaagtccacctgaaggtctttgacttcgagtagcggaccgttggcacgttgcatggcctcaagcttgttttcggtattcatatcagtcatcgaatatctctcacttacactcaggccgtacggctcttcggatcaagggcgtccttgacggcgtcgcccatcatgatgaaggccagcacggtgatggccaacgcggcggacggatagaacaacaccatcgggttggtgcgcagaatggactgagcatgggaaatgtcgccgccccagctgacggtggtggtcggcaagcccacgccaaggaagctcagcgtcgcctcgagcacgatgtacgtggccaacgatgtagtgccgactacgatgatcggagccagggagttcggcaggatgtgacggaacaggttccgtcccggcgtggagcccaaggccgtggaggcggtgttaaactcgaggttcttcgcctccagcaccgcacctctggcgatacgcgccacggaggtccagccaaacagcgtcatcacgaggatgatcttccagatggagtcgctggtcttgaacatctgcagcaccacgatggcgccaagcagaatcggcaacgcgaggaaaatatcagtcaggcggctcagcacggcatcgacccagcctccaaagaagccggccaccgcaccgatcagcgtgccgagcagcaccacgagcagcgtggcgaacacaccgacgctcaaggaagtgcgggtaccgtagaccacgcgggcgtacacatcgcagccctgcaggtcgaagccgaatggatggcctgcggatgacgggtcgagcgaattgtcgagattgcagtagttcgggttctgcttggtcagtacgcccgggaacagtgccacgaaaatgatgaagacaatcaacagcccggagatgatgaacagcggattgcgtcgcagggtgcgccacgcatccgcccacatattcgatgcgggagccgattcgtcgatggaatcgacggctttgagcggagtctcctcaagcggggccacatagcgctcctgtcccggcagcgcagtggaaagattggtttcattcatgtcagtcattgcttatcctccacagctcacgcgtaacggattcgaggatcgagggcggcgtaaagcatatcgaccagcaggttgcacaccacgaagatcagcatgagcagcgtcacgatggacaccaccagattgccttcgcccttcagaatgctctgataggtcagatagccgatgccgtgcacgttgaagatggtttcggagatcatggcgccacccatcaacgcgcccagatcctgcccgagataggtcacgaccggaatcatggagttacgcagcacatggcgcagcatgacagacttgttgtccatgcccttcgcgcgtgcggtacgtacgtaatcgagcgcgatgttggacgaaatctccgcacggctcaatcggatgatgtatgccatcgatacggagccgagcaccatcgctggcatgagcaaatcgatgaaacctggattcgagccggcggtgaccggaagcagacgccatttgacgccgaggaagtattgggccaggaaaccggtgacgaaagtcggtacggaaatgagcagcaatgagaagatcaggatgacggtgtcgcaccacttgcccttcttcaagccggagatcacaccgaaaatcacgccgaagatggcttcgaacacgaaggccatcaacgcgagtttgatggtgatcgggaaggcgcggccgatctggtcgatgaccagctgcccggagaaggtcttgccgaagtcgagggtcagcgcgttcttcaggaacagcaggtactggatgatgaacggcttgtccaggttgtattcggcacggatttgggcggcaaccgcttcattgaccggtttatcaccgaacatggccttgactgggtcgcccggcagcgcaaacaccagggcgtacaccagaagcgtcgtgccgagaaccacagggatcatctgcagaatacgtcgcagaagatacttgcccattggtttctccttattactcaattcttaagccagccatttggctatcggtctttgtgaaaaaagaccttgcacggggccggctgacaactcgccccgctaagtctactagccgctaagtctactagtttcgcaccaaggtgcctttatattgtaggtttatgaaaataagctgggaaaacactacactgaccggcaccttacccctaggtgtctcattttcccgtttttttaccctggtaacgaatgcggtcgtaacgacaaggaaggaacggcgtattaccgttccctccttgtcagcgatgagaaccgattagtgaatcaagctcacttgctcttggtcatgttctcgtagaccggcaggttctgccagttcatctcgaagttggagacgttggtggaagccacgccataggcattggcatagtacagcggaacggccggcagatcattgagcagcacttcctgggcctgctgatacagcttgttggcctcgtcggtggtctgggcggctgcggcctggttgcacaggtcgtcgaacttggagttcttgtagtcgccatcgttcgaaccgttgccgtcggcggcggaggaggagaagttctggaccagatagttctcggcggacgggtaatccggctgccaaccgctacggaacgcgccctggaccttgcggtcggacaccgcggtgcggtagtcgttgaaggtcgggtacgggttggtggcggccacttcggagccgagagtgttgttgatggagttcaccacggcggtgtagatggtctcatggccaccgtcggcattgtaagcgaaggtgagcttgtcatcggaggtccacgggctgatggcgttggccttctcccagagttccttggccttggaggcgttgtacttcaggttatcggagcccttgagggaatcgctgtagcctggagtcagcggagaggtgaaatcactggccggcgtaccggtgccgttaagcaccttctcgcagatgttgttgcggttgatggccatggagatggcctgacggcgcagggtgccttcttcggtgccagcctcgaaatgcttcagaccggacgggatggtgaactgctggattacggagccggccttgttgtaggcctgcacggtggaatccgtttcgaaggtcttggtggcggaagccggcacggattccatcacgtcgagggagccggactggatgtcggcgtaggcggcctcgtccttggtgtagaccttgaaggtcacgccgtcgttcttcggggtgcggttgcccttgtagtccggattcttcacgagcacgatttcgttgtcatgatcccaggactggaacttgtacggaccgttgcccaccggcttttcgccgaaggccttcggatccttgtagaaggattccggcagcggagcgaaaccggaatagccgaccttgatggcgaacacggagtcggactggttgaggtccacggtgaattcgttgtcgttgacgaccgtcaggccttcaagctgctcgtcgcccttgaggttgtcggcatcctgcagcttgtcatagcccttgatggtggagaagaaggaggcgcacttctgcgcgttcttcgcattggcggtatagctccacgccttggtgaaggactcggccgtcaccggagtgccgtcggtgaacttccaacccttcttgagcttgatggtgtactgggtggcatccgcattggcttcgatggactctgccacttcgttggaagcattgcccttggcatcgaaggaaatcaggcgggagaacagcagatcgatcggcttaccgccgccggtctcattggtgttgcccgggataagcgggttctgcggctcggaattgtaagccgtgatgatgttgccgccatcggaggcggcatcattggaagcgccgcagccgctgagcagcatgcccaacgcgcaggccgcggcggcgaaagccaaagccttcttcttcatagaatcattctcctattcgttatgtgaggaccgttgcggccctcgcgtaagaacgaggtggacgttgatgcatggcgtcagcgcacacctcgtttttaccggtagagaaccattgttccctacttaacggacaacgcagcataacctctgcaaacgacatggagaaacggattgaaagggtggatgccgctcacggccggtctcgtgaggccaagaccggaagcattgcggaaatcagcgtttggtcatgtcctgatatgcgggaacgttctgccagttcatggtgaaattcttcacatccttcgatgccacacctgccgcatcgccgtaatacaacggaatcgacggcaactgactgagcaggatccgctgtgcctgccggtacagatcgttcgcggtatcctcatcgccggtcgaagccgcacgcgcgcatagctcgtcgaactcggcgttcttgtagtcgccgtcgttggagccgttgccatccgcggcggacgaatcgtacaacggcaccagataatcctgcggagacggatagtccggctgccagctggtgcggatggctccgctgagtttgcgggcggtcacatcattgcggaattcctggaaggtgggaatcgggctggtggccgcgtcgatgccgagcacgttcttcacggagttgacgatggcgtcatacaccgggcccgcgccaccatcggaattatagaagaactgcagcttgccgtcataatgggagatggcttcggcctggttccacaactccttggccttcgtcgggttgtattcaaggtattcgtgcccttcgatggtgcctgaatatcccggtaccttcggtgaggtgaaggagtcggcaggggtgcccagattgctgagcaccttcttgcagatgttgcttcggtcgatggccatggacagcgccctccgacgcagctgcccctcttcggtggaggtctgccaatgctcgagctgtgatggaatggttatggtctgcagtacggaaccggccttgttatacgcttcgactgacgagtcggtctggaagatcttggcgtcggcggatggaatggtatcgagcacgtcgagattgcctgcctgcacgtcggcgtaggcggatgagggatcggtgtagacgcggaaggtcacgccgtcgttcttcgcctcacgattgccgtgataggccgtgttctttacgacgctcagctcctggtcgtgaatccatgagccgaacttgtacggaccgtcgcctaccggcttttcgccgaaggccttcggatccttgtagaaggattgcggcagcggatagaacccgcaataccccactttgatggggaatacggaatcaggctggctcagttccacggtgaattcatggtcgttgatcaccttcagcccttcgagctgctcatcaccattgagattggcggtatcctgtagcttgtcatagcccttgatgttggcgaagaagcccgaacacagttgcgcgttcttcgcgttggcggtatagctccacgccttggtgaaggactcggccgtcaccggagtgccgtcggtgaacttccagccggacttgagcttgatgtcgtattgggaggcatcgtcattcgcggtgatcgattcggccacttcgttatgcgccttgccgtcgttgtcgaaggaaatcagaccggcgaacaacaggtcgatcggacgaccgcctcctgactcgttggtgtctcccggaatcaacggattggccggctcggcgttgaaggcggtgatgacgttcgccgccgatgaggagtccgaaccggagctgccgcatccagccaacggtacggccagcaatgccagtaccgacgtaaaggccacaagcctgtgttgtttcattattccctcgattcatatgcatggaagcgggccgaaggccacaggctctttcatacatctcgggaatgcgagtcatggcccgttttcgcggcacgcgtataccgtgcggaccgatcggcggttcaggctcgggggaacgcctgcccgtatctcgccttgagctgttcgatggagacatgggtgtagcgctgcgtggttttgagcgaggaatgtcccagcagttcctgcacttgcctcagatccgctcccccatcgagcaggtgcgtcgccgcgctgtgacgtaacgcatgcgggctgatgtccggcacgcccgcccgttgcgcgcactcatgcaccacctgtctcaccacccgctggtcgatgcgattgccctgcgcgccaagaaagagcgcatccgccgaccgtgcacggaccaaacgggggcgtccgtcctcaagccagcgtcggatggattgctcggccggcacgccgaacggcaccacgcgctgcttgttgcctttgcccgtgaccttcatcgtacggttgtcaaaggccacgtcatgcacgtcaagtccgaccagttcggcgacacggatgcccgtggcgtacagcacttccagcattgccgcattacgtaggccgacggcctgtttcctgacgctcttcgtgcgcgatttcggcatctgctcgtcgacgcagtccatcagcttctccgcctgtgattcgctgagtacggcaggtagcgtatccggaatcttcggtgtcatcagcatggccgccggattggcgttcgtcacgccgcgttcgtgagtccatgcgaagaagccccgcaccgcaacggttttacgggccatgctgcttctcgcatgccgcttcgaggattgcgacatccacatgcgaagatcctctatggtcacttcgttgagatcctcacatcccaatatctccagctgcgtcatgcattcctcaagatcgccacggtacgccttgcgcgtattatcactcaatccgcggttggccttcagatatgcatcaaaggcgtcgatcgtatccgcgaaacgcatattccggcctctttccccgaattttccgctgactgctcttccattatgtggccatctgtcgatagactttactcggtatattctccagtggacaggcggtatcatggcacgtcactcggcacggaccagacagcagggcgattccggcaacggagttgacgaacgaatcgtggcaagggccatcgacctgacaaagagctacggagacaaggacaaccgggtcaccgcgctcaaccatgtggatgtggaattcatgcgcggcgagatgactgcgatcatgggcccttccggctcaggcaaatccaccctgatgcattgcatggcaggtctcgactcccctacttccggcagggtcgtcgtggaaggtctcgaagtctcgtccatgaatcaaaagcaactgaccgatctgcgccgcgaacagatcggctttatcttccaatccttcaatctggtaccgacgctgtctgccgaagagaacatcctcctgccattgcagatcgcgaaacggcccatcgaccgcgattggttcaaccaggtggtcaaggtggtcggtcttgaacagcgactgacccatcggccgagtcagctttcgggcggccagcagcaacgcgtcgcctgcgctcgcgcaatgatggcgcgcccttcggtgatcttcgcggacgagccgaccggcaatctggattcacgttccagccgggaggttctcgggttcctccgtgattccgtacgtgattacggccagtccatcgtaatggtcacgcatgatccgcgtgccgcctccttcgccgaccgcgtactggtgctggcggatggtgagatcacccgcgacatgagccaccccacctatgccgatattctcgaagtgttcgcggacgatgacgaggccgaaaccacgacttcgacggaaggcgcccagtcatgatccgtatcggtttgcgtgatgcgagaagccatttcagccgtttcatcatgtcaatcgtggccatcgcgctcggcgtaagcttcgtggtcggctcgttctgcttccgcgagatgctcaacaaccaggtctcgcagatgatggccaccaacgccgaccatgatgtgtacgtacgaggcgccaaacagaccaagagcagttcgacactgctcgcatcgggttcgtcgatagcaagctacaacgccatcgacgtggacctcgccgacgatatcgccaaggtgaagggcgtcacatcggcgcgcgtggcctactcactcaccggcgtggtgctggtcgacaaacacggcgacgccgtgaccactatgggctcgccctcgatggcactcggcatcagcgcttcgactccgtggcgctccgccaagttcacttccggcacgtacccgaaaggcgcagatgaaatcgccctgcattccttcgcagcggagcgatccggtctcaaagtgggagacaagacgaagatcgtctactccgatggcccgcatgacgtgacggtcagcggtatcttctcgacctccgcaagccaggcgggcgccatcatcatcggcgtcgatccaagcgtagccaaggaacaatccgacaaacaatcggacgatgccgacaaaaccgcgcagatctgcgtctacggcagtacgaccactccgttgaacgcatccgagcaacagcagctggcggaccgcatcaacaaggcgctgcccaagaattccaaggcacacgccgtcaccggagacgaatatcgcgacgataccaccaaggccacgcaggattcactcggcttcatccagccgctgatcctcatcttcgccgtcatcgcgctgttcgtcggttcgttcatcatcgcgaacaccttctcgatgatcgtacgtgagtcgatgcgcggatatgcgctgctacgatccatcggcgcctcacccgcacaggtcttctccacggtgatcgtgcaggccgtggtgctcggtctggtcggttcgggcacaggcatcgcgctcggttggggcatggtacgactgatcgtcatgggactggcgaatatgggactgccattgaccggagccaccgatccgtccatctccgacatggtaatcggcctgatcgtgggtgtgctggtcacgttgatcggcgcggcattgccggcacgcaatgccgcgcttgccccgcccatccaagcgatgaacgagacggtgaatccggaaaaaccggtacgcatgcgaggcatcgtcggcacgattatggtggtgctcggtttcgccagctgggcgttcgcctgcgccatggccgtcgcggacggcaacgggccgacgccatgggacgtggtaaaccacatcgccatcggctggccgctcggcgtcggcgcggcattggccgtggtcggtgtcatcatggccggaccggccttcgtctcccccgccggcaacctattgggatggttgccgtcgaagatcttcaccgtcaccggccggctcgcgacgcgcaacatctcccgttccaagagacgcacgtcgaataccgccgccgcattgttcgtaggcgtcgcaatcgtcagctgcctcggcgtggtggcctcgtcggcgaaggcctcggtcaattccttggtggacaacggtttcaaagcggatttcgccgtgatctccgcgtccttcggacggttgccagatcaggccatatccgacatcaagaacaccgacggcgtcaagacggtcaccacgaaccgtctcatgctcggcgtcaagtatgacggccgatccatcggtagcgtgacattcgccacgcaaacgcacttgttcaccgacgtgttcgccgcggaaaccaccgagggcgacgccgtcaaggcgatgaagaagggtgaactgctggtcggcaaagacgtggccgaagaccggggctggcatgtgggagaccgggtcaaggtatccgccgagaatacggtggtcgaccaagaggccaccgaacaggtccaagccgattatcaggcccaggttcaggcacatgtgcaggagttgcagaacgaagcgcagcagatggccgcatccggcgatgtggcgggagcgcaggccaaggcggacgagatccaacggtataccgccgacgcgcagaacgtcgatccgcaaaccttgatcaagacgaagaaggagaccacggaaaagacgatcagaatcggtgcgatcgtgtcgaactccgtgtatcgcgacaatgtgatgttcaacgatgacgtcgccgagcagatcggcaacaagcagaccatgttccccatgtctctgtacgtcaatgccaagtccggcaccgataccgctgcggtgaagcggaacatcaagaacgccgtgaagaagtactacacgatttcggtgttcgatcatgacgaatacaagtcgacgatgagcacgatgatcgaccaggtgctcatgatcctgtacgcactgctggcattgtcgattatcatcgcgatcttcggcatcgtgaacacgttggcgttgagcgtatcggaacgtaccaaggagatcggcctgctacgggccatcggcacatcacgcggacaggtgcgcggcatgcttggcatcgaagctgccatcatctccgtattcggcacggtgatgggcttggtggtcggcgtctcggccggtgtggtgatccgcgccgtctacgcctccaagggattggagacgcttgcggttccgtggacgcagttgctgatcttcctcgtgctgtcgatcgtagtcggtctgatatccagtatctcgccggcctcccgcgcactcaggcaacccgttctcgacgccgtggccagcgaataggtctagactgtcgataaacggtgcaacgaaggggacaatatgccgattccacatgagattcctgccggcgcacgcattgtggtgcgcacgtacgaaggcgtggatccgaccgaccaacgtatgaagttccgtgattttgtcggccatgtgcgctcctgggacggacagacgctggagctgatgcgggacgcggccgccaatggctcacgtcccgcacaccgtgtcagcattcccgccgacgcaatcgtcacgatcaaaccgattcccgaacgttccatgacccgatcgcaatcgtgacgttcgctgtgtgcgcttcctcggcgagactcacacagcggaacggatttggacgtcaaccgcgtgatcatccgtgaaccggatgatgtgttctcccctgcgggcggattccagcagcatctgttgccagccttccgcagggatcgcaagcgaaaccgtctcgcatcgttccatgaaatcaggctgccgtatggccgtcttgtaatcacggaacggttgaccttgctcgaagaaacgtgccatctccttggcgtcgctctcctgggtggcggcggtctgcaacgcaccggcgccttggggctgaacgccatgcaatacgttggccatcagcgtcagacgattggccatattacgcagcaatagctccacattggccgcatcctcctccaccatggcacgtgtgcggtccggatcggtcaatgccacgcgggtcatgtcacgccaggatcccgcagcgagcgcggccgcgacattacgattcggattgaccacgagttcgttgaccatggccgtggcgatgacgtgcggcatatgcgagatcagcgcggcgcaacggtcatgcgtggcatcgtcaagtacgatcaggcgattggcgcaggcatcggtgatcatcgtcgcgacggccaggaaccgccggtattcagtgcgttcgtccacggtgatggcccatagcgcgtcatcgtataaagcgggatccgaggattcccaaccggacagttcattgccggccatcggatgcgcgccgacgtagcagttctccagtccgacggccttcacctgatcgcgcaccatgcctttgacgctgccgacgtcggtgagcgtcgtcacgttctggtcgatcagcggcttcaaagcggagagaatctgcggcatggccttgagtggattgcacagtaccagcacatcgggcctgccatcggccagagcggccaatgtcggcatgcaggtgatgccgtccgcttcggcggtcgcatacggacgatcattgtgattccaagccgtcacctcgcaacctgcgttgacgagcctgcgtgccagagagcctccgatcaggcccaatcccacgattgcgatacgctgcttcaccacatcagctcccttcttaccataccgtcgttctgccaatcctcaggcagatgcctatcgtcaagacgcactccaccctgcggcagcatccagctggccaccggcgggctcggccgttccctacgaggatagacggccaaggtcttggcccagtctccgtgctcggcgatttccacgagcgcgtcacggaaccgccgttcccatggggccgcgtcgaacgtggcgatgaagctgtaggtgccatcatgtcctttgatcggacgcgagatgaagctggtcatattgagtcctgcatcgcggaacacatccagcagatcggcgagtacacccgggccggtaaccagcgggatgagcgtcaataccgattcatagtccacatcgtcctgggttttcggctgttccagcagatcggcgacttcctcacgtcgggccagcacaagaaactcggtgcgtgcgccctgatagtcctgtaccgcactgccgacgcgtttgatgtcatacagatcgccacagatgctcggtccgaatgcgacctcacccggcttgaggtcgcgacaggcggctgcgttggatgatgccgtcaccgcgtcaagatgatgctcggcgatgaattttctgcattgtgcaaggccatgcgagtgggccgtggcgacgtaggcatcctccagtccggtgtcgggcagcgtataggcgtcaaactcgacgttgacgccgacacgggcgaagccgaccaggtcctgcgcgtcgatcagggcgtcaaggttcggcacgacatacccctcgacgttgttctcccatgcgatgacgccccagccttcgccgttctgcgcggcctgcatgatctgcggcacatcatcgcaggcaatgagatcgaatccttcgggcacgaccggccgcaacaatccggccgcactgaccgccgcctgatgcgtgaatgtgccttggggcccgagatagaacaacttccgtgcattcatatcttcccgttcctccttcatgcttccttgcaccttaccgtagtggtggcccgtagcgcagcccctattccatcggctgggcgtccgtatcggtccgaggctgcacgacgaaccagcgctttggcaggagcaacatgatgcatgggatcagcacgatgccatacagccagaagtagccggcatggtcgctgaagaacggcatattcgcgtcactgccgaaaccgaccggaatcaaagcgtcgccgcccggaccgtatcccgccatgaccgtccataccaccagtgacgagctgatgagatgcagggcaagcccgacgacgccgtcgcgtgagcgggcgcaccaggtggaaaggattacgatgaggaaggccagtgccaggccatatgggatgttcatcgatgctcccatacgatgtgccatcgtgccgacggcaccgattgccgcgccggaaagcacgtcaatgagaagcctcaccggcatcggttgccgatacgaccatggcagcagcctgcgatcgttgtcttgagtcatgctcaccactattctcctcgttccttatgatttcatcacaccgtgtgccgcccgctcgccggaaaaggaaaaaggagagatgcacgcacatgcgcatctctcctctgctcgatcagcgactacttgccctgctgattgttctgacgacgctgcttggcgcgccacttgtaccagtcctcacggctgaggatgatcttgcggattcggatggactccggggtgacttccacgcactcatcctcgttggcgaagtccagggactcctcaaggctcatcttgattggtggggtcagggtctccagcacgtcggcggtagcggaacgcatgttggtcatgtgcttggccagcgtgatgttcacatccagctcatccggcttattgttcacgccgacgacctggccctcgtacaccggggactgcggctcgacgaagaagttgccgcgagcctgcaggcgctgcatggcgtatggggtggcgacgcccttacggtcacagaccatggaaccgttctgacgggttacgatctggccggcccacggggcgtagcctgcggagatggaggctgcgatgccggtgccgcgcgtggcggacagcagtgcggtacggaaaccgatcaggccacgggagggaacggtgaactgcaaacgcacccagccggtgccgtggttggtcatgttgtccatacggcccttgcgatcggccatgagctgggtgacggtgcccatgtactcttccggtacgtcgatggtggtgttttccatcggctcgttgatcacgccgtcaacggtcttggtgaccacctgcggacggccgacggtcagctcgtagccttcacggcgcatctgctcggcgagcacagccaaggcgagttcgccgcggccctggacctcccaggcgtccggacgctcggtcggcagcaccttgatggacacgttgccgatgagttcacggtccaggcggtccttgatcatgcgggcggtgagcttgtgatccttgccttcggtgccggccaacggcgaatcgttgatgccgaaggtcatggagatggccggatcgtcgacgtggatgagcggcagcggacgcgggtcgctcgggtcgacgatggtctcgccgatcatgatgtcgttcacgccggccactgcgacgatgtcaccggggcctgcggaatcgacgggggtgcgctccaggccctgcgtgcgcagcagttcggagacgcggaagttctcgatggagccgtccacacgggacaggccgtaggtcttgcccttctccagggtgccgttgtagatgcggaccaggccgagtcgtccgaggaagtcggaggagtcgatgttggccacatgggcctggagcggtgcaccttcgtcgtattccggggccggaatgttcttgatgatggcctcgaacagcggctcgagattgtcgttatccggcagaccgccgttctccggctgattctcggatgcgtatccggccttggccgcgcagtagattaccggcaggtcgaacagggagtcctcgtcaagatcgatgccctcctcgatgacgtcctgcgccagacccaacagcagatcggatgcctcaccgacgacctcttcgatacgggcgtccggacgatcggtcttgttcacgcacaggatgaccggcagcttggcttcaagggccttgcgcagcacgaaacgggtctgcggcagcgggccttcggaagcatcgacgagcagcacgacgccgtcgaccatggagatgccgcgttcgacctcgccgccgaaatcggcgtggccgggggtgtcgatgatgttgagggtgatgccttccggatgaccgtacttggcggccagcggaccggtgtactgcacggcggtgttcttggcgaggatggtgatgcccttctcgcgttccagatcgttggagtccatcacgcgatccgggacttcctcacgctcgttgaacacatgggactgcgccagcatgccgttgaccagggtggtcttgccatgatcgacgtgtgccacaatcgctacatttcgaatatcgccgcgaaccgccatcgaaacctctcttagtattgccgttctcttgcgtaaccgttcggtacgtgcatggttatcggtacttgaattccgtacttacacacaaacgaaaccaatcctagcgaagcaatgcgacagataagccgaggggcccatcggcgcaacgccgagggcccctgactcgatagagcggaaaatcagtcttccagttccttgccggtgcgctcgggcaggcacagggccgccacgcaggccaggatgaacgccacggcgaacacgatgaacgccacggccttgttgccgccggacagcgtcaggaaccatggcacgagcaacggggcgatgatggcggccactcgaccgcaggcggccgcggctccggcggcggcaccgcgcaggcgggtcggatagatttccggcgtcaccgcgtacaacacgccccatgcgccgaggttcgaggccgacaacagcatgccgaagcagagtaccgcagccacggaaccggcctgggagaaggcgaacgccgccacggcggacacggcgaggaacacgctcagggtcttcctgcgaccccagacctccaccagccatgccgccaggaaataccccggcagctgcgcgatggcgatggccaacgtatagccgaacgacttggtcagggagccgaactgatcggccagcagcgatggcatccaggtgaaggccccgtaataggagaagttcacgaagaaccatgtggcccagatcgccgcggtacgggcgatatacttctttccgaacagttcgcgggtattgatcttcggcaacggctggcccttcggcgaggccaccggctcgacgccaccggcctgttcgaaataccgcaccgcccgttcggcttcatcctcacgccccttggattccaggaatcgcacggattccggaatgtgaatgcgcgtcacgatggcatacagcaacggcagtgcgccgatgagcaatgcccatcgccaaccccagtcgccggtattcggaatcacgaaatatccgatgcatgcggccacgatccagcctatggcccagaaggactccagcagcaccgtcatacgtccgcgctgcttggtcggcgagaattcggagacgagcgtcgacgcgaccggcagctcggcgcccagacccagtccgatgatcagtctggcgatgagcaatgcggccagcgaccacgacagcgccatgccaccgttggccagaccgaaaatcaccaacgttgccgagaagaccgtcttgcgtcccactcgatcggcaacatatccgccgagcgccgcaccgatggccatgccgacgaagccgatggacagcacccagcttttctccgtcggcgtcagattgaaatgcgggtcggccgcgatggcggcgaccacgaacgacaccaagccgacgtccatggcgtcgaatgcccatccgatgccggaggccaccagcagtttgcgatgagccttattgaacggcaatctgtcaagtcgttcgtttcgggtaagttcggccgctcccccggcagcctgttgcgttgcggacatctgatcccttcctgtgttttcccttttttcgaatgcgatgcgtcacgccgtggtcagggcggagagcgcatcatcctgcggatcaatatcggatgcggcgaaatcggtccttgactcggcgacgttccaaggcgttggctgagccgtgccctgtttgtagcgatagaccgtggccggtctgttacggccaacacgcagcttgtcgccggtatcctcaagcagaccggaagcaagcatcttacggcggaagttcgccagatcgatgtcttcctcggcaatcgcctcgtagacgtcatgcagttggctcagggtgaaacggtcgcccaccagccgcgcaacgatgtcgggatattcgattttgccgcgtagccgttccatggcgtaatcgacgatttcgcgatggtcgaaggcgagctccggcagatggtccaccgggaaccatgacacgttgtcgccgtcggcgaactcgacgctctcgtccatgccaccgaccaaggcccagtaaacgatggagaccatcggaaggcccccatgggacctggacggatcaccgaaggtatagagctgctcaagatagcgtggatgaagcgacgtggtggattccagtgccgcataggctgattgctcaagcgaatgatcggcacgcaggccaccacccggcagagcccactgaccaaggaacggctggcgtacgcgtctgaccaaaggcatccacaacgtaccgcgggtctgatcgttccggtcatccgcccgcgcggcaggaccgagtgcgagaatcaccacggaaacgccgacctggggaggttgcctgcgcctctccgaaacgttgcccatgatcataacggcctcgattcgtcagtccgaattgttccgagaccttagtgtaacacttatggtcaacatgaccataaatgctgtttcccgcatatgaccaagccccgttgccggggcctacatgatggaaaccaatcaggcgatgatgcctttggcaatcagttcacgcgcgacctcgcgatattccttcgcggtcttatggttcggcgcatagatggtgatcggcgcagccgccacggtggaatcgggcagcttgatggaccgtgagatcaccgaatggaacaccttgccctgaaaagcctcatagatgcgttgcaacacctcgtcgcagtgcagggtgtgcgtgaacatcgtgaccagcacgccatacacctcaagactcggattgatacgcgtctgcaccttctctatggactgcatcagcagggccacgccacgcaatgcgaaaaattccgcagccaccggaatgatcacgccgtcggcggcggtcaacgcgttcaccgtcagcaaacccagcgacggctggcaatcgacgatgatcacatcatattcgtccttcacctggcgcagcacgccggcaagcacctgctcgcggccaacctcggtgaccaactgcacttcggcggcggaaaggtcgatgttggccggcatgatatcaaggttgtcgaaatccgtatgctgaatcacggcatgcacgtccatacgcggattgaacaatgcggtatacaccgtatcttccaccgcattggcgttgatgcccagacccaccgtcgccgcaccctgcggatcgaaatcgacgataagcacacggcggccgtattggctcaacgctccggcgatgttgatggaactggtggtcttgcccacgccacccttctggttgcacatggcgatgacccgcgccgggccatgctgctgcaatggttccggggcggcaaacgtctcataatcacgtccaagcaaatccgtaggcatactgattaccttaccaacatccttgtgtcaaagttccactgctcccatgctagcgcacacccgtcgtgcaatccggcaatgacgctgcccgttgatcagcgcgcacgcggatgcgcggtcaggtatgcctcgatgagattctcgggactcacgtgcgtgtagatctgcgttgtagttacgctggcatggccgagcagctcctgtacggtacgcacatccgcaccgccctgaatcagatgcgtcgcgaaggaatggcgcaaggtatgcggatgcagcggcttggtgatgtgcgcacgctcaccggcggttcggatgatttcccacaccgactgtctggacagtcgtttgccgcgcttgttgaggaacaccgccctgtgctcggctgctcctttggacttggattgcaaggcgggccgtccgaatctgagatatcgacgcaaagcctcgcacgcgaagctgcctaccggtaccagacgctgtttggagcccttgcccatcagacgtgccaccttatcgtccaaatcgatgtcgtccagatcgacgccgcatgcttcggagacccgcgatcccgtggcatacatgaactcgagcaacgccttgtcacgtagcatcaccgggtcatcggccgcggcatcaccatgcccttgtttcccatcgtgatgccgcgagagcgggatggaatccatcaatcgcatcacctcatcgacggaaagcacgtccggcagggtgcttgcacccttgggcgccttgacctgtgccgcgacatcatcgtgcacgacatgctcgctgagggcgaaacgatgaaaggcatgaatgctggccagtcgacgagccttgctgcgggcgctctcccccgaatcgtcgagcgaggccacatattcctcgacatgccgtgtggtcacgtcatcgagatcatggatgccctgttcctgcagccaggacacgtatttacgcaggtcggagccatacgcgcagaccgtggccttggacagtccccgttccacgtcaatgtgcgcgaggaactgcctgaccagacgttcgcaaccatccatgtcgttcctttcggtcttcgccctattgtcgatctgatatgcaaagacctccgcccaacggagcggaggtcatcatgtacgccaatacgacgtcggcccgtataggctcaggcttccttcggagcgttcacatcagccggaagagcggccttggcctgctcgacgatggccttgaaggtctccggatcggagacggccagttcggccagagcgcgacgatcaagctcaatgccggcgaggtgcaggccctggatgaagcggttgtaggtgatgccttcagcgcggacggcggcgttgatacgctggatccacagcttgcggaagtcgcccttgcgagccttgcggtcgcggaagttgtaggtaaaggagtgaagcagctgctccttggccttgcgatacaggcgggagcgctgtccgcggtaaccggaagccctctcgagaacgacgcgacgcttcttgtgggcgttcactgcgcgcttgacacgtgccatatttgattcctcagctttctattaagtcttgtcttgtcagctctcgctatgctcagcgaccgagcagcttcttcatgcccttgttctgggaagaggccagaacaccgtcggccttcagttcacggcgcttacgagcggacttatgctcgaggttgtggcgcatggcggagccggcgtgcatcagcttgccggaaccggtcacgcggatgcgcttggaagcggcggaattagttttcatcttcggcattgctgccctccttgtttgttacttcgtttcggaagtcttcggtttgtcggatgccaccgcggccttggcttcggctgccgcctgagcctgggcttcctgcttggccgccagacgggccgcctgacgagcctggcgttcggcacgagactgatcgccacgacgacgctgctcggactgggtgtgcacctttttgcccttcggcgcaagcgtcatgatgatgttgcggccttcctgcttcggagcgaattcgacggtgccgtactcctccacttcctgggcgagacgctgcagcagctcgacgccgccaatcggtcgggactgttcacgaccgcgcagcatgatggtgaccttgaccttgtctccgccattcaggaagcgcacgacatggcccttcttgacttcgaagtcgtgatcgtcgatcttcaggcggaagcggatctccttgatttccgcggtgctctgattacgacgtgcctcacgtgccttgatcttctcgttgtacttgaacttgccgtagtcgataagtttggcgacgggaggcttcgcgttgggcgccacctcgacgagatcgaggttcgcttcctttgccaggttcagtgcgacggaagtcgcgatgactcccacctgctcgccattcgggccgatcagacgcacctgggagacgcgaatctcgtcgttaatgcgtggttcgtcgctgatgatgactccaatcctcatgttccgttcggcggagcatcctcgactggcggtctttccaaacttcgtgactcaaggcaagccatacccgcacggataaccacacgaccatacgtcaatacacaatccgcatgcatcgccggcaaccgacgaaaaggctgatgcctgaacccgaggccctgaaaggcttccaggtggggatgtcccgctttcttgatttctcaagccttgtagataataccacaccccgggaccggcgcgtgtcgcatatggcgctcagtcgatggcgatgacttccggcttggtaccgtcatgcacgaagtacacgtcgtaccaggtcaggaaggagtataccgtccagatcttgcgacgatcgtccgtcttgccggcgtaattgtcgtcgatcatcttcagcagggcggcctgatcgaagaacaggccgacatagtcgcgttcgaacacggaacgtacgtacttgtagaacttttcttcgcgcaaccattttttgattggcaccgggaagccgagcttctcgcggtcataccattccttgggcaggtgacgtcccgcggcctgacggaacgcgaacttcgtgttctcgtcattgatcaggtacttggtgggcacctgttcggccacgctcatcagctccttgtcgagcagcggcacgcgcagctcgagcgaatgggccatggtcatcttgtcggccttgagcaggatgtcgccgggcatccactgatgcatgtcgaggtactgcttcttcttgagctcgctcaaccccttgcccttcacgcgggcataggtcttgtccacgatgctttgcacgctcggagccttacggtattcgggcttgagcagccgttcggactgcgcctcctcgaagacacgcgcctggccgatgaagctttcctcggccggggcgaggttcgcatacagatgccacgcacccgggaaggtcttgcctttgcagaaacgcgcgatcgcatgacgcacgcctgccggcatgtgggtcaaccagcgggtcagcatcttgacgggcttgtatttggtatgcacgccgtaatcgatgtagcccgcgaacagctcatcggcgccttcgccgctcaatacgaccttgacgtccttggcggccagagccgacaggaagtacagcggcacgcagctcggattggaatccggctcgtccagatgccattggatgcgcgggaacgcggcgaatgcctcttcgtcggtcagcgcctcggcggtgttgttcagtttgagcagttcggccagctcaccggcctgctgcgattcgttgtaggtgcccttgccgaatccgatggaataggtgtgttcagggcgggccacggctgcgacatagctggagtccacgccgctggacaggaaggatcccacctccacgtcggcaatctgatgggctttgacggaaccgcataccgtatcgtcgatggtattcaccagttcgcccagcttctggtcgctttcccggaaattctcgtcatagtaccgatgaatgctcatctcgccgtcgcgatagacgaagtaatggccctccggcagcttgtacacgcctttgaagaaggtctcgccgattgccgggtactggaaggtcatgtatggcttcagcgcctcggcgttgagctctttgacgaagtccgggtgctgcaggaggcttttgatctccgaggcatacatgaacgtgccgttcatcttggcatagtagaagggcttgatgccgaagtggtcgcgggcgccgaacagttcgcgcctgttcttgtcccagatcacgaaggtgaacatgccccggacgcgttgcagcagatcgacgccccactgctcatagccatggagcagcacctcggtgtcgcttttggtggtgaaggcgtggcccgcggcgatcagttcgtcgcgcaacggctggtaattgtagatttcgccgttgaaggtgatgaccagcgaaccgtcctcattgtagatcggctgctggcctccgcccagatcgatgatgctcaggcgacgatgtcccagagccacatgctcgtcgatgtagtgaccctcactgtccggaccacggtgagcgatgatatcggtcatccgctgcagggtcgggcatttgacatcgattggcatatcgttgacgaatccggcgattccacacataactgcataatcccttcgaagacactagataacaggctaccaaaacgtatgtgcgtaagctgtgtcgcacttctcaggccctcccgaagggcacgtgcgttcccatgatagccttcccaccgccgtattcgacgcaacgactggctacactgtcggatatgaccacatatgattcgcgcacctgcgtcatcttcgccgccggggaatactatcgggagaccccgcacgttccggatggcgccttcgtcatcgccgccgatggcggactcgaccatacacgcgccctcggcatcaatgccgatgtggtcgtcggcgatttcgattccctcaagggcgcacggcccacggatggcgcccgtacggtcaccctgcctccgcaaaaggatgaccccgacctgctgtcggccctgaagatcggttgggcccacggctcgcgggagttccatatcttcggcgcgctcggggggcgcatcgaccacaccatctcgaacattcagctcatggcgttgctcgccgaacgcggggcaagcggttatctgcacggcgacggtacgatcatcaccgcaatctgcgacggcgtgctttccttccccgccaacgatgtgcggccgggccgcatggtctcggtgttctcccattccgacgtatccacgggagtcagcgagccggggctcaagtacgagcttgagcatgcgaccatgagcaatatccgcgtcaatggcgtcagcaacgagttcctggatggcgcgcccgcacgcatcgaagtggagcacggcacactgatcgtgacatttccggccgaggctccactgccgcaggtgacccggctgcatgacttcgacggggatctaggcacgctcgatacggaggtctcttccatcctggtcaaacgcaaatgcgcttgaaaactcattgtgagcgttcacggaaacgacgtcgttttctgaaacacacgaccgccatacgttgccctaagtacaggtgacgcactaaagtgggcggtgttggtaaacaatggcttcattgcgcctcgcgcatgtgtggcctaccctaaagggagaattacatgacagttaagattggtatcaacggctttggtcgtatcggtcgtctggctttccgccgtatcttcgagctgcaggctcgtggcggccaggccggtgacattgaggtcgctgcaatcaacgatctgaccaccccgtccatgctggcctacctgctgaagtacgacagcacccacggcaccttccgtcatgacgatggcaccccggtcgaggtcacctccaccgaagactccatcgtggtcgacggcaaggaatacaaggtctatgccgagaaggatgccaacaacatcccgtgggtcaagaacgacggcgtcgagttcgtgctcgagtgcaccggcttctacacctccgccgagaagtcccaggcccacctgaacgctggcgccaagaaggtcctgatctccgctccggccaaggacgagaccaccccgaccgtcgtgttcggcgtgaaccacgaaatcctgaaggccgacgacaccatcgtgtccgccggttcctgcaccaccaactccatggccgccatggtcaagctgctggacgagaactggggcatcaaggccggcttcatgaccaccatccacgcctacaccggcacccagatgatcctcgacggcccgcgcttcccgaaggctcgcaacaaccgcgccgccgccatcaacaccattcctcactccaccggcgccgccaaggccatcggcaaggtcgttccgtccgtgaacggcaagctgcagggccatgcccagcgcattcaggttccggacggctccgtcaccgagctgaccaccgttctgaacaaggaagtcaccgctgacgagatcaacgccgcattcaaggccgccttctccgccaccgacttctacggctacaacgaagacggcatcgtgtcctccgacatcatcggcgacatccacggtggcgtgttcgatccgacccagaccgacgtcaacaccgttgacggcgtgaccatggctcgcaccgtctcctggtacgacaacgagtacggcttcacctgcaacatggtgcgtaccctgctgtacttcgccgagatctccgagtgagccgtcgcggctagtccattaggttcctaggaatcccgcaggggctttcacctcatggtggaagccccttttcgcatgcctccatgtctcctcatacggccctgctccaacccacgtggaatgtcgtccgattctgccgtttcggtcatccagagcacggtttcgggcccgtggatgaccgaaacggcagaatcggacgtacgaacgtcctatgatgagacgccatgggcaagaaaaaacacgagaaaggcaccggttccacaccggcgaccgtacagctggacaaggccggagtcacattcacgacctatgaatacgcacattcgaacgatcatatggatgacggctacggagttgaggccgccaccaagctcggattcgacgaacaccaggtgttcaagacgctgatggccgacaccggtacggaacgtgtggtcggcgtggtcccggtcagcgggcatatggatctgaaggcgctggccgccgccgtgggcgcgaagaaggcgaccatggccgatccgaaagtcgccatgcgggaatcgggctacgtggtgggcgggatttcgcctctgggacagcgcacgcgccacaggaccgtgctggacgaaagcgccctgcggtatgacgagattctgctgtccggaggcaagcgagggttctccatcggcatcaacccgaatgatctcatcgcggtattggacgccgtagtcgcgcccatcggcacctggtgaccctcagggaagggtcatcgggccctgcgtagctcggacggaagcacgaagtgcatgttctccttgatggtttcgatggtggtcacctcggtgtagccgaagccctgtaaggtttcgaccacgccggagacaagttcgtccggtacggaggcgcccgatgagatgcccacggacgccacgccctcgaaccatgacgggtcgagttcggccgcatcatcgacacggtgcgccctgccgcggccatcagtcgcatcggcaacggcatccgctgcgaagcgcgagttcaggccttcctgcgcgacctccatcaatcgtacggaattcgaggaattcgccgacccgacgatcaccacgcaatccgattgctcggccaccaacttgaccgcggcctgacgattcgacgtggcatagcagatatcggagctcggcggcatctgcagccacgggaagcggcacttcaacgcggcgatcgtaccggcggtctcatcaacgctcagcgtggtctgcgtaagcagcaccagcttggtgtcttcagcgaaatcaagcgagtccacgtcggcctcatgttcgatcagatgcacatgctccggggcctcctcaaccacgccgaccgcctcatcgtgccctttatggccgatatagacgatttcgaagccctccctaacgaaacgcagcacttcgcgatgcaccttgctcaccagcgggcaggtggcgtcgatcacatgcatgccgcgggccgcggcctcggccttgaccgccggggacacaccgtgcgcggaaaaaacaatcggaatgcccgccgaagcggcctcatccggaatttcgcggagctcctgcacgaacaccgcaccctgagccgacaactcctcgaccacatgtttgttatgcacgatctgacgacgcacgtacaccggtggcaggccatccttgcggacggggaccgaagccttcagaatcgtctgcacggtaaggatcgcccgatccacaccggcgcagaatccgcgagggtccgccaatacgatgcgtttggtcatgggtcgccgcctttcatgtcatacaagccctcaccaaatactagagcacggccgttcgcataacgcgcgcgttcatgtgagcacacgactattgcacaaccatatcgccggcgatccctcatccgatagacggtcgcatgcacaacacgccggcgaacgggcatggcaccctccaagagaaggtagacttgaccgttagcggtaacaaccgttatcgatacgtttagcggcattatggagtgatctatgacctgcaagaacctgcctgcccgctccggacagcaattctccatctcccacggcgactataaggcggtcgtcaccgaactcggcgcaacgctgcgcaaactgacctaccgaggcgaggaccttatcgtctccctcggcccggatgacgtggtgagctgctgccatggccagattctcatcccgttcccgaaccgcgtcgaaggcggcgaatacaccttcgaaggcaagacctacacgttgccgatcgacgaacacgcgcgcaacaacgccatccacggctatggataccgctcctattggaagctggaaagcctcacggaggaatccgtcgcactgacctggcgcacacccaatatggccggctatccgttcgacatcgtagccaccgccacctatagcctcgccgacgacggtctgcatctgaccatcgacgcctataataacggcgatgcgaacgccccatgggccctggccatccatccatggctggccaacggtctgaacggatacggcgacgagatcgacggccacaacgcgcagtgcagcctgacgctgccaggcaacacgcatgtgaccgtgaacgaaaacctgatcccgaccggcaccgaaccggtggacggcaccaagtacgacctgcgcaaggacacgctgcttaccgaacagcccttcgatgatgcctggacggacctcgatcacgccgaagacggtaccgtcaccgcggtgttcacccgtcccgacggtctgaaggtcaaggtcggaggcgacgagaccatcacctccttccaggtgtgcaccggtaccaagttccctgccttcaaacacccggcaggcgttgcggtggaaccgcagaccgcctatgccaacgcattcaacaccggcaacgatctcatcgtcatcaagccgggcgagaccagcagcacctcgctgttcctcggcgcgttcgctcagtgaacgcctgatttgcacaacgtcgcaccggtgtgcgataatcccgaaggcttattaatcgcaagtaaaggagtccaatcatgggcatgcgcggacgtaagcgcaaggatcgtcgtaagaaggccgccaatcacggcaagcgcccaaacgcctgatccctgccggcgtgaataacgccacagagcatcaacaaacccgcggattcgcaatcgattccgcgggttttcctattcaccgcaacaatggtcgagcgtggcacgaagacgttccaataggcgctccggcgcctgttcgggacgcagataggcgcgcatcgccgcaatcaacgcccgttcacgctcgtcacagcacgtttcgggatcgaagtgctcttccatgctgacatgcacgctcgtatgcgtcacatgcgttacggacccgtccgcactcctgctggtgatggagatgcgccgttcgacggagtcaccgttcatgatcttccccttccgacggaagcggtcttcgcaccggagcgtgtgccggccgcataccctcgttccttcgcatatgccgcaagttcctgcttgagctgcgtgcgggcacggttcagacggctcatcaccgtaccgattttcacgccctgctcatcggccacctgctgatatgacttgccgtcgatggccgcatcgatgaacacctgcctgcgttccggcgaaagcttgttcaacgcggccatgatctcttcgggcgcataggcgtccagatactcctgttcggcggacttcagctgctccgacgaatgttcggaggcggagtagatatcccaatcgtcgtattcgccggtggagccgttggcacgttgcggcctgcgtttggccttggcgtactgattgaagtaggcgttgcgctcgatggtggtcatccacgcggcgaagttcgtgccctgtttgaaggaatcgaaggccttgaacccgcgttcgaaggtgtcctgcaccagatcctgcgcatcgtcgggattgttggtcagcttcatggcctgccgatagagcacgtcgacgatgggcatggcgagccgttcgaagcgcgcgcgcctgtccgtcatgctttcctgcccatcagtcacggtttcattctatcggcatgccgcatgcgacgatgtccgcaaaactcccaagcgattcaaagctcgttcccagaacacacggtttatataatcatgttggtttttcgctgagagaaagatttgcccatgtcattgtcccttgccgacggcgtgcatctgctgtcctcccatcatctgctcgatgaggtcatcacacctgaacgttggagcctgaatgccgatggcatcgacaatgccgatgtgccgttcacgcatatcacctatgacacccgcaccgtgcgcgaaggcacgctgctggtgtgcaagggccgcttccggccggaattccttgacgggctcaaggagcgcggtctcgtcgcctatatgtcggaacgtgactactccgatcacaccgaggttccgggactcatcgtcaacgacgcgcgcaaggccctgagcctgctgtccgccgccttctacggcatgccccagaacgaactcacggtcatcggcatcaccggcaccaaaggcaagaccaccaccgcatacttcacgcaggccatcctcaacgcctattccaacggtcgttgcgcattgttctcctcggtcgataactgtctcgacggccatacctacgtggaatccgaactgaccacgccggagtcgttggacgcgttccgcatgatgcgcgaggccgcggacaacggcatgcgatacctggtgatggaggtctcctcccaggcctacaaggtcaaccgcgtccacggcctgaccttcgacgtgggagccttcctcaacatctcccccgaccacatcagcgacatcgaacaccccaccttcgaagactatctgtattgcaaacgtcagttggcataccatgcacgcgccttcgtactcaacgccgacgccgaccatgccgatctcattcgcgaggatgcgcaggccgcgggcatcccgcttgcggatttcgccctgcgcaccgatgacgcacctacgaatgcgacgctgacggcccgtccgtcgaacgccgaacacagcgcgttcagcatcgtcgcgaacggtcatgatctgggcgagttcagcctgtcattggctggcgatttcaactatgcgaacgccctcgccgccgtcgcactggcgcatgaggccggcgtgccattcgattcggccgccatgcatgccatggaatcggtgcatgtaccgggacgtatggaactgttcaccggcacggatggcgacaccgtggccatcgtcgattatgcgcacaactacaccagcgtacgtgcgctgatcgatttcgtcgaacagcgctacggcgagcgcaagccgcggattacgctcgtcgccggttccgccggcaacaaggcgttcgaccgccgtcaggaaatcgtcgaggccgcacaggatcgcatcgcacgtttcgtattcaccgccgaagacaccgataccgaaccgtatatcgacatctgcaacgaaatgctcggccatgtcaccaacgaccatgtggatgccacggtgatcgtcgatcgtgtgaaggccatcgagagcgccgtcgagcaggcgcattcccacgatggtctcgacgtgatcctcatcatcggcaagggccacgagcgttggatcaaggacctcaacagccacgtggcctacgaaggtgatgattgtgtggtggaacgactgctgaacgtggcgtaggagtagcatcgtcttcgagctcatgatttgttcatggcgaccggacgatactatcttcaaggagcaccgcggaaatggcgatcaaacctgcaacgttcacgcttgcctatgcaatcgacgtgctgaaggagcatcatctgcttcgcgaaatcgttcacggccgccgatggacgcttgacgcttcggatctgcccggcgcgaatgagccggtcgggtcgatcacctacgatacccgcaaggtcgatcccggttcgatgctgttcgtcaagggccgtttcaagcctgaattccttgacggcatcgacggcaaaggcctggccgcatacgtggcggaaaccgaatatgccgatcgcacgaaagccatcggcatcatcgtagaggacgtgcacaaggccatgagcctgctgtccgccgccttctacggcatgccccagaacgaactcacggtcatcggcatcaccggcaccaaaggcaagaccaccaccgcctatctggcgcatgccatcctgaacgaatattcgcatggccgttgcgcgttgttctcttcggtgaacctctgccttgacggtcataccatgctggcgtcgaagctgaccacgccggagtcgttggacgcgttccgcatgatgcgcgaggccgcggacaacggcatgcgatacctggtgatggaggtctcctcccaggcctacaaggtcaaccgcgtccacggcctgaccttcgacgtgggagccttcctcaacatctcccccgaccacatcagcgacatcgaacaccccaccttcgaagactacttccgttgcaagcgccggttgatcgccaacagccgttcgctggtgctcggcgccgactgcgatcaccgtgatctgctcatgcaggatgccgccgacgcgggcgtcaaggtcaccgagttcgcattgcatgatgccgcacggggcctgacctccccagcacaggtcatcgcccgcgtcgatccggaaaacaaagccggtttcatcgtttccgtcaatggctcggatcttcggccgatggagctggacatgtccggtgaattcaatgtcacgaacgccgcggcagccgtcgccatcgccatcgaggccggcgtgccggaatccgacccgtcaatcgccgccatgtgccgggtacaggtgcccggacgcatggaacgcgtcaaggcgggagacggtctgctggtctacatcgattttgcccacaactatctttccgtcaaatcgttggtcgacgaaatggtacggacctatggcgaacgccgcccacgcatcacgctggtttccggtaccaccggcggcaaggccgtcgacagacgcgagggcatcgtcaagggggcgcttggccgtgtggaatccttcatcttcacattggacgacccgaattacgaggatcccacggacatcgcgcgtcagatgcagtcgtatgtgaccgacccgacggcccggacgcagatcgtcgttccgcgcgagctcgccatcgaaaaggccatcgccgatgcgcgtgagcatgcggaccggttcaatatcgtgctggtcatcggcaagggcgacgagacccgtaacatcatcaacggcaagccggtgccatatgagggcgatggcgccgtggtgcgtcgcgtactcggcgaatagcacggccgttcgtcacacggcacggggtaaggtaggtcactatgacacgattccaaccgattctgctcggcagcgacattaacgtctacggcatggccagggcgttccatgaggagtatggcatcatctccgaggcgtacgcctacttccagctcagccctatgaagttcagcaatatcgtgaacgtgcatgtcgtcgatgatttcaacaatttcgtgacgttccgcgatttcatgctcaacctcggcaggcgtatgaaggccgaggatccggatcgcacgctgttgctcatcccctgcggcgacgtgtatgcgaatctgctcagccagtgcggggacgatctgcgtcgttatttcgtatacaacacgctcgacatcaatctgtcacgccgactcgcctacaaatccacgttctatcagatctgcgaacggtatgatctgccgcacccgaagacgaagaccgtaaccgccgacggagtgaaggcaggggaataccgcgatctgccgttcccctatccggtcgcgatgaagccggccaattccgtcgaatggctgaacgtcgacttcgaagggcggcgcaaggcctatatcttcaacgacccggccgaactcgacacgatcatcagacgtgcctacgatgccggctatacctccgaaatggtgattcaggatttcattcccggcgacgattcacgcatgcgtgtgctcaacgcgtacgtggaccagcatcatcgcgtacgcatgatgttcctcggccatccgttgctggaggatccgtctccggtggcggccggcaactatgcggcgatcctgcccgactacaacgagaacgtgttccgtcgcatcaaggcgttcctcgaggatatcggctatgaaggcgtcgccaatttcgacatgaagtacgatgagcgcgacggcgaatacaagctgttcgagatcaatctgcgtcaggggcgttccagctatttcgtgacgttgaacggtttcaacctggccaaatactttgtggaggatcttgtcgaggacacgccgttcgacggcgagaccctgttcggccgcggttcgaagctgtggatggagattccgaagtcggtgttccttgagtatgtcgccgaaggcgatgacaaggaaaccggcaaacgcatgctcgaatccggggattggggcaccacgctggaatattccaaggatatgaatccgctacgctggctgatgatcaggcatatgttcgcgatctataggaaaagctacgccaaatacttcaccaaaaagggtgagatgaagtgaaacgaccgttcttcgccgtattgggcggcatgggcacattggctaccgagagctacatccgtctggtcaaccacgccacgcatgcgcatggcgatcaggattacctcgactatgtggtgttcaatgacgcctccgtgccggatcgcaccgcgtatatcgtgggggcatccgatgagaacccgttcccggtgattgccgacgatatcgaaaaggccaccgcgatgggcgcgagcttcatcgtgctcacctgcaatacggcgcactacttctatgatgatttccaaaggctgacgccggtaccgattctgcacatgccgcgcggcgccgtgaatcgcatggcacaacgctacccaaaggaacggttcccccgaatcggtttcctcggcacttccgggtcgcgcaaatcgggcgtctatgcgcgtgcggccaccgaagccggatatgccttcgtggaaccgaccgatgacctgcaggagcgcatcacttcgctgatttacgatgatgtgaaaggctcgggagagctgaatcaggaacgatacgaatccgtgctccgtgacatgctcgacccagccagcccttgcgcctgcgacgcgctgattctgggatgcaccgaactgagcgtactgaacgaggcgttcccgatgcctcagctgccgatcatcgatgcgcaggccgtgttggtggaagacaccgtggctcgcgccaaatccttgcgctaagcaggttgcggcccctcacgacgggccgcaacctttcgatgcataaatccatgcctggcgtctagctatgcttcggcatcatcggcatcatcggaaccgacattgccgaaatcattgacatcgaaatccggattggcatcggattcgaaatccgcttcggccgcatcctgatccttgcgcggctccggttccacggcctcctggaacacacgctcgaccttcggcttcttcagatccggattgatcttctcctccagcatcaggcgcgcgtctccagccgtggtgaagctaccgcagataagcacgccgtgcccgtagcctacgccgagttcgtcttcggaatcgaccatgttgacggcttcctggatggcatccggcagttgcggaatgcaggtgacgcgttccggtccgaacacctgatccgcgatcttcttcaggtcttcggccggcatcacacggtcgcgccacgagttttcggtgacgattacatggctcagcagcggttcaagcacgccgagatactcttcgacctgcttgtcccccatcatggcgatcacgccgacgagctgctggaagtcgtagttctcctcgatggcggcacgcagcgcctcggccgcgttcacattgtgcccgccgtcaaggatgatggtcggcgaggtgcggatctgttcgaggcgtcccggaatcttcaccgtactcaacgcttcggccaccagatcgccgtcaagcgcgccgtttaccggaatcaccgcctcggccgcgcacagggctgcgagcgcattatgcgcctgatgctcgccgaatttggcgaccggcacttcctcatatgtgccgttgggggtgcgcagggtgaccatctggccgccgacggccggtacgcgggcgacgacttccgcttcgatgccgtcgcgtaccagattggcatggttgcccttggcggccttctcgatgatcggcatgacggcctcctcatgcggctgacgcccgatgacggcggtgcagccgggcttgatgatgccgaccttttcggaggcgatctgttcgacggtgtcgcccagccacgccatatggtccatgtcgatgggaccgatgatggcggcatcggcgtcgagcacgttggtggcgtcccagcggccgcccatgccgacctccacgatggccacatcgaccggagcgtcggcgaatttccagatggccatggcggtaagtacttcgaagaagctcattttcggcttcccgagctcctccatcttcatgtcgacgatggcgatcagatcgcgtacctgatcccatgcgtcgacgaagtcgtcatcggaaagctgttgtccatcgatggcgatgcgttcgttgacatgttccagatgcggcgaggtgtacagtcccgtgcgcatgccgtaggcgcggcagatcgactcgaccatgcgcgcggtggatcccttgccgttggtgccggtgatgtggaccacgcggaaggactcttccggatgccccatgacgtcgaggatcatcttcatgcgcctgaggtccagattggtggtattgcgttccgatggacggcccatgatgtcacgttcgacgtcgatcatgctttcgttgttgcgattgggatgttcaaacgacatgctgtgctgtttccttacgctggtcgatgcttactcactgaaaccgtccccattctaggtgggcgcatgaacgttatgacgccgcaaaacgtaataggattggtggcggtaattcattggattgttcaggagatgtgatgagcgaagtcattaccgataaggacaaggaatacgaggctttggagcgggagtccgcaccggggccggatcaggccatgagcgaccgtgtgaacaatcgttccctacgccctcgttccgacgcgttcaaggagttcatgaccaccggttgggatgacaatgagccggccatcgaaccgttggaatcctccaagtacacgccggcacgtcttgaggcgctgggcagggcgttcccgggcgaacgcctcgtaatcccggccggtcagccgaaggtacgcaacaacgattgcgactacgcgttccgtccggacaccaccttctcgtattacaccggtcttggcgaggactatgaggccggcgcggtgctggtgctgaacccggtcgatccggattccgcggatgcaaaggccggcaggacgcatgagccggaactgttcgtggctccgcgcgcgaaccattacacgcaggacttcttcatgaatgcccactatggcgaatattgggtgggtccgcgcgcgggtctgcgggagatgaccgccatgacgggcatcgagacgaacgacatcgcgcaactggccgatgcactgagcaaggatgtcggcaccgaggccggtgcagtacgcgtccgtgtgattcgtgaggccgatccgcaaatcaccgagatggtagaggatattcgcaaggcgaacggtttcgccgatccggacggcaataccgccgccgacgacagactgcacgaattcgccgccgaggcacgcatgtgcaaagacgaatatgaggtgcgcgagatgcgcaaggccgtggccgccaccaagcacggcttcgacagcatcctgcgcaggctgccggcggctctgggcaaaccgcgttcggaacgtatgctggaaggtgcgttcaacgcaatctcccgcgaggaaggcaacgaggtcggttacgacaccatcatcgcatccggcgcgcatgctccgattctgcattggatgcgtaacaccggtaccgtcgcatccggcgagctgctgctaatcgatgccggcgtggaagtcaacagcctgtataccgccgacatcacccgtacgttcccgaccaatggtaggttcaccgactttcagaagaggctgtatcaggccgtgctggactcccagcaggccggtttcgaggcggccaagccaggtgccacgtattccgacatccatcatgcctgcatgcgtgtgatcgccgaacgcctgcacgaatggggcattctgccggtcgacgtggaggagtcgctctcccccgccggtcagcagcaccgtcgttggctcgcctgcggcgtggcgcatcatctcggccttgacgtgcatgattgcgcgcaagcccgttacgagtcatatcagggtgccgaaatccgtccgggcatgatcttcacgattgagcctggcctgtatttccgtgaggatgacttgctgattccgccggagtatcgcggcatcggcatccgcatcgaggatgacgtgctcatgaccgagaatggtcccgaatggatctccgcaggcataccgaagcagatcgatgacgtcgaggcctggatggccgacatggcgcaatagtcttccaccgtactccccgacggggaggaaaggaacgtgatatggcaacccctgaattcgtgttgaaactccgcaggaagatcggccacgatctgctatggctgatgggcgtgtccggctacgtcgaggacgaacggggccgcgtactgctgggccgacgttccgacactggcgaatgggccatggtgtacggcatcaacgagcccggcgaggagccggctgacaccgtggcccgcgaagtcaaggaggagaccggcgtggacgtgatcgtcaccgatctggtgtcggtgaaatcatctcgccgcatactcacctacgcgaatggcgacaacaccatgtacatggatcacctgttcatctgcaggcccgatccggccggtaacacggaaccgtacgtcggtgatgaggagagcctcaacgtgggctggttcttccccgatgagctacccgggccattggccgccaccacggttgaacgcatggggtatgtgcgtgaatatctgaggaacaaggccggtggcgacgcccacgcgcagttctgcttcagcggcgagatccactgaagttcccgccaacgtaagacggcgatgcctgcgacgatcggtccgtcgcaggcatcgccgtctatgctcctaaatccctcatccctactgttgggccgcgagcaactcgtgcagatgctcacgatgcccgcgttgttcacgcggatccggcaccggcaacgaggccagcagcttctgcgtgtacggattttgcggatgttgcatgatctggtcggcatcgccatgttcgacgatcttgcccttgtgcatcaccatgatgcgatcggcaagcatatccactaccgcaagatcgtgagtgatgaacaggcaggcgaaaccgatttcgacctgtagtttcttgaacagttccaacaccttcgcctgcaccgacacatccaatgcggaggtcggctcgtcggcgatgagcaggctcggcttcaacgcgagcgcacgcgccagggaggcgcgttgacgctggccgccggacagctcatgggggaagcggttcatgtatgcgcgtggcagctggaccatttccagcagatcgcccacataatgccgtgcgtcagccacggaggagtatttcccgtgcacgatcagcggttcggccacgttctccgcgatggtcatcagcgggttgaacgagctgccgggatcctggaacacgaagccgatgtcggcgcgtttgggcttgaaggcacgttccttcacgccgttcatttcgatgccgagcacgttgagcgaaccgccggaaaccttctgcaggcctgcgatggcacggcccgtggtggatttgccggaaccggattcgcctaccagtcccagcacctcggaacggtggatggtgaagtcgatgccatccacggccttgaaatcgggctgcatgagatggcccggatacgtgatggtcagccccttggcctcgaccgcgaccggctgttcacgccaatccttttcacgctcgatgaccttgccattgccgtcacgcacgatgagcttctgcccgatgcgcggtacggcacccagcaaacgcttggtgtagtcgtcctgcggtgaatagaagatctgttccacgccgccttgctcgaccacatggccacggtacatgaccacgacctcgtcggcgatgacggcgatgacgcccatgttgtgcgtgatgatgagcacggaggcatcgaattcgtcgcgtgcgagacgtagcagatcgaggatttcggcctgtacggtcacgtcaagggcggtggtcggctcatcggccagaatcagaccgggattgagcaccaacgccatggcgatgacgatgcgctgcttctggccgccggagaactggtgcggatagtaatcgacccgggtttcggcgtcgggaatgccgaccttcttcagaatgtcgatcgccttggcacgcagctctttcttgtctttcatgccgtgggcccgcagcccctcctcgatctgccagccgatggtatacaccgggttcagcaccgaattcggctcctggaacaccatcgccgcctcggagccgcgcatttcgcgtagctgctcgccggatagggacagcacgtcgagttcctcgttgccggcacggttcgacaggtagatcgcaccagaggtcgttgccgtttccggcagcagtttgatgatggagcgcgcggtcacggacttgccggaaccggattcgcccaccacgccgatgaccttcctgcggggaatcttgaaactgatcccgtcgatggccttgatggagccggcgtcggtcatgaaggagacgctcagatccttgatttcggcgagattgccgttgtcgatttcgctcatcggttcactccccttccttggagccccatgcggaggccacgaatgatggatcatggtcggtgacggtcaccggggcgtcgatggcacccatcgggtttctggccgcggcaagttccgccatgacctcgttgcgggcgcccggcttttcgttcggatcgacggaggtgtcttcgatggatccgaccacttcgcccgcggatttgcgtgcacgcagtcgcggatcggcgagatcgttgagcgattcgccgacgagggtgatgcccagtacgatcagcacgatggcgacgccggggaataccgcggtccaccagatgccggcggtcacgtcggatacggaacggttgagatcatagccccattcggcggctgcggtcggttcgatgccgaagccaaggaagcccagaccggcaagggtcagaatggcctccgatgagttcagggtcaggatgaccggcagggttcgggtggagttcttgaacagatgcttggtcatgatgcgccaggtggaggcaccgaccacacgtgcggattccacgtatgcggattccttgatgcggatcacttcggcacggatggtacggaagtactgcggaatatagaccacggtgatggagatgccggaagcgaagatgccgctccacagtccggattggccgtgggagatcataatggccatcagaatcgccaacagcagggacgggaaggagtagacggcgtcggcgatcatcacgagtacgcggtcgacccagccgccgaaatagccggagaccagtcccagcagcacacccgcgaagatggacagcagcacggcgatgacgatggcgatgaccgcagtgcgggaaccccacaccacacggctgaacacgtcatagcctccggcggtcgtaccccagatatgttcggatgacggtgccgcctgggccgggaaggatacgccgttggagtccttcagctgagcgtatccgtatggtgcgatcaagggtgcgaagatggcgacgagcaggaagaaggcggtgagcgccagaccggtaatcagcatgcccttctgccagccgacggctacgcgcagttccttgataatcggaatcttggtccagaacagtgcctgtttgttgattttgagcctgcccagacggtcatcgccgggaacggtgacattgttgacggatgcttcggtcatgtcagtacctcactctcgggtcgaccagtgcggcgatgacgtcgacgatgaagttgacgacggccacgatgatggcgatcagaatcacgatgccctgcaccgccacgaagtcacgtgccttcagatattgcgaaagcatgaaaccgaggcccttccattcgaaggtggtctcggtgagtacggcaccggcgagcatcagggcgatctgcatgcccatgacggtgatgatcggaatcagggccggcttccatgcatgcttgttgagcagacgcttttcggagacgccgcgggagcgggcggcctcgacatagccggaagtgtaggtggagatcacgttggtacgcaccaggcggatgaatacgcccgccgtcagcagtcccaatgcgagggccggaagcaccgcgtgacgcagtacgtcgacgagcacggacatatcgcccaactgaagtgcgtcgatgatgtagaaaccggttggcgagaccagtcgggagaattccatttcgctgctcaatgacgaacggccggatgccggcagcacgttcatccagatggcgaagatgagtttcagaatcaggcccaggaagaacaccggagtggcgtagcacagaatggcgaaggtgcggatgcccgcatcggccgcacggtcgcgtttgcgtgccgcgatacggcccaggccgatgccgacgatgagcgccacgataagcgccaggaacgcgagttcgaaggtggcggcgccgtaacgggtaagaatggtgatgaccttttggttgtcggtcagcgtggtgccgaggtcaccgtgcagcaggccgttgagataatcgatgtactgtacgaccaatggacggtcatagccggccgcgtggatgcgcttttgcagttcctccggcgtcaggcggccgcctagggcggcggaaatcggatcgccggtggcgcgcatgacgaagaagacgatggtaacaagaatgaatacggtaggaatgatcagcaggaagcgggtaagcacgaagcggaagaatccgctcgaaagcttgtttttcttggctttcggctgagccacggttgcgctttgcgtcacgtcgggctccttttccttgatggatgatgcagatacaaattgagcccccgcccgactcgaaacggccgggcaggggcggtcaagtcacattcaggacttggtcacggaggcgtaacggaagcggaaggaggcgtcgagcacgacacccttcacgcccgaaccggtgacggcgacctgggcaccctgcagcagcgggatggtggagaggtcatcggtctcgagcttctggatttccttcagcgtgtcctcacgttccttgtcgtcggtctggccggcctgcttgacgatcaggtcattgacttccgtgttggagtagccgttgttcacgaagttgccgtcacggaagaacggagacaggtagttgtcgggatcggagtagtccgggaaccagccaagctggtaggccgggtaggaaccatcggaatccgaggtgatcacgcgatccttgctgtactgggtccattcggtggactgcaggtcgaccttgaacaggccgccttcttcgagctgggccttgatggcggcatactcgtcggcggaggactggccgtagtggtccgggttgtactgaagcttcagatcgaccggggtcgtgacaccggcatcctcgagaaccttcttggccttgtcggtgctcggcttgccttcgccgtcaccgtaggcctccttcagggtgtcgtcgtgaccggacagaccatccggaatgaaggagtacagcggggtgtaggtgcccttgtagaccttggtggacagctcgtcgcggtcgatcaggttggcgacggcctgacgcacggccttggccttgtcggcgttcggctcgctggacttctcgccgtacggcatgatcttgaagttgaaggtgatgaagcgctcttcgccacccgggcccttgacgaccttgaccttgtcgtccttggacaggtcctcgatgtcggtcggggtcatggagcggtaggcgacgtcgacctgtccctgctgcacggccatcttcaggttggaggaatcggcgaagtacttgacctgcacggcgtcgttctttgccggagtcaggccatcataggagtcgttcttggcataggccaaggcctcgttcaccttataggaggtgagcttgtacgggccggcgaaggcattgtccttgacgatggtgtcggcgtcggtgagcttgtcggcgtcgaaggactcctcatccacgatcgggcctgccgggctggaaagcacctgcttgagggtcacgtcgttcttgaccttggagtggaacaccacggtggtgtcgtccttggcttcgacggagtcgatgttggcgagcagggatgacggaccgttctcgtcgttgatcttgttgatgcggtcgaaggagaacttgacgtcggaggcggtcagatcgtggccgttggcgaacttcaggccggacttgagcttgacggtgaattcggtgccgtcgtcgctccaggtgccgtcatcggcggcgatgtccggggacagctcggaggtgttgtagtcctgggaatacaggaacgggaacacctgaatctgcacggcgtaggaaccgttgtcataggagccggccggatcgaggctggtgatcttatcggtggtaccgatggtgatggtggtgccgcttgccgtggaaccgccgtccttcacgccgccgcaggcggcaagggatgcgatggccgcgacggaagcgagcgcggcgatgactttcttgcgattcactgaggattcctctctctaatccttgaattccaaaggcatctcgtgattgaaatggcttgactccttagaattggcgcctaatgttaaccgcacgtttcgtgtagggcaatatcgtcccgtctcctgcattgttggtatcggaaaaccctatttttccccgttctttccacgattcatctttcccacgatgcccggtcgattaatgagacgcatgcgagcgagcatgcgtttcggccgaatacacttggcgacacgcggatgatgcgcggcttgtacattgacgttaacagcgttaatatatcaactagttaaacgagagaatccgtgcatcggcgcaaggaggtgttatgagcagctacagcatgcaacaatcatcgatctccgaaaacaatcggtcacgcatcctgcaatatctgtatcacaatggcatctgctcccgcgcccagatcgccaaggccattgaactcacccccgcggcaatcaccaaaatcacggcaaaactgctgtcccaggacgtcatcgaagagaccggcgacatggagggcgacaagaaccgtcgttccatcggcctgaacctcaattgcgcgaaataccatgtggtcggcgtcaaattcgcccgcagtctggtgcagatcgcggtgttcgacctcaaatgcaacaagatctcgctgaccgacctacccaccgtcagcgaagagcacatccccgacaccgtggagcaaatccgtcacaccgtccggcaactcatcgccgacgatccgcacatcgtcgccgtgggtatggccgtcccgggcccgtatctgcgggacgccggccataccgctctcgtctcctccatgcaaggctggaggcaggtcaacttcatccacgaattcagcacggccttcgacgtgccggtattcgtggagcaggatgcacgagccggcgcattggcgcaattcctgttcaaccccgagctgtccgaaggctctctcgcctattatctgctgggtgaaggcatcggactggggctgatcgacgacggtagaatcttctacggtgcgcacggcaccgcaaccgaaatcgggcacgtctccgtcgacgtcaacggcaggccctgcgactgcggcaacgtcggatgtctggagcgctactgctcggcggtcgccatccacgaggagctcaagaccgaaggcgacatcgtgcccggctgcgaatccatgacccacgcgcaggcatgcgcggcgctgttcgccaaagccgacgcgggcgacgaagcggcccggcagctggtcaacaaagcggccaggtacatcggcttcgggtgcgtgaccatcatcaatgccttcaatccaagccacatcgttctgggtgacatcgtctcccaggcaggtcagccgctacttgacgaggtcaaggccatcgtttccgaacacaccattccggaagtgagttcggagaccaccatctccctgtccgccctgcccaccgacgccaccgtcaccggagccgccgccgtggccatcaccaattttctggaacatccttcgatgttcttcgacgtcgcatagcacgccgccatctaaagaaaggaaaaccatgtccaagccaaccgtcatctccctcggcgaaatcctttgggatatgctccccaccggcaagcgtgccggcggcgcccccgtcaacttcgcctatcatgcctcgcagaatggcgcggaaggctatgccatcagcgcagtcggcaacgacgagctcggtgcagagctgatcgccgacgcccacaaggccggcatcaacaccttggtgcagaccaacgaatacccgaccggcaccgtggacgtggcgctgaccaacggcattccggaatacaccatcgtcaagaacgtcgcctgggatcacatcaagctcaccgacgaactcatcgacgccgtttccaaggccgacgccgtctgcttcggcaccctaggtctacgctcccccgagtcccacgacaccatcatcgaactgctcaagcacaccaaggaaggcgcgctgaagttcttcgacatcaatctgcgctccgacttctactccaaggaactcatcgaagagctgcttggctacgccaccgtgttcaagatcaacgatgacgagctgctgctcatgcgcgacatgttcgagcttcccggaaccaccgacgaggaagcgtgcaactggttcatcaagaacttcggtctggagtacatcattctgaccggtggtgccaccttcagcaccatcatcgccaaggacggcgaagtctccaccctgcacaccccgcatgtcgaggtcgccgacaccgtcggcgcaggcgattccttctccggttccttcaccggcaagatcctcaccggggcccccctcaaggaagcgcaccgtgcggccgtgaacacctccgcctatgtgtgcaccaaggaaggcggctggccgacctatccggcagaaggcgttccggactatctcgccgcggcggccaagtaatcctttcccggtctcatcatcatccacaggtccacggtcatcgaacgatgtcgtggaccttgttgtattgcgacacctgctatgatgaatgcacgtcaatcgatttacgtattcaacgaagaagttgccatgccaccgaccaccaatgccataccccaatccgtctccatcttcatgcaacgcatcaccgaactgtgcggtacggaacatgcggactgggccgagaatttcaacacctgcttcgccaacacgctgaccaccaccgtgcgtcggcatgacgatggcaccacgttccttctgactggcgacatcccggccatgtggctgcgtgattcctccgcacagttccgcccctatctcgtcatcgcccaagacgatccggacatggccgatctcatcgcggggctcgtccgccagcagttccggttcatcaacatcgacccgtacgccaacgcattcaacgagacgccaagcggagccacttggaatcctgacgatcggaccgattcgttcggaccttggctatgggaacgcaaatacgaagtggattcgctatgctaccccatccaactcgcatggctgctgtatcgtaataccggactgacctcgcatttcgacgaatcgttcgtctccggcgtgcgtcgcatccttgacaccttcgagaccgaacagaatcacgccgagtctcggtaccggttcttccgcccgaacgatgacccgcgtgattccgtgccgaacgaaggcctcggcggaccgtttgccgtcaccggtatgacctggtccggattccgtcccagcgacgacgcctgcatctatccgtacctcgtgccgtccaacatgttcgcggtcgtggccatgggccatcttcggcagatcttcaccgacgtgctcgatgatgccgaaatcgtacgccgcgcaggcaaactgcagcacgacatctccgacggcatcgcgcaacatgccaccatacgcaacgcggcgggagaacggatctacgcctacgagacggatggcctgggcaacgccctgctcatggacgacagcaacgtacccaatctcatctcggccccatacctgggattctgcgatgccgacgacccgttgtatctggcaacccgccgcaccttgctcagctccgagaatccctactatttcgaaggacccttcgcccgcgccatcggttccccgcatacgccaaccgggtatgtctggccaatcgccatggccatgcaaggcctgaccagcaacgacagggctgagaaggaacgtctcctcgatcagcttgtcgcggcggacgccggcacgcatctcatgcacgaaagcttcgacgtgagtgatccgacgcagtacaccagaccatggttcagttgggcgaacatgatgttctgtgagctggtcatggacttcttcggcatccgcatcaacacatgagccaagacgtcggatatcgacgttcggggcgattgtcgggaatcgctcgaagaaaacttgcaattcccagcagacttatgatatcttgaaatgtccggctgcaaagtcggaatgcttgataactcaagattggggctgatcggtttcgacggtgacctgttcgtcgcagggaagcgtgccgagaacgtagggtccgctcgtggatgacccctacacaagaataagtgctaaatctaaccgcactgagttcgctctcgctgcctgagcttcgcgccaggattaaccagtgagcagccgctccgttcactccttctcgtctttgggaggatgctgagcgtcgttgagaagacttgcttcatcggctgagtcacagggccggtgagggactttaactgcgaatatgctcgccatcagttgtctgcgatatcgatgggggcagaaaaaccgccgcatggccagcagactacgcacgtagaagactgagggttcggttatcggaccggggttcgattccccgcagctccaccattcgaaagccgccggaaatggcggctttctttgtattcccaacggtttccacgtatttgtcagcttgtatgattcatcgtaaatcactacgatttacggcacttcatagtaaaacgtgggcaaagcgtgggcacaacattcaatcaccagcccacgccgacgtgccccatcccgtaatcctagacgatgacacgtccggtcatccgtatgagcacgagggcggctaccgcaaccacaacaggtaccaggagcgatatcactcggtttccattgtccttctggatctggaaggttatgatgaggatggaggcgaagcagacgatggcgctgagcagatgatacggagggtttccaagcatctggattatgtaggtgattccaagaaacgcctgaatggagttgcccaaacccaggatcacactgccgaacacgttttgcctgttgatgtagtaggcgatgaatccgccgggcaacgtaaggagcgtggccggaccccagatggagcagtagtagtacaacgcttggtcaacggaaaggccgaacaccacctcgacgatgaagcagagtggctggctgataagaaagaaaacgaagattttgagcgccgactcccagcttttcgtgcagttggacgcgatgacgaccgcgaagatgacccaccattcgtaggaaatcgcgatgtccttgaacgatgttccctccgcggccgggatggatccgacgatgccggtgtaggcgcccgcaacgaccgcgaacaatatcacggcaagccaacccatcttgaggcctccaaaaagtttcctcatccggaaaaatcctttctctcccgcacctgttctcaataccgccattccttacgaatacggcagttccgcaggggtgtcaatcgccaatggttgaggggtatatcaccccttcgctacaggctactccgaacgtatcgcgacacaccattgatccgatttgcattaaccgcttaagtgattaacatagttaatacatcaactcagttatcacgtcattgcagacgataccaaggaaggacttgatcgatgacctgcgcatactcccccgaagcctatgtgttcggctcgaaggaaaaccatgacctgctcgaggcggaaaccaatgaactcctgcatttcggccatcatttccccgcaccacagggcggctcctactggctggatgacaccggcaagccggatctgacccagagcatccacacgtggatcacctgccgtatggctcacgtctattccctcggcttccttcatgacgaacctggcgcggccgaactcgtcgacaaggcgatcgccggcctgcgtggcccgctgcacgatgacgaacacggcggctggtatccgtccatctccgccgacggctccactcacgaagccggcaaggtctgctacgcccacgccttcgtgatcctcgccgccacttcagccaagctcatcggccgcccaggtgccgacgaattgctcgacgaagccctcgaaacctacgacaggcatttctgggatgatgaaatcggccttgccgtcgacacgtggaacaccgaattcaccgagctcgacccgtatcgcggcatcaacgccaacatgcataccaccgaggccttcctcgccgtcgccgacgtgaccggcaacgaggagtaccgtgaacgcgcaggtcgcatcatcgaccatgtggtcggttgggcccgcgagaacgactggcgcatcccggaacacttcaccgccgactggcagccggatctcgaatgcaaccacgacaagccggacgaccagttcaagccgtatggcgccactccgggccacggcatcgaatgggcccgtctgatcacccagtacgcgctgagttccaaggcccgttccgaagaaggcaagcaacagctcatcgaagccgccgaaaacctgttcgcccaggctctggccgacgcgtggaacgccgagggcaccatcggtctggcctacaccaccgactggaacggcaagccggtcgtcaccgaccgcatgcattggacgctcgccgaatccgtgaacacctccgccaccttggccaccgtcaccggcaagcaggtgtacaaggattggtacgcaaccttctggcagtacatcgacgagtatctgatcgaccatgagaacggctcctggttccatcagctgaacaaggacaatcaggtcatcggcaccgtgtggccgggcaagtccgacctgtatcatgccacgcagtgcacgctgattccgcgtctcgatcccgccgtttccgtagcgccggcgctcaaggccaatccgaacgcctgacatcccgatgcttctccttccatcctcctaaccgagagatcccctcgactccatacggaatcgaggggatctcttgtttgaggaccgagccggaaactatttgatgatgggtcgcaagggcgcggacacatcaacgttatgcttgtctccgattacgttgggatcattgatgatcttgtcgacgaccgcctttttgagcttgagctgcgaagagtcaccccacacaatcaccttgtctccatcattgagttcggtcgtgatggaatcctgcgtttccgcggtgaccttggtgatggagttgcgcatcgaatccggtagagagcttaggatttgcaacgcttccttgatggaacgattttgcaggctttcattgacgtcggtcacttcgatgaccggaatcccctcgacggacgccccgctgacggaattgagcacacgtcctcggctatcgacggccgtcatggtgccttcggaggttttcagcatggctgcgggcttctgtgccttgatggtcacttccagggaattcggcagatgcttgatcgcctttgccgaagtgacgccgggaatgtccttgatcgttgtttcgacatcgccgccggacacgagtagcagagatttgccggcctgctgacgggcgatcgacagcacctgctcctgactcacccattcgttggcgccgacgacactgatgccggaggattccaatctgaatacggatgagaagaacagcaaccagaccagtgcgacgatagccgcaaccgcaccgacgaaagcggccacacgcatgacgatcattcgggtgttggccttgcgccgttccttcaaccgcgcactgaaatcgacgactttcggtcgcgtgatcacacccagcgcgccggaggtctcctcaagcgtcttggcgatcagatcctcgctgcgcagcgtacgggcgtccacgaatcctccggattcgcaacgtgaaccatcgctcgagacggagcgcccctgcacggagcgcccctgatgttgttggctggagtccgattccttgcccgaactgatgacccggcgcgccatcagcgtgcgcaatcccaacggtgagcttccaaagcatgcagaatcaccggatccatctgcgtgatgtctcctgcgccgacggtgaagatgacatcgccatgatgggcacgcatcaccatcatctgggctgcggtgcgcatgtcgtcgacgccgcggatccaatcatcggcgggctcatgttcaagcttcacggcctcgttgacgatcgtgtcggggctgacggtcgggaaatcctcctgcttttcacgagccgggaagatgccggtgacgatcacatcatcggccttggccaacgcctcggcgaattcacgggcgaaaaacatggtacgagagaacagatgcggctggaagatcacatggattccggcttccggatagcgacggcgggcggcatccaacaacgccgcgatctcggtaggatgatgtgcgtaatcgtcgatgacggtcacttggttgacgctgcctcgaatctggaaacgccgtgcggcgcccaagaatgacgtcgccgcggctgcggcacgctccacgtcgacgccaagcatcaccgcagcaagcagggccgccgtggcgttccttgcattatgaatgccgggaacggtgagagtgaccggaacgcggcgttcctcgacatcgaccagtccggccggcaggtgcaggatgaaatgctcggcaccgctttgcgtgctttcgctctccgattcaatacgtacgtgagcggcgccgttcagatcgccgagatcctcggatggctgagtggaatacaccacgacatgccgtgccacctccgtcttgagcgcacgcagtacagccaatgcgccatcatcgtcgccgcacatgatcacggccttgcccgcacgccccgcatgttccacgaacgccgcacgatacttggcctccgtgccgtaatggtcgagatgatcggcctccgcattggtgatgatggcgatttcaggatggtatttggcgaagctgccatcggattcgtcggcttccgctacgagcacgctgcctttaccggcatggccaccgtcgagggtcgcaccatccttgccctgaatggaaccgccgatggcatagctcggatccgccaactcaccttcgcctgcgttgacgaggatgtgggcgagcatggaactggtggtcgtctttccgtgggcgcccgcaacggtcacggcgcgcttcgactgcatgagcaacgcaaggatgtcgctgcggtgcacgatgcgttcgccggcctcgtaggccgccacgatctccggattatcgggcttgatggcgctggaaaacaccaccgtgcgcgcaccctcgacgttttcggcccgctgcccgaattccacggcaatgccaagcccttgcagtcgctcggttttggcgctcggctcgcggtcggagccatccacgtgcacgccctgctcatgcagcatctcggcaagcacgctcataccggctccgccgatgccgatgaagtgggttttcccaagatcatccacgccctctccggggccgaaggacgcatgggttggatcaagaataatggtaccggcatcacgctggttgtcagacacgactgctcctcttatgcatgttttcaagctcattccattatggtcggacctcaggccaacatgccctcgtccggttggccggtcacgccgtttgccgcccgatgagcgccagcacccgctcggccataacctcggccgcatcacgaatgccatagttccaagcgttgcgaccatattcggcaagcgtttcggaatcggcgagcagttgcggcacatgacgcctgacccaatccacgttgaattcaccatcggcgaccatcagtcccccatgcgcatccaccaccggctgcgcgttgaagcgttgctcgccattgccaatcggcagcggcacatagatggcaggcagacccaaagccgtcaattccgagacggtgcccgcaccggaacggcagataaccagatcggcgcaggcaaacgccagatcgatccgttccagatactcggcgacacgatagtcaccctcgccaacatgatcggctccgagctcgccaagcacatgctcccccgcgttcaccgataccagggagcgcacttcttcgcttttgccttttccggtcaggtgaatcacctgcgcatgccgcagtagctccttggccgaaccggccaccgcacgattcacgttcaccgcacccaaggagccgccggtcaccacgaccagcggacgttccggatcgatgccaagctgtgcggccgcctcacgcctgactgcgacacgatcatgtccaagatccgaagcgagccgtgcgatggccggacgcaacggcagtcccacacgctcgacggacacgcccctgcggggcttcagaccggtatccgcgtaagcggaaccgatcatatcggcccaccgtgcgcccagtctgttggccataccggcacgcgcattctgctcgtgcatggcgatcggaatgcccatgttgtgtgcggcggcatataccggagccgatgtgtagccgccgaagcccaccacgacctgggcttcatgccgggtgaggatgtcacgcacctttgcggtctcacgcctccactgggcggggaatttcaatgcggccatattgggcttgcgtggaaacggcactttctcgatcgtttccagctggaaaccggcctgcggcaccagattatgctcaagtccgactgcagtgcccacgaccgcgatatccgcatcaggttccagggaacgaatcacctgggccacggcgagaagtggattgacatggccggcggtgccgccgccagccagaacgatatgcttccgagtgctcatagtgtatgagcttagcccacggcacggcgcttgacagcacggctcacccatcgacatgcagatgattacagtatctacgttttgccgttcaggccttggccgtctccgccttgatctgcggctgttccttcatcatgctgacggcaatgcccgcggcacccagacacatgatcagcgacgaaccacccgccgagacgaacggcatgggcacgcccatgacggggaacagaccgatcacgacaccgatgttgacgatggcctgccctacgatccacacggtgatgcatgccagcaccatcgtcacgtaccggttccgtgcctgcagtgccaccacaagcatgcaccagccgagcaccacgaacaggagtatgaccatcgaagccccgatgaaccctgtctcctcaccgatgatggcgaagataaaatcgttgtgcgcctcgggcagataaccccatttctctccggaattgccgatgcccaccccgagaagaccgcccgatgcgatggcatatttgccatgcaccgcctgatagcacacgccttgcaggtcggaggccgaacacgtctggtatgtagccaggatgcgccccattcggttcggactgctcaacacgagtccgccgacgagcagcacgcccgaggcgccgatcaaggccagccatttgccgggaaaatccccgagaatcaatgcgaccgcaccgatggcaagcaaaatcatgcaggtgccgagatccttgccggacattaccagccccaagctcaacagatatcctaggcccagcttcccatacgccttgaggaaaccctccttgcgaagccgtttacgtgcgcggatcagctcgcagggcatccagacgcataatgccagcttgacgatttccgcaggctgtatggtgaacacgttcttgatgccgatccaacccttgttgccgttgacctccacgccgagcggggtgagcgtcaacgcctgcagcatcatcgccccgcacagcatgatgaagctgatcttgcgatacaccgaggcgggaaccatcatcgtcagcagggcgacggcaaacccgaccacgcagaatccgccctgcttcagggcctgagcccacggtgacaagccgttggcaatcatgttcaccgacgaactcgagaacaccatgatcacgccgaacaacgtgaggatgatcaccgacagccggaatccatggaaacaccatagagggttgaacaggctccgcaccccgacgaatgcgtgaaaatcctcaggccgtcgcgccgtcttatcctcattgcgggatgtggatcgtgcggttcgggcaacggcatcggtcgccgatgatgatacgatacggctcgctttaggcttcgccatgctcgctcacccatcgtcgtgcctcgtctgcgaactggttaccgcgatcggcatacgatacgaactggtccatggatgcgcaagccggagccataagcaccacatcgcccgattcggcatatgcgccggccgcgttcacggccctggccatgacggtggacttatccgccgaatcgatgacggtcaatggaatctgcggggcgctggccttgaaggcgtcaagcatcggctgctggtcctcgccgatgatgacggccgccttgatggtgtgcgcctgatcggctacaagccgttcgaaacggcttcccttggcaagaccaccggcgatccacaccacggacttgtcggcgaaactgttcagcgatgccttggccgcatgcgcattcgtagctttggaatcatcgacgaaacgaatgatgccgccatcggactcgtgggccgtggcgacggtctgaatccgatggccacccggcgtgaaccgctgcaacgcggcgatggccgtgcctttgtcgacgcccaatcccaatgccagcgccagcgcggtcagcgcgtccgcaagcagatgcggatataccgtgccatccggctcggtcagatgcgtgaagtcggcgattttggccactttcacgggctggtccggttcgccgccggcaacgccgctcatatcgacgatccaaccgtcgacgatgccgatctggcccgcctccggctcatgcaacgtaaatccgatacggcggcaaccctccgccgtttcggcccgttcggccaattcggtgacacgaatgtcgtcggcattgtagaccagtgccttgctggcacgatggaacaccttcgccttatcggccgcgtagttgtcaatgcctccatgccagtcaagatgatcatcggcgatgttggtgatggccgcaccatccaatgcgagcgaatccgtgaaatgcagttggaaggagctcaattcaacgcatagcacgtcattggcgggatcgaccgcggcatgtgagaccgccttgccgatgttaccgacggccggtgcggtgagtccgcaggcggtaagcatctcggaagtcatttccgtggtggaggtcttgccattggttccggtgatgccgatccaacgtgcaggttcgccggtggaatcggcgttcacacgcagttgccatgccagctccacctcgctcatcacggggatgccacggcgctgcgcctcaaggatgaacggcgtacgtggattgaacaccggagaggtcatcaccagatccacgtcgttccaatcgatctggtcgaaggagtgcaggtcggcatcaggctgcttttcatccacgccgatgaccttgccagcccttggcttcagtacctgcatcatgcttcggcccgaaatacccagacccgccacgatcacggtcttaccgttcacatccatgtcaaccacccttatccattttccaacatggcacatgccgtatcgacgtatgccatctgctattccctaaagacgtctcagctcagccatagaccggagcgcgtgacccagtcgccgtagaacagcaccagcgcgatgagtacgaacagcaactcgatcatccagaaacggaccacgaccttgacttccggccaccccttcaactcgaaatggtgatgaatcggcgccatcttgaatacacgcttatgcgtcatcttgaagtatccgacctgaatgacgtcggacatggcctcaagcacgaacagaccgcccatgacgacggcaaggacctcggtatgcgtggcgacggacaaggccgcgaacaaaccgccgagggccagggatccggtatcgcccatgaagatggacgcgggattcgagttgtaccacaggaagccgagacaggccacggccgcgcaggaggcgatgatggtcaggtcaagcggatcggaaaccgcataggtgaagccttcatgcccggaacccttcagatggtagaactcccagaaggccacgaccgcataaccgacgaaggcgatcatcgacgagccggcggccagaccgtccagaccatccgtcagattgacggcgttcgtccatgcggtcatgaggaagttcacccaaatcacgaacagcacgatggccaccacacgaccggcgaactcaaagctgaaaaacgggctttcgatgaagctgacgcccgcctgcgcgctcgggaagccggacttggtgggcagaatcagcgcaagcaccgcgtagacggtggcaagaatgaactggccgatgaacttgccccgcacggtcaggccctcgctctgctgcttactcaccttggcgaagtcatcgatgaatccgagcatgcccatcgacagcatggcgaacagcaccaacaccgccgaccaggacggcatctcgttctgatgaaggaagcggtacaacgccgacgcgccccatcccaacacgatggccaggttgatgaccacaccgcccaatgtcggcgtgccgcgcttgaccagatgcgactgcggtccgtcctgacgaatgtactgtccgtaattgagcttatgcactaggcgtatcagcagcggggtgcccacaatcgtcacgaccagtgacaccaagattccaatgatgagcgaaatcacctgatgctctccgttccagtcaagtagccgatggctaataccagtttctgcatatcgttctattccgcggcgaatggctgccaacgttccgccagagcgctcagccccgaggcgtgagatcccttgagcaacaccactgtacccgcatgctcggtcgccagccgggacaccagtgcgtccgcctgatcgatatcatgggcccaatccaccgcacaacgcacatcaccgacctgctttccaccctgcgccatggcttcggccaaggcgtcaagcgcatcgtcaccacggctgccgacggcgatcagcgcgtcgacgccgccctgcacggcatatgatcccacctgctcgtgcaacgcacgctcatcgggaccgagctcaagcatggcacccagcaccgcaatgcggaacggctgtcgctcatcgttggcatgccagcgaatcagaccatccaagccggctttcatggaatcaggattggcgttgaaggagtcatcgatcagcgtgaacctcgcctccggcttgacaatggcggacacggccatgcggtgcgggctgatgcgcttgacatccgccaatccagcggcgatcctgtccagagacatgcccagcctatgcgccacggtggcggcggcaagagcattcatcacattatgcattccgcaaatccccagattgaccttggcgcactcgccctcggcatccctgagttcgaaagacgggtgatcaagctcatcacaacgtacgttctcggcggcgaccatgcgatcgggagtccgccgctgcggcagaccgaaccacagcacctcacccggagcgatgccactcatggccgcgacatgctcgtcattggcattcaaaacggtcacgccgcccggcaccaagcccttgacgatttcggatttcgcctgcgcaatgcgctccgccgagccgaattcccccagatgcgccacgccgaccttcagcaccacggcaatgtccggaggcaccagactcgtaagattggcaatctcgcccacgtggttggcacccatctccgccacgagaaaacgcgtgcccgcattgaccttcaacgcagtcaacggcaaaccgatctcattgttgaacgaaccgaccggagccaccgtctcacccatggccgacagcaacgatgccatcagatccttagtggtggtcttgcccacggaaccggtgatgccgatcacggtaaacggcgaacctatcgcacgacggcgttccagattatgcttagccaactcacccaacgcgcgaaccgtatcgtcaaccacaatctgcggcacgcccgcatcggccacctcatgatcgaccaacgctgcaacggccccctgtgcaccgaccttcgatacgaagtcgtgaccatccacgcgctcgccggcgatggccacgaacaccgagccttcacggacctgacgggaatcgctgcatgcgctggtcgccatggccccgttcgacgcgatcccctccgctgccaccagccgtccatggacggcctgctcgatttcggcaaggcccatcggcatcatggtcgggttgctgttcactggttcgtctcctcttattcgttccgatttcgttcggttgtggtcagttcaggtcccttgacacgcgtagcgcgctcttgatgttcgctttacgtacgccggccgccagaaccatggcgatcgacagcgacaacgccctgccatcgacctgctcgtatgccatcgcggcctgcgatgccagcagatcggactcctgcgtacgcgcggccacatgcgtctgcttgccgatcgcaccgccgaagcccgccacgtcccgcgacagttgcgcttcgctgactctggcatcatcgacaccaagtacgtcgatactgaccgactgcaacgcctgcttacgcaacgtccgctcgtccaacgcgagaatcactgcggcggcaccgtcttcggcgcataccgccaaggtacgctgcacatccaagatggacaacggatagtgcaaatcgaggaatcgttccagggattgcgagttggcggcgctgatcacgcccacggggttgccgagcatatgcaggaaatcggcaagatccttcacatcggcctcgaccgactccctatcgctgcctatgatggcgaatacggccaagacatcggacggcgcccccgcgatatcacaggccagtttacccaattgctgagccgtcggttcggcgtagatcaggggaatctgaagatcttggatctcaccgcgcatcgcatgcggcacgattgcgccgtatgcccccagttgctgcgcctgcaccagctgccgaacgtcgacatcggcacccggcacgaacaacgcgccgggacgtatcgagtcgatatcgtccgcaagcgaggtcaccgtcacttcggaggcgaatgacgggtcaaggtcaaaaccgtattggctggcaagatgccccaaagtcattcgccggttcatggattcgcttaccgcgctcattgctgacgtctccctgcctttcttcggccgccaatcaccaattcactgcaatagcatcagtgcgcggactggaggccggcacctcatatttctgcataaggaattcaccgatttccgcggtcagcgggccggcggtcaggccgccgaagcttccctgcgggtccttgagcaccactgtaatcacgtaccgtggattatcggcgggaatgatcgcggaataatcgctgatgatcgacgacaacctgccgtcggaaccggcgacttcggccgtacccgacttggccgccatacgatatccgtcgaccttcacgaacgaggagtagtgatcggccgcggattccatggcgttcatcatctgagacgccacttgttcgtcaagcacgcgggtggcctcccccttcgcctgcttttcctgtgtatgcccttcggcatccgaaaccgacttgatgatgcgctgcggtttcttcactcccttgtttgcgatcaccgccacggcattcgtgatctgcatgacgttcaccgtatagccttggccgaacagcaccgtgttgcgcgttcgttgatcccattcgttcgccggatgcagcacgccggacgactcgccgggcaaacccagaccggtatcctgaccgatgccgaatttgctgatgaactcgtagcgctgctcattgctcatcttgtcaccggccatgaccatgcccacgttggatgattgttcgagaatgcctgcgagggtccaatgctcggcgccatgcgtagtggcatccttgtaggtctgaccgtccaccgtgtagttgtcgggaacggtgaacttatcggtcatctgatgcaacccgagctgcagcatgcccgacatggcgaacaccttgccgatcgaccccggttcaaaggtctcgctgacggccctcgacacaccgagcttggcctgatcaccgcctgcctgaacctcatcgctgtcggcaagcgccaggatatcgccggtctcgatgtcctgaaccatggcgactccccaagcggactggtatttctcccggccctccttgagcaccttttcgacgtaccactgcacgtcatggtcgatggtgagggtgatgtccgaaccattgacggcatcctgggattcggtcatggtccccggaatctcgacaccgctgttgccccgctggtagacctggtaaccatccttgccggtgagcgtcttgttttccatctgttcgatgccggccacaccctcgccgtcatcgttgaccccacccagcaacgcgcccatcagggtgccgttggaatagatgcgctcgttgctcagctcggcatagacgataccgcccagattcagtttgctgatcttacgcttgaccgcaggcgtcacgtcctttttcaatacggcatactggccggttcccgacaattgggctccgagttcggtcgcgtccatgccgagcaccggcgccagcagacgtgccacggcggctgcacccgtggcgccgaccggtttgccatcgatctgatggcagttgtcaccggtctgtttcgtgcaggtggtcggtatgaaggcctgcgcctcctcgggatttccgataatggtgtagcgttccacgctctgcgccagaatcgacccgttggtgtcaaggatcttgccacgccgagccttcagcgtcaccgtgatggtgcggctttgcgcggcggcctgtgccatgtccttgccgttgaccaattgcacattggtcagctggatcaggcatgcgcaggccaaaaccgccaatatgacgccgatggccatggtcttcgtcaacaggttcctgtggaatatcgcgtagacgcgtctgacgaacttcactgagcgtcgtccccgctcgccttgtatccgttgagatcgatggtcaatgcccctttctgcggcaccatgcccatctgctccgccttgtccggcagggatgcttcaagctcgtcgagcttggcctggtcgtcttcgacgtcttgggagaggcgagtgatgttcgtttcaatctgattggcttcaaaggagttctgcaccatctgggtgcgcaatgtcaatgatcccagcaggcataccaccaggaacaccacggcgacgaccagatgtagcaacggggttctgcgcgtgcgcgtccagatgaggagttgttcgaaaccgcgcctgacgcgcgattcatccgtacgattccccttgatgacgtgcaattcgggacgggtggtgcccgcgatctcgcttttgttcctgcgacctgcaggcgctgcattcgatgagatggtacgtggtgcctccatatcagcccctccttccttgtcttgtcatggtgcggtaatcgttaccccgatcgaagcgtttgcgccatcgatcgggaatcggtctgatcagttccacggccctcaatcggacggatgccgaacgcggattcatgacaatctccgtttcgccggccttgatggcccctcgggtcagttccttgaagaatggctgcatatcgggaggaatcaccggcatatccgctggaacatcggccttaagcccttgggccatgaaggttttcaccgtcttgtcctccaacgagtggtacgactccaccaccaagcggcctccgaccgcaagatggttggcgatctgcggcagggtgccggcgagtttgtccagctcgccgttgacttcgatacgcaacgcttggaacacgcgcttggctggattgccggcaggtcgatgggcctgcggcaccacttcgtcgacaagccgattgagctgccccgaagtggtcaacggttccgtctcacgtctgcgcacgatctcccgtgcgatctgcttggaaaagcgctcctcgccgtaggtgcggaagatgcgtaccagatcggcgaacgaatattcggacaggacctgcctggcggtcagtggttgcgtcacgtccatgcgcatgtcgagcggcgcgtcatgggaataggagaatccgcgttccgtctcgtcgatctgcaggctggaaaggcccagatccatgaacaccgcatccaccacgtcgatgtttcgatcttcaagcacatgcgcgaactcgtcgaaggcggcatgcaccggaatgaaacgttccaccagcccttcctgttccatgcgcctggtggcgagtgccaacgcctcgacatcccggtcgatgccgatcagccgagcctcgggactcgccttgaggaacgccgtggaatgtcccgcaaggccgagcgtgcaatccactgcgaccgctcccggcttcgccaatgccggtgcgaccaaatccacgcattcgcgtagcagtactggttgatgaatcgtcgtcacatctgtcatcagaattccaccgccggtaatacgtcatcggcaatatcggaatatccctgttccttgtcggccagatattcctcccatgcctgcctgttccaaatctccgctcgggttcccacgccgatcaccacgatgtcgctgccgagattcgcgtaatcgcgaagcatttgcggcaccagaacgcggccctgtttgtccggatcctgatcgacggcgccggataggaacacacgcaggtactcacgcgcggccttgttgcccatcgaagtgcgctgaatctgcatggcgatgcgacggaattccatctgcggcagcagatagacgcagcgttcctgccctcgtgccatcaccatgcccggaccgagctggctgcggaatttcgcaggtaacgccatgcgtcctttggcgtcgatcttgggagtgtaggtccccagcaacagcggaggcaaatcggccatcatgtcgtgcatcgatgcggaggcatcgttcgaggcgggctcggattcagcgtcgtgaaccatggccacacctccttttttcgacattgggtacactccacccacagctgattcaccactttaccccacgaatcaccgcaattccccaccaaaacacaaaaactacactcacccggatgtcttttccccgcaattcgattcattcgtccccgcccgaattcatcagccattcatcgtcattcgtttcggtccccacgttttcgtagaagcctcggagtagatttgattgcctgagtttttgcacgaagggatcaccacatgtcgagttattccgcccagctgcatgaggagcagcaggcagtcagccgcgcatacgaccgtctggacgcgcttcgggcacaggtccgcgcccgtctggatacggtgcgcgcagccggttcgcatggctctccgacccaacgcaccgagcgggactccttcgccaccatgtatgaggatcgcctcacccagttgcgcgccgtcgaggaccgactggtgttcggcagattggataacgccaagggcgaacatcgatatatcggccgtttgggactgtccgacgaacgtcacgagccgatcctgacggattggcgcgccgaagcggcccgcccgttttacgaagcgacgccttccagccatggcgacatcgtcatgcgtcgtcacatcaccttgaatttccgtgaggtggtcggtgtggaggatgaggtgctcgacgtgcattccgaccaggtcgggcaggcctcttcagccggcacattgaccggcgagggcgcgttgctggcctcgctcaacgccaaacgaaccggtaagatgaccgacatcgtggccaccatccaagcggagcaggaccgcatcatccgcgcggatctcaatcaggccgtggtggtgcagggcggcccgggcacaggcaagaccgcggtggccctgcaccgggccgcctacctgctgtacacgcacagacgcgcattggaacgttccggcgtgctggtgatcggcccgagttcgacattcctgcattacatcgatcaggtactcccctcgctgggcgagaccggtgtggtcagtcgcaccatcgccgatctcattccgggagtcatcgccacgggtcaggacgatccacgagccgccaagctcaaaggcgaacgtcgcatggccaaggccatcgccaacgccgtggccgcacgcgaacgcattccgtccgaactaccgacgatccgcatcaacggattcgcctgtcccatgttgcgcgtcgacttggaacaggccatcaccgacgccaaaagaactcgccaaccgcataacaaggcccgcgaatccttcgtgcacagcatgctcatcgccatgcgaaaccgttacgtggaacaactcgactacacccccgagcaggcggagctcaatgatgtgatgcagcagcttcgtatgaacgatgcgctccggaaaaccctgaaccttgcctggctgcccatgaccggcacctggctggtggatcagctattcgccaagcccgatcaactgcggcgcttcgcaccatggctcgaggaacgcgacatcaggacgctgacccgccccaagggatcgcccttcacgatcagcgacgtgcctctgctcgatgaagccatggaactgctcggcccagaccccaaggccgtggccaggcaaaaggcactggacgccaaacgcgccgaagaagagcagttcgcccaagacacgctcgcccaagccggcatcggatcgggcatcatcacttcgcaaatgctggtcgacaacatcaacggcatggatgcggaactcaccgcccagcgcgcgggagccgaccgtgaatggacctacgggcatgtcgtcgtcgatgaggcgcaggagctcaccgccatggattggcgcatgctgatccgccgctgtccatcccgctccttcaccatcgtgggagacgtcgcccagacttcggccctgggcggtacccgttcctggcgacgcatgatggacccgctgttcggaccgcataactggtcgctcaacgagctgaccatcaactaccgcaatccgaaggaagtctcgcaactggcctgcgacttcgcctcggcggaaggactgtacatctccaccgtcaacgccgtacgcggcgttgcggattccgtcaggcgcctcacgctcaccgacgaaagcctgctcgccgacgcagtggcgcatcaggccatcgatctggtgcgcgcccatgtcggcgcggatggtaccggccgtgtggccatcatcgctcccgatgccctgcttgcctcccttcgggccagggtctacgcggaactgcgtcagaccttggctcccaaggagttcgagcgcctgagctcgcagagttcctgggatgaacaggtcacgatatgctccacacggaccgtcaagggtctggaatatgacgcggtcatggtggtgcaacccggccgtatcgaagaggatgccccttcacgcatcgtggcggcctccgatctgtatgtcgccatgaccaggcccacgcaacgactgcttatagtgcggacaaacgacgacgaaaaactactcacgctataaggtggtatccatgcctaaagcattgctattggaaaacattcatcccgacgccgcgcaatcgctgcgtgagcacggtttcgaagtggagtgcctcaagggcgcgctgagcgaggatgagctcatcgaagcacttgaaggagtggatctgcttggtgtccgttccaagaccaacgtgacgcgcaaggtcatcgacgcccgtccgacgttgaccgccgtcggctgcttctgcatcggcaccaatcaggtcgacctcggatatgccggcaaacgcggcatcgccgtattcaatgcgccatattcgaacacccgctcagtggtggaactggtcatcggggacatcatctgcctgatgcgtcgcatcccggcgcatacccaccatatgaagcatggcatgtgggacaaatccgcatccggctcacatgaggtacgcggcaagacgttgggcatcatcggttatggcaatatcggctcccagctttccgtcatcgccgaggctctcggtatgcgtgtggtgttctacgacatcgaagagaagctcgccatgggcaatgcccatcgttgcggcacgctcaatgaactgctggaacagtccgacgtggtcaccttgcatgtcgatgggcgcaagtcgaacatcggctttttcggtgacgaccagtttgcccacatgaagcaggatgcaattttcatcaacctgtcccgtggcttcgtcgccgaccttgactcgctgaaacggcatcttgattccgggcatctttccggcgcggccgtggacgtattccccgtcgagcccaagaagaccggcgatgcgttcaccacgccgttggccgatgaggacaatatgattctgacgccgcatattggcggatccacgctggaggcccagaaatcgatcggacacttcgtggcgcaacggcttgaggattattggttcaagggttcgacgatgctgtccgtcaacatgccgcagatcacactgtccgacatccgcagcacttgccgcatcgcacacctgcatgccaaccttcccggtgtgctcgcccacgtgaatcgtgttttgggcgaagacaacatcaacatcgccgcacagtcgttgggcaccgaaggcgagcttggctatgtggtcaccgatgtggcgcagcgtccggatcagaacgcattggatgcgctggctgccatcgagggtacgattcgcatgcgcgtcatcagttgacgccctccacctcgcgcaaacgcatgcaaagggggttcttcaacctatggttgaagaacccccttcatatgtatgacgccagttccgcctatttcacatcgcccttgagttcgtcaatggcatgttggaagtcttcaagattctcaaaattttggtatacgctcgcaaaacgcatgtaggccaccatgtccagatcacgcaacggcttcaaaatggccttgcccacctcatcggacttgacttgtgcaagtcctcgtgaccgcaggtcctcctccacgcgttgcccgagcattttcaagtcgtcttcattgatcggacggccctggcatgctttccgtacgccggaaattaccttgttgcgatcgaattgttcgacgtttccggaacgcttgaccaccagcagcatggtggtttccaccgtcgtgaaacgtttagcgcatttcgggcattcgcgcctgcggcgaatggagtgaccgtcctcgctgatgcgggtatcgaccaccttcgtatctgggttctggcaaaacgggcaatgcatggtctccacaatagcctgaaccattgaattagcccaaaccccctcacgaactctgactcggaaccagcaaccgttgccccgcctgcagagatacggaatcaagattattgagccggacaagcgtatcgacggtttcattcacgtcgtcgcccgctggagtgatgctcgaggcatagtcccacagcgtatccccgggctgcaccgtgtacacgaccacgggagtcgcaccggttgcggattccgcccgggccggacgaatcaccccatataggcaccacatcagtccggccagcaacgccacggtaacgatacggtccgataggaatttccaccattcccgatgtgacttcgttcccttatgcgacttcgcatggaacactgtcgaaccattcgccgcacgcatcgcccgagccgtcgccgacgcatcccgcataccgttcatcgcagccactcctttcgaacacttgttctatcgaacatgtgttctatattatggcacatacgttcgaaaagcgcaaccacacatcgaacagatgtttgattttcgcggcgtttcgcgatatgctggtgattggaccgaaaggagcacaccgtgagcaccgtcccattcactcccaaacaaggtgaatcgcaccctgatgccaatgcgctcaccgagcgccagcgcaaggtgctggacgccatcaaaacgcatcttgcccagcgtggtttcgccccttcgtttcgagagattggcgaggccgcaggtctgaaaagtccatcctcggtcaagcaccaactgcaggtattggaggaaaaaggctttatccgcatgagcgccaacaagggacgcgccatcgaagtcgtcgatctcgaggggcctgcctccggcaacggggtcgccgaagtcattccgttccccaccggcgtggattccagcgagtccatcatggcctcccacgatgtgccactggtggggcgtatcgccgcaggcgtgccgattaccgccgaacaacatatcgacgatgtcatgcgtctgcccgaacggctgaccggaaccggaaatctgttcatgttggaggtgcatggcgactccatgatcgacgccgcgatctgtgatggcgattttgtggtggtgcgtgagcagcacactgcggaaaacggtgatatcgtcgccgccttgcttgatgacgaggccacggtcaagactttccgcaaagaccatggccacgtgtggcttatcccgcacaatccggcctactcacccattgacggcacacatgccgaaatcatgggcaaagtcgtcaccgttcttcgtaagatctgagtccatcatccccgaccatcctgatacggcagtcgactcacccgccgtatcaggagtgcatctgcggacgacttgcggaactgtatccttccggttcaagctggaaggtggtatggggtatcgaaacagggaaatgttcccgcaggcagtcctgaagctgtgaaaggattcgtgccgaatcctccatggtgaggccttgctccaccactacatgcgccatgaggatcggcatgcccgttgacacggtgctggcatgcaagtcatgtacggcgaccacatggggaacttgctccagatgcatgcgcacctcatcgagatccagccccttcggggtctcctccagcaacacgcgtgccgcgttgcctaggagtttaagcgcacgtggaatcatcatcaacgcgatgatgccgccggctacggcgtcgaagcccgtccacccggtgcagatgagcacaatggccgaaacgattacggccacggagcccaaggcatcgttcatcacttcgaggaacgcggccttcatgttcatgttgtcttcgctctgcgaggcgagaatgaagatggatccgacattcgccgccaggccgagaacacccatgaacagcagcagccgcacatccgaaatctcatcggcggcgccgccgaacagtctcatgccggcctccaccaacgcatatatgccgaccagcagcaggatcaacgcgccaacggcggcggtgagcacttcaagtcgagcccatccccaggttcgtttgctgttaggctcccgttgcatgagcatcgcggtgatcgtggaggccaccaacaccgacatgtcggtgagcatatgaccggcatccaccagcagggcaagcgatccagtgatgacggcgctgacgacttccgccaagaacaccgttgcggtgagccctagcgacagcatgagtcgtttctggtgttcccctcccccattcgccgtcatttcatgtacatgcgcatgatcatgtgccatatggtgtcattcccatcgctcggttccatcgagagacgaactgaaatcgcttctcaataccattttcattcgtgctcaaacgcggaaaccccagcccgaaggctggggtttcctttgttttcaagttgcacaatacctatttcgcaacttgatgtcgagacatacagaacgcggtaccatgtgtgccggtacgacgcccggaacgaagacatacgaaggtacgtcaagtttcgagcagcgcaactggcactccgttaccgcgtttggtatcagaagccgaactgggcggcggtttccttcaacgtctctgcggaacgcttgagggctgcgagctcgcgatcggacaccggggtgttgatggcggtgttgacgccggagcggttgagcagggtcgggacggacatgcagacatcggagatgccgtggaaatcctcgagcatggaggagacggggaggatgcggttggagtcgcgcatgacggcttcgatgatgtcgacgccggacatgccgatggcgtagttggtcgcgcccttgccgttgatgatcttgtaggcggcgttcttgacttcctgatggatttcttcgcgcttgtcggcgtcgagcggatcgtggcccgggagcggagtccagtcgcacatcggaacgccgccgatggtggcggaagcccacagcgggacttcggaatcaccatgttcgccggcgatgtatgcgtggacgttcttgacgttgacgccggtctgctgggcgatcaggaaacgcagacgtgcggaatcgaggttggtgccggaaccgaagacctggttcttcggcagaccggaaatcttctgggcgacatgggtggcgatgtcgaccgggttggtgatgagcatgaagatggcgttcggggcgaccttcacgagacccggaatgatggccttgaggatgttgatggtggcaccgacgagctcgagacgggactggcccggcttctggcgcggacctgcggtgatgacgatcatgtccgcgtcacggcagatttccggatcgtcgccgcctgcgatggacacggtcggatagaagctggagccgtgctgcatgtcgagcacttcggcctcgacacgttccttggcgatgtcttcgagcacgatctcacgggcgacaccgcgctgggcggcggcgaaggcgagagtggagccgactgcgccggcaccgatgatagcgagctttgtgggcttgattggtgaatccaccatgtgcttacctctctttggcaacgaatgtcccgttggtgacgggcttcatcttcaataacacttttactgtatccacacagcatgacgtttcaagcttgtgtagcacgccttgacatggctgaaacgtgatttgcgccacacttgatgtgagcgctcacaaacatggcgggcactcaccctggatacatcgaaaggcattcaggcaatggcctgttcaactatccgcgccgccagatggtcatcgacctccgcctggagcatcatgccgtcgtcgcgatattcgacggcaagcaccttgccgtattcgcggacgcgtgacaccagcgatccggcggaatatggcagcaacgcctccacatgcacgttcggggtcggcagcatggattcgattcctgtgcgcagttcgtccacgccctcgcccgaatatgcggaaacaacgtacgcgtcgggcatcagggcctcgatgcgttcacgaaccgcttcacccataagatctgatttgttgaacgtcactatggtcggaatggctcccacgccatcgatatcggcgagcacgtcgttcaccgcatctatctgcgagaacgggtcgggatgggaaccgtcgaccacatgcacgatcagatcggcttcggcgacctcctccagcgtggacttgaacgcttcgatcagttgcgtgggcagacggcgcacgaatccgacggtgtcgacgtatgcgtacagacgaccgtccttcgcacgcgcacgacgcaccgcggtatcaagcgtggcgaacaaggcgttctccaccagctcggcggaaccggtcaggcggttggtcagcgacgatttgccggcgttggtatagccgaccacggcaaccgtcggcagtccgaaacgtcgtcgggagccacgcttgacctcacgtgcgggggccatttcggcgatctgacgacgcagcttggcgatgcgactgcggatcacacgacgatccatctcgattttcgtctcgcccggacctcgcgagccgatgcccgcatcggcgcccgccgcacggcctccggcctgacgggacaacgatccgccccaaccacgcagtcgcggcagcatgtattcaagctgagccaattcaacctgcgccttgccctcacgggaggtggcatgttgggcgaagatgtcgagaatcacggcggtacggtcaaccaccttcaccttggtggcgtcttcgagggctcgacgttggcttggcggcagatcgtcatccaccacgatggtgtcggcatcctcctgcgccacgatacccgccagttcgcgtgccttaccggaaccgacataggtggccgcgtccggcttgatacgatgctgaagcaacccgtcgcacaccacggcgcccgcagtctcggcgagtgcggccagctctcgcaatgattcctcggccgcggcctgggtggtttcgcgggaagaccatacgccgacgagcaccacgcgctcgagtcgtaccttacggtattcgacttcggtgacgtcctgcttctcgccgagacccgccacatgcttcagcgcattgcgggattcacgctcctgccattgttcatcgtgggattcgtggaaacgctccccgtcgccggtgtcgagcagcacttccgactggtcggcgagcacgccgcccatggtgggctcgtccgttttctgctcgatttcgatctcctgggtcaatggcacctctcacggttaaactatgatgcctcctattatcatcattgtgtagagacatgaaccgacggcattcgcgatagggcggacatggcctcgggaccgcatgtaacggatgggaagtggcatgacgaatacgaatatgggcggacatggcggcaaggcggagcaatacttcgccgcggaaccgacgtcggaggacgtacgcagaaggctgcacatcatgcttcgcgaccatacggcggatgtggaggtctccaacggcgtgttttccggcaatcgattggatcttggcacttccgtgctgttgaagagggtgccggagcctgcgcaggagggcacattccttgatttgggctgcggctgggggccaatcgcattgacgatggcgttcgaatcgccgaaggccgacgtgtgggcgctggacgtgaacgaacgtgcgttggagttgacgaagcgcaatgccgagatcaatggcatcggcaccattcatgcagttacggcggacgagattccgcacgacctcaccttcgatctgatctggtcgaatccaccgatccgcattggcaaggaggccttgcacgagctgctgatggcgtggcttccgcgattgaatgcgggcggtgccgcatatctggtagtgcagaagaatctgggctccgattcgttgattccgtggcttgccacgcaacttggcgacggatatgaagtgagcaagtatgcgagcgccaagggcttccgcgtcatcgaggtcatgaaggcatgaaattcgaatatccttcccaactgccggtttccgcggcacgtggcgatattgccgaagccgtcacgtcgagtcaagtggtgatcgtctccggtcagacgggttccggtaagaccacgcagttgccgaagatcctgttggaattgggccgtggatcccatggacggcagatcgtgcatacgcagccgcgcaggttggccgcccgtaccgtggccgagcgcatcgcctccgaaatgggtgtgcatttgggcgacgaagtcggctatcaggtgcggttcaccgacgagagttcgccgaagacgcgtcttcgcgtggtgacggacggcattctgctggcgcagatccaacgcgatccgaagctgatgcagtacgacacgatcgtgatcgatgaggcgcatgagcgcagtctcaacatcgactttctgctcggctatctgacggcgttgctgccgaagcgtcgcgatctgaagctcatcatcacgtcggcgacgatcgattcggtgaagttccaggagcatttcgagcatgctctgcatacgaaggtaccggtcattgaggtgtcgggccgtacctaccccgtgcagatcgtgtacgagccgcttggcaccgcgcctgcgctgatgcgctccgtgccgggtttcgaaaccggcgcgatgccgggcgactccgattacgaggcgttgtccgccgctccggacgcaaaggattcgggccgcgacgtgaatatcgacatgccgaccgccgtggcacgtgcctgcgcggagctggtgatccattccagccatgaccgcggggcccgagatattctcgtattcgcctccggagagcgcgatatccatgagttcgagaacgcgctccgccaccattacggtccgcgcgcggcggatatgcgcaggcccgacgcaatcgagatcgtaccgctgtttgcgcgactttcctccaaggagcagcacaaagtattcgaaccgcacgagcaccagcgcatcgtgatcgccacgaatgtggccgaaacgtcgttgaccgtaccgggcatccgctatgtggtcgacccgggtacggcccgcatctcccgctattcgaagacggcgaaggtgcagcggctgccgatcgagccgatcagccaggcgagcgcgaaccagcgttcgggtcgttgcggtcgtatcgccgacggtatcgcaatccgtctgtattcgcgtgaggatttcgagacccggccggagttcacggagccggaaatcctacgcacgtcgctgggcgcggtcgtgctgcacatgctgtcggtgggtgtggcacgtaccgcacaggatgtgacggagttcggtttcatcgatccgccggatatgaaggccgtgtccgatggtttcaacgaactgaccgagttgaaggccatcgcccgcaagcatggcgaggtggtgctgacgcataccggtcgccagctggcgcgcattccgattgacgtgcgtttgggtcgtatgatcatcgaggccgcgaagtcgaccacgccgaacacactggccgcagtgctggtggtggtcgcgttcctgagtttgcaggatccgcgcgaacgtccggatgagaaccgcgaggaggccgaccgcatccacaaccgctatgcggacgcctccagcgactttgtgaccgcgttgaatctgtgggaccgcgtgttccaggcggatggcgatccgagcaattccgcgttgcgtcgtatctgcaaagccgagtatctgagttttctgcgcatgcgccagtggaaggatctggtcacgcagctgcgcgagatgtgcaaggagttcaggttcaaggtcggcgagccgattccggtatcccggccggacttggggatccgccagttgccgatgaaccagcaggcggcgcatgcgctgtgctgttcgtgggatgcgcagggcatccacacgtccatgctttccggcctgctgtccatgatgggtatgcagatcgtacgcgaaccgaaggcctccgattttgccggactcaagggggctgcgcgcgctcgtgccatgaagcgtgcgcagaagatggcgaagaacgactatcagggcgcacgtggcacacggttcgcgctgttcccggcttcggcagtagccaaaagcaccccgccatgggtgatgagcaccgaactagtggagacaagccgcctgtgggctcgctattccgccgaaatcgatccggcgtgggcggaacctctggccggatcgctgacgcgcaccacatacgccgacccgcactggtcgggttctcgtggttccgcagtggcgagtgcgaaggtgctattgtacggtctgccgatcgtacaggaccgtaccgtgcaatggggccgcatcaatccgttggaggcccgcgatttcctgattcgtcagggtttggtggagggcgacatccagcagcgcttcccctacgacgatttcgtcacgaagaaccgcgacatcctcgaagaggccgccgacgacgcgagccgcacccgtcagatggcgcagacggtcagtgacgaggatctgttcgatttctacaacgccatcattcccaacaccgtcacgaacgtcgccgatttggcgaaatggtggaagacgaagcatgacgaacggcctgacttgttggatttcgatccggagaaggtcgaacgtctcgccgatgccgattcggtatcgttgtccgactaccccgaccattggcatacgctcggtacggacggctcacccatcgacctgcggttgagctacgtgtacgatccgcatgatccgaacgacggcgtaaccgtgcacattccattgaaggcgctctctcgactgacgccggaacagttctcgtggaatgtgcccggcttgctggacgagctcatcgtcggcatgatcaaatcactgccgaaaacgttgcgcgtgcaattcgtgcccgccccggacacggcacgtaagatccgcgcatggatcgacgagcggtatccggatctgcccggctccggaagccagcagaggccgaatcttccaccgggtgacgcggatggcgtggctgtgtggccggatctgcctcacgtgttcacgcaggccgccatcgacatcgtcggcgcgcagatccacccggaagtgctcaccggcgaactatggaacaagctcacgccatacctgcgcatgaccttcgccgtggaacagcaactgccggccaatcgcaagcagcagcacggcagacgccacgcacggggaccggtcaaggtactcggcaccggcaaatcgctggttgaactgcaacgcacatttgccgaacaggccgaggcttccgcccggcagatggtcaaaaggcaggcggaaacggcagggaaccaaggcaagctggtgcagaaggcgaacctgctgcacaaagcgggcgccaccaccgaagcacgcgccaccatgctctggcaaggcgcgcttgacgcactgcggctacccggagaacgcatctcctcacgctggctcggcacggaagcgctcatgctcgcctccaccccctacaagtccacgaaggaactcaccgaagacctgcagctggccgccgtcaagcgcctgttgccgaaggtcgacgaactgcctgatgacgaggcgttggcaaacgcggtgctcgatgtacgcgaagtgtacgaagacaccgtgtacgcggtggcacacgacgtgatcgccatactgaaacgctatgcggaagtcgacaaagccgtgtccggcaaggccgacctgcccctgctgagcgtactgcagtcgatccgcgagcacatcgccacgctcgtcttccccggcttcatcggcaagacgccaccagaagcattgccgtccatcgaacgatacctgcacgccgacctgttgcgcctcgccaaggcgaaaaacgacaagaaccgcgacgtgcgctgggcatgggaagccgacgaagccaaacagctcgtcgacaaaaccatggcgaaagcccaacgcgaaccggccggtccacgccatgaaacgctcatgaaacaggccgaaaccgtacgctggatgctcgaggaattctacgtgtccctctgggcgcaggaactcggcaccccaaagccgatcagtctgcaacgcatcaagaaggcgctcaactgaccgattgcccggtctttgaccgagacgggaacgtgagttccgctcactcggcgctatttgccacgcgagtagaattcacgttcacgtgcgacgaacgggcgcagcattgtggtgatggcgatggcgcacaacaggaacagcgcgccgacggggccgagccacatcagaccgacatggccgttgaccacgccgccgacggcggagccgagagcgatgccgatattgaacgacatggagttgagcgacgcggcaaggttcaacgatcccggatgcgactgcgaggcgacatccatatacagcacctgcgatgcggagttctgcaggtacatgaacatgccgagtaccacgagcagcagcgcgccgtacaccggcacccaatgtgccacgatcagcgacgccatgagcaccgcatgcgcgcaatagatcgggcggatatgcgtcagcggttccactcctctgccccggtccgcgagcttgccgccgtataggttgctccacaggcaggctgcgccgaaaatcaccagtccgacactcaaataccgttccggcacatgcacctcgtcgcgcatgatcggcgtcaggtacgtgtagaacacgtagctcgcggccgcaccgaacaccacatcgagcacgccgagctggatgcgccggtcgaagaacaggcggaactgcggcaggaagccgatcttcacgatatggctgttgcgcggcaatacgatgaccatcagcacgatgagcacgacagtgagcacgttgaccagatggaacgcccaacgccagccgaacacgttcgccacccatgtgccgaccggtacccccacgacggatgcgatggagaagccggagaacacccatgcgatgaatttcgtgcgatatcgttccgtcgtcacatcgggagcgtacgtcatggcaatggccacaagcgtaccggagacgagtgcgatgaggattcgcgcgatgacgagcacgccatagttgggcgcgaacgcgcacagcacgttgccgagcaggaagacgccgaccagcgtcagatgcgtggcgaagcgcgggaagcgcgccgacaaggccgagccgagcggcgtgaccggtgcgtagacaagcgcgaataacgaaaccagattaccgacggtcacttcggataccttcagtccggccgcgatatccggcaggatgccgaccatgatgaactcgctcatgcccagcatgaagctcaaggccacgagaatcgtcaccggaagattgaaaaatcggtccttcttcacgttgtgcgtcatacgtcactctctcgtcaatcgttctgcatatcacgaaacgattgccaactttagacgggccctgcaccctttccaccctttcgacgcatccgaattccacatgctgactatgttcattcaacttacgaaatcgaccctaggctggcgcgctacaatatggcacaatgacaagcacaaaacgtcgcaaacgtaaccctcggcgcagactcccccatctcaggtccttgcgcaacacctggaaaaaggctggcctcaggaaacgagtcggtatgctctgcaggacgctgcttgtcatcatcatcgcaatcgccttggtcgtgggtctggtgcgcttcgtcagctggcgtgtggaagtcggacaggccgagaagacgcagaatcagctgcaggcgcaatacgatttcaatcccggcaacatcatctccgacgggcagttcttcaacggcaacgctttgagcgaagcacaggtccgatccttcatcaaggagcagggagcggcatgttcgggcgaacggtgcctcaagaccatgaccttcgataccgaatcacagtcggccaacgaatactgcgaggcatacgaaggcggcaagaacgaaagcgccgcggcgatcatctacaaatcaggcaaggcctgcggggtaagccagaaagtgctgctcaccgtactgcagaaggagcagcatctgctcaccgccaccgacccgagcgacttccagtacaagtctgcgatgggcctgagttgcccggacgatgcgaactgcgatccggaatatgcgggattcttcaaacaggtgtacggcgcagccaagcgataccagtactacgtgcagcatgaagacgattacggctaccatgccggcgctctcaactacatccagtaccatccgaatgccgaatgcggcggcacgaacgtgtatatcgaaaacaaggcgaccgcactgctgtacatctacacgccatatcagccgaatacggccgcattggaggcaggggccggagaaggcgacgcctgttcgtcatatggcaaccgtaatttcgccatcatctattcgagctggttcggcgatccgcgcggctaggtcttccgaacgggaggcggcgcacgaggaccgcatgcaaaaggtccgtcatccagcagatcggatgacggacctcctcgatcaaacgcctacggtcgtaaacgcgagccgcccggcaatcacagcttcggcagatacttcttcagctcgtacggcgtgacctgctgacgatattcctcccactcctgacgcttgttgcgcaggaaatactcgaaggcatgctcgccgagcactccggccacgaaatcggacttctccatgatcttcaacgcctcgtcaagtgactccggcaacggctgaatgcccatggcctgacgttcggcatcggtgagctcccacacgtcgtcgctggtcggctcgcccaactgcatctgcttatcgacgccgtcaaggcctgcggccaacagcacggaatacgccagatacggattggcgaccggatcgagcgcacggaactccatacgtgcggagttgcccttgcccggcttgtattgcgggatgcgaagcagagcggaacggttgttgtgcccccagcagatgtagctcggcgcctcggcgccgccccacagtcgcttgtaggagttgacgtattggtcggtgaccgcgcagatttccgccgcatggtacaggatgccggcagcgaactggcgggcggtcatggacatgttgaattcctgaccggcctcatagaacgcgttggcgtcgccttcgaacaggctcaggtgcgtgtgcatgccggagcccggagcgtcggagaacggtttcggcatgaagctggcgtggatgccgcgctccagcgaaatctccttgaccacggtacggaaggtcatgatgttgtcggccgtggtgagcgcatccgcgtaccgcagatcgatctcattctgaccgggacccgcctcatgatgcgagtattccaccgaaatgcccatctgctcgagcatgttcacggtggcacgacggaagtccatgcctggactgcgcggcacgtgatcgaaatatccgccttcgtcgatcggcgtcggcgacttggaccaatcgtcctgcttctcgaacaggtagaactcgatttccggatgcacgtagaaggtaaagccccgctccttggccttggccaaggcctgcttgaggacatgacgcggatcccccagcgacggctctccatcaggggtgagcacgtcacagaacatgcgcgcggtaccctgcggaccgccgcgccatggaagaatctggaaggtggacgggtcaggcttgacgatcatatcgtcttcggacacgcgcgtcagaccttccaccgcggaaccgtcgaatccgagcccctcctcgaatgcggcctcaagttccgcaggtgcgatggcaacggatttcaatgttcccagcacatccgtgaaccacaggcgaatgaagcgcacgtcgcgttcctcgacggtgcgcagcgcaaactcttgctgtttatccataatgcatcatcgttccatgcgcatgttacgaacatcgttaacacgcgccgtgccgctcctactccttgatggcaagcgtggcgagctgcgccacgaaaagcccttcgtcacgcgtgacgatctgcgcacggcccggcacggccctcaccggcttgaccctgccgatcagctggccttcgttcggatcgcccgacaacaggatgccgggcatgccaagatcctggaacgactccaataccggatcatacatggcacggctcgcgccgccggtacgcctggtcacaatgacatgcagccccagatcgccggcctgcgccagaagcggcaccaacgcacgcaacggattgctccgactggtcgcgaccaaatcatagtcatccaccagcacatagacttccgagcccgtccaccatgaacgattgcgcaattgctcggcggtcacgtccggccccggaatgcgggtcgacaggaaatccgcgagctccgcaagctgttccgtggccatcgtgtcgttggtcaggtatgctcccatatgcgagtccggaatctgggcgaggttggcgcgccgataatccaccatgaagatcttcgccttgccatccgggtatccacgcacgatctcgttgatcaccaatcgcaggaacgtggacttgccggagccggaatccccgaacaggtagcagtgcggctccctatgcagatccaacaccaccggagcgagggcgttttcattgatgccgatgaccatcctgccatgggtgagacttccggagacgtcctgccccgccacggcgtcagcgagcgcggcatacggcagattcgtaggcagcagacgcagtttcgggcccggcctacccttccaggccgcatgcaccttggcgatcagatcggcgatgccgtcacccaccgtagcggcgtcgtgcccaccatcgatacgtggcaacgcggcaagcatgtgcagtttcgccatgctcagaccacggcccggagtccccttgggcacggtggcggcgatcttgcgatcgatctgggaatcacctggatccccgaggcgcaattcaagcttggtgccgatcagatcgccgatattggcccgaatctccaaccaccggttggcactcagcaacacatgcacgccgaaggtcagaccgcgtgcgacaatctgttgcaccttggcttccaactcttcataatcgttacggaacactccccagccgtcgatgaccagaaacacatcgccatacccgtcatcgacctgtcccgcggcgcgacgccgacgataggtgtccatgccgtcgatgcgccgttccttgaagaagcgctcgcgggagtcgatgatgccggagacttcggcaagtgtacggcgcactttctcctcttcgttgccggaagccacgccactgatgtgttccagggcttccatggaggcgaacgtaccgccgccgcagtcgatgacgtagaattgcgtctccagcggggaatgcgtcaatgccagcgatgcgacgatggaacgcagcatcatgctcttgccgctgaggggtccgcccaccacggccacgtgacctcccgcaccggataggtcgagcgccatgatttcgcgtttctgttcgcgaggccgatcctcaagcgcgcatggggcgagcaacgtgccgcgggccctccagctcgggcagatcaaaccatattgttcggtgacggtcaggtcgggcatgaagtcgtcgagggaattcggcgtgatcagcggcggtagccacaccacgtgggccggcgtgcctttgccgcgcatctgttcgacggcatattggaatgtggtggtctctcccggaagatcctttggtgcgccggaaacgtaggatgcgcggaatcgtgtgatggtgccgtccggggacttcaggtagccgatgcccggtaggctcggcagttcgtaggcgtccggaatgcccagcaccgcccgggattcggaggcagagaacgttttgagaccgatgcgataggacagatgctcgtccagaccgcgtagcttgccttgttcaagacgctgcgaggctatcagcaggtgtatgccgagtgagcggcccaccgcgccgatgcgtacaaaggactgtacgatgtccggcttggctttgagcagttcggagaactcatccaccaccaccagcaaggatggcaacggcttcagatcggtacgcccgccattgactctggcatcttcgtattcggtgatgttcgccagattgccggcatcgcgcagcagctcctgacggcggttgatctcgccgtccaaggcgtcttccatacggtcgaccagcgacgcctccctgccaagattggtgatgatggacgagatgtgcggcatgccgtccattcccgcaaaggtcgcaccgcctttgaaatcgatgagcacgaaattgagttgatcgggcgaatggctcaaggccagggagagtaccagcgttcgcagcacctcggatttgcccgaaccggtcgcaccgaccagcacgccatgcgggcccatgccgcgctgacccatctccttgatgtcgagatacgcggtgctggtgtcatcgaacaggccgataggtgcgcggagccgttccttgcccgtccgatatgcccacaatgcgttcagattgatgttgcggatgtcgctgatgcccagcagatccggcagttcggaggatttcttgcgtgcatttgtggattgcgcgccgttgtcggagcgttcctgcgatggcgcatcgccgaggcgacgcgcgacggcgagggcctcacccaccgtcagtccgtccggttcgattcgtatcggcttgatggtggttgagaaaagctccaccatgtcggcatcgtggctttcgagcacgttcaggccttcttcgatcacggcctgcgaaaagaggactcgtagcacatcgtcctcttcgagttcgccccattgactgggcatgtcgatgacggtgacgcctccgagtccatccgaggagaacagtcgggtctccttggcgagcgtgtcgcgatcgaaaccgtcgttgatcacgatcacatgcggggatatctcgtcatcaccggtgtatcgattgcggttgaccacatcatccccaatgaggccgtcgaccatgtgggtgttggtggtcaccatgaaccggcccaggtcggaaggcgtcgaagacgcgcctttccacccttcatcgaactcctcgttaagcgtgtgggagtgcggcagcaggcggatccaatcccatcggcccgcatgttcgacggaagtcagcacgagcacacgcagatgttccggcgaatgccatacggccgcctggcagaccagcgtgcgggcgagcgcctccgtatgctcgatgtcgcccaggagctccacacgtttgaaggcacgcatatctatggtgtagggcatgttgcgcagggattgatgcgccagcatgaatcgatgcgccgccgaggccgaaacgggatcaagctgcgccaagggcggcagttcgggcgattcgagtttgaggcagagcggcacctcctgggtgccgcagcgcaggaccatgaagtcctcgtctgcggggatgcgttcccagcgacgttccggttcttccgcgagcgccgtcagggattgcggcgatggcgcgttccagagcgccgcgttacgctgtttgcggcctgcggcgcgtacggtttttcgcagtccggtcagataggtgaggtattccctgcgtgaagcggtcaggttggccatgcgttgtgaacgctggcgaaaaccattgaccaccacgaatcccaatgacgagaccatgaacatgccgccggtgagtatgccggtcagtcctgaattggtcatcagcatcatgaccatggcgctgatggcgcccagcaacggcacaagcgaagtgagcagcgtgttgacgccatcgctgggctcgagttccggcggaggttgcagcacgaccctgcctttgggcgttttcgggccttcgagtctgctggcctgcgtttcttcagcgctcacgagcgtgtttcctcctgcttgtcgacatgatgatgctgcatcccatgtcacctaggaaaatgcggtttctggtgtggatggggaatcgttgccgcgccttcaacctggtttcctcgccgttttcgttgacgactttcgttccgttggtactgcctagatcggtgatccacagatgatcctcggtgatttcaagtcgtgcatggctacgcgatacggtgccggtgtggtccggcactgcgagcacggcgtcttccggttgctgtgctgcgggcctgcggccgagaaccagcgtggaggggatgtcgagcgattgtttggaaccgtcttcgaagaagatgatgatgtgtggtgccggtgcgacgggtaccggcatggccggtaccgccggcgctgccggagccggcttggggtgagggggcaaagcgaccgtaggcaacgaggatggtcttcttgccaccgtccgtggtatggatgggttcgactcatccgccatggcgatccgttgacgcggtgcccttgcctgtacgacgatgggctggcggatatcgacgcttgccagcgaggcaagcctgttcgcccatccctggttgagatcgttcccggagaacagcggcgaacacatgactatcgggagccctacgaacgcagccaacagtgaggcgatcaacatgcagtatttgatgaggatgcgtcccattccggcgggaagcaccccggctgtggcatcatgcatgccttcgacccggaccgttcgcagcccaagcatcatattgcccggggttatgcctcgggaaccttcacccactgcaagcaccgccaccgcttcaagcgcaatcatggccgtcaccgtgatgtcgtggctgatcagggcggcgacacccgcgcacgccaccacgaatcccaaatcaatgaaggaggcctcacattgtctggccgcgtcggccgggcgaaaacgagtgatcggtgtcgaggcggtcatcataacccccttatgaattccaaggcgccgacggcgaagaacgtcgccggcggcgtgcacatcatggaggcgaagcacagtacgtcgccgatgcgggacaatgcgagcgaatggaatccgccatgctgggcgagcatgccgaatgccatggtcaatcccaacgcgccaacggtcagcacgcacgccaacggcaaggcttgcccccaatccggcagcgcatgcggcatatgcatgcaccagatcagcagcacggtgacaccgccaaggcgcatcaggtatcgttcgaagggacgaccggactgacgtggcttcagggtgaggaacaggaacagcgcggcactgagcgtcaggaagccgatgcgatcatacggctggtcgaacgcacaggaatcggccactatcgcatatgtcagcaacatcagcatcatgcatatcgtgaaaccggtggaataccgtgccagaaacgtctgcatgtcgtcatgtacatcggcccgtgtaagtacgcgggacttttccggaataccgccgcgtaccgtccaacgacgagtcatgtaggtgcgccattccaccagatagcggtccggcacatgcatcacgatattgggcagcatctgcaggcagcagaccgccacggtcagcacgaaaccggccagcaaccgcacatgcagcgtatggatcagtgcgacggcgcatatcagcatcaagggcaccgacgacgcaaacgtagcaacgattgcccctccgatggtcggatcggcgacaaggaccatcatcagcgtcatgttcacagccacgtagcaggatgcgaacagcgcaccggccgtcatcggctgcgtgcatcgaatcatgaatgaggccgccgcgccaccgcatacggccagcatcaccgaacacgcgaacgcgcccaacgacatggcacggtcatggtcacggatgcctttcagacatagccagtcacacaacgctaccgccagcgtcattccggcgaacaggaccatcggcatatcacgcgcctgctcctgcacggacggagacatcaaggatgccgtcagtgcgacgaccgcgacgaaaccgaacaatgcggcactggcgagagccacaccatccaggctccgctgcactaccggccgcgcgccgccatgaccgccccgcctgacggattccgcggatggtgcggatgccgcaccaccatcatgcctggacattcagtcgcgattccagatcatgcagacgcttcatctgttcgtccagtttgacgcgtccctgagcggcttcgttgtccggatcatccacatcctcaacataatcgcgcatatagcccgccagcttgccggcatacccgcgcacctcacgcgcctccggggacttgtcggtgcccgaaagaatgtcactctcacaggtttcacccatgtcgatgcgctgctgcagcacctgccaagcacgaccgttgtcgcctttgcgacgccgctcctcgatgttcttcctgcgttcggcgatcagttcgtcgacacgatgcctctctcgggcaagctcggattgcatcgctttgcgtcgagcggaaatcgcatccagacgttgcatgaaaatttcaatatccacgtttcccatggcgctccttctatattgtgcaattacatggcatgaatatcggcattacacgagcggccctaccatgcgccgccaccaccgccgccaccaaagccgccaccgccgccagcggtggcgctgccgccactggcaccgccgcttccggtaccgaactggtccaatgccgactgggattcgctcgtcagattcaccatggtggatgcaaccccgacgaaatcggcgatggctcccaacaacgtggcgatatattccgtcactttcacggcaaagtcaatcgccaccccgacatcgaccgcagcttgggcggttccgacgagcggtcccacaaccggtatgctgaattcggcggcatccgcggccagcagttcgataagcagttcgattccgtccatgaccatgtcgaacgttccatcgacctcatccgccagggcctccagcgcctgcgccacttcgaggcacggctgcggccccttgccggcagtctccgcaaggctattgttacgaatgacgaacagatcggccgccttgccggaccaggacgtctcatcgacattggaggagacgttgcgcacggcactttgcagcgcactcagcgattcggccaacgcccgccattggttggcggtggcacgcagatcatcccaatcaccgaagaacggcttcttgatccactcatcgacgggactgtatccgaagatggctttgcataacgcgtcaaccgccgtaatggcaatgcgcgccttggcgaaaccaccatgaatcttctccgtcaggcccttttcggcagccgatcccgccgccgaaacctgttgagacgattccaaagcctgctttgcgatcgctccggcggattcgaaaagtcccttattgtcgtttacccttttcgcccatgagtatgttggctccgatgaggaatcagtcatgctacgacgcctcctttctatttgatctcactgcgctgaggcagctccacgatgtcgcggtcctgatacagcgatttcaattcgtcggctgttctgcctagcggatccttggccgcgatggaccgccacaccgattcctccgtctccttacgcatggcctcacgcgccatctcggagtcgccgatgcgcaccgcggcgtcatagtcgccatcattgtcgaaatcgatggccgcatatttggagtcgtccttgtcgaatatgctgatgcgggcgtccgcacccgcatcgggagtcatggaaacatcatccttgccatcgtggtcggcatcgatgctgaaggagccggatttccccgcgttggtcccgggaggcatcggcacggatgcggagtcccgtttggacagtttgatggaaccgtcctccaataccgtcgcatggatgtcaccccccgtaaggttcagggaataatcatccttggcgtcaccattggtatcgatgccgacggtgttgatggtgtccttggtcttctggtcggtcggctgcacggcatcggccgctcccgcaccttgccgtgtaccggaaccggccccgttcgcggtggcgatcggagcatatgaagtccgcgcatcgtcggtttcgcccgtcgaggtatccgctgacgacccctgtgccggtgtcgaaatgctgtgcattccggaggcgccggaagaatcggccgagtcaccgccaccaacggtgccggtaccgcctgcaccaccgccaatgacgtcgctgtcatgttgcttgttctcgagtgccgtaaggcgttcgccgtgttcatcaatctgcttttgcaggttatcgatccggtcctggcacttgcattcgacctgctgactgtcttccgatgcgccttgcaacgccgtggacagcttttccgccatctgcccgatattgcccagatacccttgcgtcgcaatcttgcacgcaatatatggaggatataacgccatcatgaacaaaccaaagccggggttgccggctccggtcttcacgaatgcggatttcgccgtagcaaacccgttggaggcttcctggtatgcctgcgccgttttagccagatcgtcaggattgtaaagtatgcattgtgatgccataagcggtttccccttcctctctcttccagtggtttcggtcactcgcccgagcgcttgcgatggcctgccatcgctgcgagcggcttgggaatgaattcgtcgtcgtcttcaatcgtcggtgcgatataccccaacgtgttatggcgcttgtcacctttgctcgaagaggcaccacgcccggcacccatcatcgccggagtcatgccacgcgtggaagccgcctccgcggaagatgccgacccggttctcggcagacccgctgccatgccggtggcgcccttgatcgatgaggatacggcggttgcccgcaccggctcgttcgcataatacgatcccatgccagcaccgctcagcgaggccaaccccgcaccgccggcgccgccggcaccaccgctgagtacacccatggacgaacccgagcccgcgagacgccccgcagccaaggtgctgccgactcccacgccggcgctggccgccatcgccgtacgccccaggccaccatgcagcgagcccgcaccgttcagaccgtccatgccgccatcgaccgacatgtggtccttgcggtaggcccacctgccggtcgccggatcgtacaccagcccgtccgagcgggaaccgcttccgactccatcgaatcccggcacattggaacggcccgtcccacccgacatggcggcggcggacaggccggcattcgaagccgtggcggaggcattggcggaatccgaaacggcgccctttgcggccacgcctgcggcagcggtaccgccgccgacacccgcacctgcggcaccgatggtggacaggccaccgcccgatcccttgttgttcgacccattggtaaggggggaatccccgattgccttgtccttggagccatcggtggcgggagccggccagatcccattcacatcaaccgcgtgaaaagaatcaacccgaggcactccgcctcggacctttcctatcagtcgcttgtattcttttttcgcctcctcttctcggttgctggcaagcatccgggagatcaaattcgcaccggcgatccccataacccccgtcacggtgccaagtcccggcacgatccagtccatcggctcggtggcgttcatgatggcctgctcggattccttgctcaacttgtcaccgggaagacgaacgttctgcgcctcgcaaatgacatcgttgaacgtttcgatacgctgccggattcgcttcgcctgggtggtgaaatcggcatcgctgatattttggacgatccggtcggaacatgccaatgcggtgtcacgagcgctgcattcgaacacgccatcctcctgcagtacggtcccagcacgcctcaatgcgtcggaggccttgtccatcgcatcgcagaaccgtgtgatctcatccgggaactcccactgggtcgtccgcgcaatcatcgacagcagttcctcatagttgcttttgcccgttgatttttccttaaaggccatattcgtcctttcctgaatgcgttttccagatgttgttcaattacgattggcctaccgtcgtggcggcaatggcggctgttgggccggcgggccggcggacggcggataccgcaccggcgggaccccggacggatacgccggcccgccacccactgcggcggccggcccctgcggtggccggcgccggccacgggcacgacgccgcgccaccacggccgccacgattccgccgaccaccaccagcgcggccacgccggccaccggcaccacccatcccggcaacgccgacgaacccgcatccgcgtccgcgtccgcctgcctgtccgcctggtcggcggtggcggtcgccgaccagcgcatgcaatccgaaccgccgtccctgcgacactgctccaccttccgccacgcccgtgcctggcgccggtactcccggccgaccaatgtgcacgccgtcgtgcaggtgactttctcgccgctcggggagaacgggtcgctctccgcgaacgtggcgtccgtccaatcgggatgctccgtgtacatgcccttggtctcctcgtgccgttcgctggctttgaccgcccactccagcagcgggttcacgtccggatagcccgtcgggtcgaccgacagcaggcgcggcaggtccaccgcgccgaaccccgtgcgatgctcctcgtccagccgtgcctcgcccgaatcgttacccttcgtattgcgcaccaaggactgcaggatctggttgcccgtcgcctcaggccacttctgcaccgccaacgtcagataccccgtcaggtcggccgccgcggtcgacgtgccgccatcgccgagggagagctcgcgccggttggtgaagccgtatacgagcgtgtcggccccggggctcaggatcgacacgttgccgtccatgacatccgatgtggccgacaccgtgccgtcccgcgccagggagttgacggtcaccgtcccgggaaaataattgttggaggtcggctcgcccaccaggtcgtacaggcccgcttcggtggagttgtcccttgcgctcaccaagatcacgccatggcgcagcgcatgcagggccgcccggtaatagtcccagtccgccgcgtccaggaacgacatgttgatgatgcgcgcgcccgaatccaccgcgtcggtgacactggatacgagctggtcgacactgttcccgtcggcatccacgcaggcatcgaagttcgagaatccgccgagcgagccggtaatggcgaagttatacgggtaggcgatcaccgacgcgtccggcgcgatgccctggatgccggcgccgccgtcatagcccttcccgttgcccacgatcagggcgaccatgtgggtgccatgggtcatgttgaacccgtcggcagtgcccagcgtcatgtcccgcttcgacatgacccggttcttgtcgtatacgtcgtggcacgagtcgccatgcgagagcgccagcctgtacgtcacgtccgcgtccgccagggccggatagtcccgcacgacctggtcgtcgatcaccgcgaccttcacgcccttgcccgtcagtccggcatcccacgcgtcgcgcacgcccatgtcctcgatgcgccagtcgaccgtcccgtccgccgccgccgtccgcgcgcacaatcccgcgcacaggcccgcgcacagcaggcaggacgtcaacgccgacaccataccgggcaaccgcccccgacgcccgaaccgcaccatcacagcaccacccctactcggaagacgacgaaccggcggacaccgacccgccgtccgaagaggactcatccaacgtgatgattttcgccatcccggatgccgaagcatgtccggtggaatccgcggacggcgccgccgccaccttggcttgggcgtcattgatggcatccatctgtgattcctcggttttggtgaagatgtccacagtggtgctcagccgctgtgcatactcctgcaccgcctcgtgaagacgctccctggattgccggaacgcctgagcggaccgcttgagatccttctcaagcatctgttcgaagaagttggcgtttccgcgcgtcgcacccttccattgggcatcggcgtcccgtacatcctctcccatgtcgttcaaatctttcgcctgggtttgcaccgtttcaggctgcaggctgactttttcaaccatctgttccccttcttcccatcatgtcatcgattgcatacgaggcggtgaggtcgggatgccccaccctgtgcggggatgtcccgacctcaccgaatcccgatgttttagaagcgtcccgcggaacgggcgtcggactcgacatactgctgggcgatctgcgaggtcgcctgagagatctgccccagaatctggttcatctcctgcaatttgccgttccaatcacgctgggcctgatggtatgcctcacgggccgcaccatcccattgctcgatcaaggacttcacctgggtgtcgagattgtcgagttcttgagcgatgcctttggcatcattggcgatatcggcggaaagaacatccacctgctcgggacgaacggaaaaagagctcaccattgttgtttctccttacagcttgtctatgtttctcgtccttcagcccagcagggactgcaacttggacgtgcgggattggttgtcttcctcgttcgcggcctgatccttggcggtgccgcgcagattatcgcgcagatcgttaagaatgcggttcagggcgctggccttctcctgccagctcatcatcagcgtgttgaaggagttggcggcatcgccgctccagaatgagccaagttcagccatcttcgactcgatatccttaatgcggttatcgatgccgagtcgtgcgttttcaaccgcagcggcgcccttttcaatggcgccttcctctgctctgattttttccgccatgtttcgtttccctcccgtagagaaccattctttattcgcgtcacactggatgacagcaatgcccccatcaatgcaacgactcttctcagagtaatttaagtctacggatttcgcaattgtataccccctaactttccataaaagaaaccccttttatatcaaatatgcctatccgaatatagctaaattctcaattacaacacaatctcttaaccgtacgtcttccgcgttttttgtcgtcccaaaaaaactttacatcatttgcatgattgattaaaagttttcggcagcatatgcgatatacccccgtactttcatcaagagtcatcctcggtggatttttacagaaggagtctatattatttcacatcagtagtcataaatatagatttgtcacatacggatttttgcgagagaaaagatagaagatatgaatttcaaagcgggtgcaatgccgtatgatccccctgtccgtccacggtcggcggcccccattcccctaccgcacgttcccagtgcgaacatgcggcgactgacgatcgcctataacacccgtaccattacgctcacggtctcggacggaccgatcgttgcggatcttcttccggacatcgcccgcaggctcggcgtactggacccctccatcgtgtatggcggataccgattgattaccgctgacggggaaccgctctccccctcacgaactttcgcggaacagcatgtatccgatcagagcgtacttacgctggagcccggcgcgtcagtcgacacggacatcgtgtatgacgacgtggtcgaagccgtcggcgcgagtgtgcaacgggtctaccgtccttggaccaaggatcacaccacgctcacctcattgctcatcagcgtgggcatgctcgccgtcagtgccggctggctggcattgtttcccgtttcgatatggaacgccgcgcttggcatcggcttttccgtagtgctgatcgccttggctgcattgctgcacggcaagaccatgaccgtacaggctaccgtcatcggactgaccgcaagcgttttcgccgcggtgggaggctatcaactggcttcgtacctcgtaccggatcaggcgtttcacacgttgccgctggtcggagccagtgcaggactgctggtttcgggatgcctgatggccgtcgccgcccctagcacacgaccctatggcttcattccgatcatcataggcctgttggcggccattccgggcatactttccacattgctgccttcatggatggcgaacatctggatcattgcgacgatgttcgccgccttggctgcgaatgcactgccttggatgtgtctgtcgttcgcccgcatcagcgtgcaaagccctcatagcgatgcggaaatcttcgccctgccggaaccgatcgattacgccgaggtcaaacaacgctacattaccggctccaccatgctgttcatcggacgggtgagcgtcgccacgatgctgctcatcgccatgccattgctcaactccctcagtacaccactcggggcggtgatctgcctggtcgcattcctcgccatgctgcttgactcgcgccagattcatacgttgcgtgagatgtgcgttaccgtaagcgctgcaggtcttggcatcatatgcaccggcctgatgagcgtgcgcatgcatccggaattcagcattcccctgaccatgctgatgctgtgttgcgctttggcgaccaccgtgttcacgcatgtcacacgcagacggtcgctattcgccacccgcatggccgatgcagcggaaaccctatgcatcatgatgcttccgccactcgcctatctggcgatcaccctgtgatattcgtcgctcttgccgcataaaggatgttgtcatggcagataagaaggatctttccgaagcgcaaagctattcacggcgtcgtctggtcaccgcattcaccagtggcattccggacggcgtggagctgatgccgaagaagaaccagactccggtgatagtcggtgtgggccttaccatcatcgccatgctcatcagcatgttctacggcatcatcagcccttcgctgccatccggttgggagaacaacaaactcatcgtggccaaaggctctgcggcacgctatgtcagctcctacggcacgctgcatcccgtcatcaacgccatcagcgcacgattgttgatcccctcatccgatttcaaagtgctcaccgttgccgatgaccagctcaagggcattcccatcggttccaccataggcattctcggcgcaccggactcattgccggaccgtgacaatctgatcaccggatccatccgcagctgcacttccgagcatggtctcgacacgaccgtcagcaacgccaatgcgagaaaacagacctcacgcgaggccatagtcgcttccgtggatggcatcgactatctggtcaccggatcccatcgataccaactcccctccgaaccgacgtcacgtgacgcctatctgagagcgcttggcataccgcagacggccgtcatcaccgccaccacgcagtggatcaacctgttcgagcagggcgatgccatggaacccatcgccctgcacaatgaaggtgagattatcggcatgcatggcgtcgatgtgacggtcggcggtgtggtacagcaacagggggatgccagacagaccagatacgtcgtgatgccggacggatccctgtccgccctcagcgatttcacctacggtctgtacatcatcggaaaaccggaacgcctcacgcagccacgtacgctcagcgccaccgatttccagtacttctccaattccgcgacatcggtgattcccgacacctggccggtcgacgcactcgtttcggcgcaaggcaggtcatcggcgtgcgccgtatatccgttgcattcctccggtaaggcgaccccatcgcatgcgcaactggccgtcaccggcgattatggagcttccacagacggcagtcattccgattccgtaaccatgcgagacggagcgggagcattggtccgggcggcgataggaacctctgacaaaggaaccgtattcgccatcgactccacgggtacggcttaccccgtccccgaggcctccgaggaaatactcaagcggctcggctattccggcaatgacgttcgcaccattccgcgcgcatggatcgacgtgttcccccaaggcgtgcaactcaccaccgcggcggcaggctcggctccgaccgtttccgccgaatcgaaaggcatgtcggtcgacgccgccgtcgcggacgggcaggagcagtgccaggcgggtgtcgagaactacatcacgcaacgcccgtggaccaatgatctgttcgatcctgacaccctgcatcaacaatccaccggcaaaggcgtaaccgtcgcagtcatcgattcgggtgtggatgtggacaatcctcatctcaaagacgccgtggttccaggtgtcagctaccttcaggaagatcccaccaacggcacgaccgacacctacagtcacggcaccgccgtggccggcatcatcgccgcccgcaacgtacagggatcctcggtgcaaggactcgcaccggaggccaccattctaccgatccgggtattcgagaacatccgtgaggaaaatggtcggcaaacgggcgcaccatccatggaaacggtcagtcaggccataatatacgcagtcgaccatcatgcgcagatcatcaacatctcgttaagcgacacccgtgacattccgcagatgagacaggccgtgcaatatgcggaatcgcatgggagcctcattgtcgccagcgccggcaaccggctgacttccaccagtaccaaggacggtgcacgctaccccgcggcttacggcgaggtcgtcggcgtcaccgcgctgaacaccgacctgaacgtcactgaggattccgtgcacggtgatcaggtggacgttgcggcaccgggcatgatgacggcatcgaccatcccgggaggcgtggattgcgtgttcgctacggacgcctcatccacaagcttcgctaccgcctatgtgagcgccgaagcggcactgatcgccgcacgatacccgagtgagacaccggcccagtggaggcagcgcatcctcgtctcggcgaatcgtcctcattccgatcagcgcaacaccaccatcggatggggcatcatggatccgcagaacgccttggcactgtccctatccgacactctgcgcggtccacggctcaacggcgaagcggcaatgcggcacggcggcacggcatcgtcggacaagccgctcatactgcacagacgacacgactcggacgccaccatgaaaatcattgccggcgtcaccaccgtgacggtgctctgcatgtgcgctacttcctggctgctcgcgatgcgcagacgtacagccaagaagtagcgtgttcaggccgatgcctaccgtgcgacttcgagcgcttcctcaaggctgaaggcacgggcgtagagcgatttgccgagaatcgcggaatcgacgccaagctcggcgagttccttgatattgcgcaaatcatcgagtgtggaaataccgccggatgcggtgaccttggcatcggtgcgctcagcgacctcacgcagcagctcgatgttcggaccgctcatcatgccgtcgcgcgccacatcggtgaccacgtaccgcgagcaaccggcggcgtcgaggaacttcatggtctcgaacaggtctccgccttccttcacccaaccgcgggcggcaagggtatggcctcgaacgtcaaggccgacggccacacgatcaccgtacttgccgatcacggatgcggtccaatccggattctcaagcgccgcggtgccgatgttcacgcgggccgcgccggcttcgagggccgcgtcaagcgaggcgtcatcgcgcacgccgccggacatttcgatattgaccttatcgccaagctccctgacgatggcgctcaactgatcgcggttatcgcccgtgccgaaggccgcgtcgaggtcgaccagatgaatccactgcgctccggactccacccatgtgcgggcggcttccaacggggagccgtagtcggtttcggaaccggattcaccctgacgcaggcgcacggccttgccgtcacgaacatcgactgcggggagcaacgtcaaagacatgtcattacctcttttctcaaatcagcgttctacagtcggcgacggtaaggagaacacggaaaatcaccgacgatcgaatggacaatcagaatgtcgcaatccaattgcgcaacagttgtgcaccggcttcggcggacttctccggatggaactgcgtggtgaacaggggcccgcgttcgtaggcggcgacgaaacggctgcgaccataggtgcaccaggtcacatgttcctcggcaccgccgaaatcgatctggtcggtcgacatgtcggccggtgcggcacccattgcggcaaaggaatgcacgaagtagaaccgttcgtgttccacgcccttcatcagtacggagccttccggagcttcgacggtatcccaacccatgtgcggcaccacgtcggcgtcgagcaattccacgtctcccctgatcaggccaagaccgggctcgccatcaccatgttccataccacgttcgaacatgatctgttcgcccacgcatacgccgagcacgggatggccggcacggaggcgatctttgattaccatatcgcctccgacgcttctgaggccttccatgcaggccgcgaaggcacccacgcccggcaccacgagaccgtctgcctccagcgcctgccgatggtcggaggtgagcgtcacatcaatgtcaagattggccaacgcacgcaccatggagcgcacgttgccgaaaccatagtcgaaaaccacaacggaagtcatgggcattctcctttgttcgattggtccggttgtccgaaaagctattcgatggcggcaccgccgcgtccgaatctcgtatgctcggcgatgaccttcatggcatcgtcacggtcaaggtcagccgaatccacaatggtgagaccggaatccttgagaccatccagatcggtgataccgagcatgaggtcttccacgaacgatgcggtggaggtgaacagcaccggcggcgcgaaggtctggccggattcgccctccacatacagtgtcgcctcaagcttgtccgcacggttcaccgcgaggatcaccggcataccggccaccaccgtggtgatgtccctggcggccgcctcgggaccgtcgccatccagattgcgcagtatggcgacggcgccctgctcggagccgacgcattgcgcggagatgtcagaaatctggcagaaggcggcaagcagttgcggcgaggtcagccgagttatgatcaccgccgtcttcgcacgattgccgagcagaccttgcagctcatcctcgaattggagggaggattgcgccgcattcagcacgtcggcggcatcgctgtcgtcatcggtcttttccgcttgcgattcccgctgtttggccgcttcggcttcgttgaactcgcgttcgaatcctgccatggcggcttccagctcctcctcgctgaaatgcatgtcatcggcgttgaaatcgtccggattcaaatccttgtcgctcatcacagagcacctttggtgctggggataccgtccacacgtggatccggttcgatggcaaaacgcaacgcacgtgccagtgccttgaattcggcttcggcaatatgatggggatcacgaccggcaagcacctgcagatgcaggcagatgccggcgtggttggcgatggattccatgacgtggcgcacgagcgaacccgtgaaatggcctccaatcatacaatattcgaagccttccggctcgccgctgcacacacagtacggtcggccggagatgtcgactaccgccttggccagcgcctcatccaacggcacggtggcatcggcgaagcgacggatgccacgcttgtcgccaagcgcctgcctcaacgcctcgccaaatacgatggcgatgtcttccacggtatgatgcgcgtcgatgtcggtatcaccggtcgccttgatggtcagatcaatcagcgaatgcttgccgagcgcggtcatcatatggttatagaacggcaccgacgtgtcgatgtcggttttgccggtgccgtcgagattcaggctcagttcaaccttggattcgctggtctcacgaacgatggttgcggtacgcgccatggttgcgactcctttattggtatggttcagtcctgttccacaatacgcagcacttcgaccaacgcttcgcggaaacgcgccatctcctcgtcggtgcccatgcatacgcgcatccaaccgtcggggccgaccacgcggatgagtacgccacgtttgagcagttcgtcgaaaacgcgttcgcgattgtcgaaatgaccgccgaagagaatgaagttggactgcgttgcagcggtttcgagcggccgacccttgtaggtctgctcgcgaagccatgcggcggtggcattgcggatttcgcgcaggtgagccacacggctgagctgctcatcggtatggtcgaaggccgccaaggccgccgcctgggttactgcggacaggtgatacggcatgcgcacgatacgcacgcagtcgatgatgcccttgctggccgcgagataaccgacacgtgcacccgcgaaggcgaaggccttgctcatggtacggctcacggcgaggttttcgtattcgtcgatgagttcgagcgcggtcggcgtgcccggatcgcggaactcaacataggcctcatccaccacgaccaccggatgcacgccttcggcggccccgacgacctctgcggtcttggccgcctcgagaatacgtttcagatcatccatcgcaagaggcgtgccggtcggattgttcgggctggtaagcacgatcatggccggcttgacgtcatgaatggcctcaatgacgttttcggcgttcagtgagaaatccgcattgcggtgtgcgaccttccaccgggtgaaggtgtcacgcgcatattccggatacatggaatacgttggatcgcagcccagggcaatgcgtcccggacctccgaaagcctggaacagctgcagcatgatctcattggacccgttggcgccccacagctgatccacgaccagatcgacgccggattccttcttgaggtagtcgcagaacgcctgacgcaacgcgatatgctcacgatccggatagcggttgagcgtcggggagatctccttgacacgctgcgcgatgctttcgaccacggccggttccggcgcatacgggttctcgttgacgttgaggcataccggtacgtcaagctgcggagcaccatacggttcctcaccgatcaggtcgttgcgcagcggcagatatgccggaatcgcattgctggaggtttcgctcatcgcaggcccgcccgttcttcctgttccgtgatggtcgccttgtcgtacggatcgtcaatgaaacggctgagcacgcattcaccgtgcgccggcagatcttcggaaacggcgaaggcattcacacgggcggcaagggtcttcaggccctgttcgtcgtattcgatgacttcgaccggcttcatgaaggtgtgtacaccgaggccggaggcgaaacgtgcggtgccggaagtcggcagcacatggttggagccggacatgtagtcacccagcggcaccggggaatacgggccgcggaagatggcaccggcattgcggatcttggcgatgacggcatccggatcggcggtctggatttcgaggtgctcggccgcgtatgcattggccgcgtcgatggactgttcgatgccgtcggtgaggatgatgccggactgacgaccgcgcagcgacgtttcgacacgttcggcgtgctcggtgcgcggcacacggtacttgagattctcctgcaccttggcggcgatatcctcgctgtcggtgatgagcacggagccggcaagctcgtcgtgttcggcctggccgatcagatcggcggcaagccagctcggattggcacccccgtcggcgatgatggcgatttcggtcggacctgcgacggcgtcaatgccgacgatgccggagaccatacgcttggcggtagccacgaaaatgttgcccggaccggtgatcttgtcgaccggatcgcacaggatctcaccgtcctgcggctcggagcccttggcaccgtaggcgaacatggccacggcctgggcgccgccgaccgcatagacttcatccacgccaaggatggagcaggtggcgagaatggtcttgtcgggaagaccgtcggcattgttgcggctcggcggggtcgcgatggcgagggattcgacgcctgcggcctgtgccggcaccacgttcatgatgacggagctcggatacacggctttgccgcccggcacatacaggccgacgcgctgcaccggaatccagcgctcggacacacgggctccttcggccagatcggtgtggaacggggccggtacctgggaggctgatacggcgcgagaacggcgcacggactcctcgatggcggcacgcacctccgggtcgagttcgtcgacggcggccttcatgacctcgacaggcacgcgcaggttctcggggcgaatatggtcgaacttctccgcgaaatcgcgaagggccgcagcgccgcgggccttcacgtcgtcgagaatcggctgcacgagttcagtggcctcgttggtgcccatctccgcacgcggcatagcatccagcatttcggctcgggtcagcttcctaccacgcagatcaatgattcgcatatagttttcttcgctcataacgccccatcgtaacaacgtcgggtcacgagacctgtcagaaatctcacgttcagccgcattgtgagacattcccgccccatgagcgcggccgaccaccccggaccccatgatcataagggtggtcatgccacgatgtgttacggcggcggcgttacatggcgatgctagtttgcatagcaatcaacagtgattacgacggcaaggagaaccgccatgtcccaagcgtcacccgcatcgacggcacccgaaaacaccacggtcaccaaaccgaagttcttctacgggtggtggatcgtcatcggcggtttcctgatgatgtgcacctgctacacgacattcgtgaactgctcctcactgttccaggcgcatatcgtctccgatctgcacatgaccatcggccagtacaacaccggcacgtcgcttgcatcactgatctccatcgtggcgacgctgttcatgggtgcgctcatcgataagctcggcgcacgccagatcgcctccttcctggtgatcctctccgcgttgctgctgttcggatattccgccgtcacctccgcatggcagatctacgcgcttgcggcgatctccggcacgctgatcacttccggcgtacgtctgttcatctccgtcgtggtgaccaactggttcaacctcaagcgtggtctggccgtatccgcggccctgtgcggctccggcttcggtggcatgatcctttccccgatcgccagcaccgtcatcgccaattacggatggcgtaccgcctatgtcgtactcggcatgatctgcttggtcgcggcactgccgattccggtcatcttcttccgtaccaagccgagcgagaagggtctgctgccgcttggcgccgaactgagtgacgaggagatcaaagaggccgaacgcaagagcgggcactcactgtccgaagtgaacgtggccgtgggctggaaggtgcttcgcaagcatgccggattctggttgctggtactcggcttcctgttcgtcggcatcatcaacggcgcggtttccgtgaacatggtctccaacatgacgtccgtgaacaacaacggcaccgaggtggtcaccggtggccatagcgtggtttgggccggctacatcatgtcgctgtacatgggtgtggtgttggtcgccaaggtcgcactgggttggattttcgaccgtttcggcatggtgggcggcgtgcttgtcggctccgtctcctgcctgctcgcctgcctgttcctgtgcttcccgtccacgaattgggggccgattctcgccgcggtcttctacggcatcggcacctgcaccgccacgatcggtccatccatcatgattgcacacgaatacggccgccgtgatgtcggcaagctgaccggcattgcgatttccgccaccgcacttggcggcatcgtcggcgcgatcgtctccggtatcgccttcgatgcggcgctctcgttcacaccggcatgggtcatcggcatcgtctgctcggtattcatgggtgtggcgctgatcgcttcggccggtatggccaagggcgtggtcgccaagtgcatcgccaacggcgcaccgcacatcgacgccgaaggcaacatcatcgaagaggcccgctgacctcattcaggccatgggcagggagctgggaccgaaaagaatcttgatctcggcgaacagggaggtgtcccgcttcacgcggaagcgatcgccgaaggtcagcaccttggcgttgccctgatcgtccatgatggcaagtctcacctcgcaatagccgggatggtcgttcagaatccgcccgagccgcatcacatgatcacggttcagtgcaacctgcggcagcgtgatcacgagcggcctctcgtcctccgcctccaaggtcggtacctggaattccgtggcacgcagactcacggtttcgtcgcgccgctcgacttggccccggatctgcactacggtgtcgaccgccagttccggcgcggccgcttcatataccttgccgaagaacatgcactggatggagctttccaaatcctcgatggtgacgatcgcccaaggattgcccttcttcgatacgcgacggtccacattcgtaatcagcccggctaccgtgacctgctgcccgtcaggcatggttccggcgcgatcgatcagatgcgcgatcgacatctcacgcagactcgacaacaccgactgcatgccgctcaacggatggtcggacacatacagtcccagcatctcacgctcgaagttgagcttggttttcttatcccattcctccacatccggcacgctcaccatggcgtctcccatgccgtcttgttcggccgaatcatccagatcggagaacagatcgaactgcccttccgcctgcttgcgcttgatgcccaccaccgaattgatggcagcctcatgaatggtgaacagcgcacgacggttcggatcgaccgaatcgaaggctccggccttgatcaacgattccaccagacgacggttcaaggcactcaacggcacgcgacgcacgaaatccgggaagttcacatacttgccatgaccgctctcgcgctccttgatgatgtcatcgacggcgttcctgccgacattgcggatggcgccgagaccgaatcgcacgacatcgccgaccgccgaatattcgaataccgactcattcacatccggagacagcacctgaatgcccatgcgccgcgcctcgccgagatacagtgcggtcttgtccttattggtgctggcgccctgtagcagggccgccatgaattccaccggatagtgcgtcttcagatacgcggtccaataggagatcaaaccgtatgcggcggaatgcgccttgttgaacgcataccccgagaacggcaccagaatgtcccacacggcctgggccgcctcctgcgagtaaccatgctccttcatgcccgcaaagaacgggattttctccttggccaacacttccggcttcttcttgcccatggctcggcgcaacacatctgccttacccaaagagtaacccgccagaattcgcgcggccgactgcacctgctcctggtacacgatcagaccataggtctcgtcaagcacctccttgagcggttcggccacttcgggatgaatcggcgtgatcttctgcaggccgttcttacgcttcgcatagttggtatgcgaatccatatccatagggcccggccggtacaaggcgatcaacgcggagatatcgttgaagttgctgggcttcaacgttttcagcagcgagcgcatgccgtcggaatcgagctggaacacgccaagggtgtcgcctcgcgacagcaactcgtacgtggccttgtcatccaaaggaatcctggtatggtcgatgcggtccttgccgttcgcctcgatgttgttcagggtgtcacgaatcaccgtcaagttggagagcccgaggaagtccatcttgaccagacccagcgtttcgcatgtgtgatattcgagcgtagtggtgacggtaccgtcggtacgttccaatagcggcgaggtgttggtaatcggctcactacccatgatggtggcgcaggcatgcacaccggtctgacgaatcagaccctcgatgcccatcgcctcatcggtcacacgcttggcatccggatcggaatcgtacagctcccggaactcacgcgcttcggcatagcgtttcgaggtcggatcgaagatatcgtgcaacgggatgtccttgccgcccgtctgcgccggtggcaacgccttggtcacgcgctcgcccatggaaaagtcgaagcccatgatgcgtgcggaatccttcaaggcctgcttggttttgatggtgccgtagatcacgcattgcgccaccttgtcacgaccgtatttctcgccgacatagtcgagtacgcggccgcggccgtccggatcgaaatccacgtcgatatcaggcagggagactcgctccggattgaggaagcgttcgaaaatcagaccgtgctggatcgggtcgagttcggtgatgcccatggcgtatgccaccatggcgcctgcagcggaaccacggccaggccccaccatcacaccgtgcgtcttggcccagttgatgtagtcggccacgacaaggaagtaaccgcagaactgcatctggcatattacgccgcattcgtagtcggcctgcttgagcacctcgatcggcggattgccgtcataacgcttttccaagccctcttcgaccttcttcaggaacagcgaggtctcgtcccatccttcggggcagtcgaattgaggcatgaaggcaccatcctcatgatcgtcgaacatcacgttgcagcgttcggcgatctccagcgtattgtcgcatgcctcgggaaggtccttgaacagttcacgcatctcttcggcggatttcaggtagtagccggtaccgtcgaacttgaatcgtcccggctcgtcgagggtggagccggagttgatgcacagcatggcgtcctgcgcgccggcatcctccgcacgcacgtaatgggaatcgttggtcgccagcaacggcgcattgagctttttggcgatgtcaagcagcccgtcggtcacctgtctttcgatattcagcccgtggtccatgaattcgatgtagaagttgtctcggccgaagatgtcctgcagctcccccgccgcacgtagtgcctcatcgaattgaccgagcagcaatcgggtttggatgatgcccgaagggcaaccggatgaggctataatccccttggaatacttggataggatctccttgtccatgcgcgggtaacgcatgacacgcccttccaggttcgcgtcggtcgaggctttcatgaggttcacgaggccttcgtcggtctccgcccacatggtcagatgcgtgatcaggccgccgccggacacgtcgttggggttgcgtttgcgatggttcgggtcaagatccgggttccagttggtatcccagctcactcgggtcgggtcctggcgtgcggtttccggcgtgacataggcttcgatgccgatgattggcttgatgcccgcattgactgcggtgctccacatctcataggcgccatgcatgttgccatgatccgtgatgccgacggccggcatgttcagttccttggcgcgtttgaccagatccggtatcttcgaagcgccgtcgagcagcgaatagtgcgtatggttatgcagttgcacgaagtttccggaagtagccatgctctccaatctacctatgattcctgacggccgactacgccgagagccgcaattcaccgcatcgaaacaaccgacacgcgtacctcgtcaccgtggtcgccgcacgcggcccgtcgcttgcgacactcccggagcctgtggataacccgtttggtgcgtccacaacccctggttgcgctggacatacgcctttgcacccgttagcgtcgcaaccaaacggtatccgcatcttgcgaacaaaggagtgccatgaccgcgaaaacccgccgtacattgcgtttcgtttccctgatctgtctgatcatggccatgctgttggccgtggcgatcgttgcgggaatgctgtatctgcagcgaggcagctatgatccgttggactcgttggtcctgattgcggtatgcatgatggtcgcgacctgtccgatctgtctgctggccgcaatcgtattgttcgtgattcagttcctcgtcggattcgcgtcacgatgacgattgcgcatcacatcaagcgcatgctgcaggtcgacgggataatgcgaccggacggtggtccacacatgagtacgcggatgacggaattcgagctgcatggcgtgcagccactgccgttccaatccgagtgtctcgctcagctgcggattggcgccgtacatgggatcccccaccaacggatgtccgatggatgagaaatgcacgcggatctggtgcgtacgtccggtttccagattcacggagacgagcgtcgcttcgccgaagcgttccatcacgtcccaatgggtgatggcctccttgccggctggcgttacgcagaatcgaaaatcggagaccttcgcgcggccgatcggcgcctcgatggtggccttgtcttccttgaggttgccctgcaccagcgcatgataggttttgacgacttcatgttcggcgaactgtcgacgcatttccacataggcaagttcggatttgcataccagcatgagcccggaggtgccgacgtcaagccgggagacgatgccttgacggcctgccgcgccgtacgacgtgatgcgtacgccacggtcaagcagactaccgagtacggtcggtccggtccagccgacggaagcatgcgcggccacgcctaccggcttgtcgaccacgaccacgtcatcgtcttcgtagaccacggccatgtcatgagcgatcggttccggctcggaacgttcctcgacgatatcgaattcaacggtctcccccgcctgcaggctcgacgatttggcgatgtcacggccgagtacacgagcctggccggtctcgatcaggtccgcggctttggctcgtgagatgccgagcatcttggccacggccacgtcaaaacgctttccgacgagcgcgtcgggcgctggaaccaaccggctcatgcggcattcgcctcggcgttctgctcgtcaagctccttctgactgaacggctcgccgagcagaagcagcagcacagcggcgattccggcaatcatcagaaagatgtcggcgacattgccgacggaccatccgtagttcagaaagtcgaccaccttgccgttaaggaagccttcggcatagacgacgcgatcgatgagattgcccaacgccccagcgaacgccaaggcgaatatcacggtccatttcatggagatggtacgcaaggtcaatacgatcagcaccgcgcaggccacgatggccaacagggagatcaaccatgtcatatgggaacccataccgagcgaggcacccggattatgcaccagcgtgaatgagagaatcccgggaatcacgcgcatggtccgcccatcggccaaggcatgttgggcccatgccttggtgatctgatcgagcgccagcgcgataacggcaacacacgcaaagacggccacgcgggtgcgcagccgtccttgttcattcgtcataatgtcagacacagcctaatctcagttgttctgatcgacctggctgtagttgttcgtatcggacacctgggacacgagctgaccgaggaactcggtaagacgcgcgcggtattcggtttcgaactgcttaaggccctgaatattgccttcgatgaccttggactgggattcaaggttgtcacgcacctgctgtgcgtaatcgtcggcggcggaacgggtcttggcgtcatagtcggcggcgcgacgctgcacttcggactcataggtgtcggcctcggagtgcttcgtggagaagtactggtcggcctcattggtcttctgcgcaacgtaggagttgccctcgttctgcctgtcggacagatactgatcgccttcctgggtcttctgggcaacgtaggcgtcgccttcgttcttcttccgattcaggtacgcattgccctcttcggtcttctcggccatatactggtcggcctcgttgtgacgatcctgcatgtaggtgtcggcatcctgacgggtcttggctgcgtaggcgtcggcatcggaacgggtgtcttcggaataggagtccgcattggcatgcgtgttcttgttgtactcgtcggcttcggagcgggtacggttggagtaatcgttggccttgccgatgagctcatcgtacttgcgctggctcagctcggtaatctccttggccttggccttgcccttgtcgacatactggtcgtgcagctgcatggccagggtcagcatggcggtggcgcgctccggctcggtggaggctgcggccgcggcgccggcgatcttctgcaggctgccggtctcggtgctcggctcgaccttggagacctggtcgcgcaactgagcctcacgctgcttggattcctcaagctgctgggacaggttcttgatctgctcggcctgctgctgggccacgacaacctgctgctgagcggaagccagctggcgggacaggtcttcggtacgggcgcggaactcatcacgctcatgctgcacggcgttgagctgctcgccaagatcggcctgacctgcggcttccgcggcctgagcggtgagctgatccacctgagcggccagacgatccacctgatccttaagctgttcgttctgagcggacaacgcacggttgctttcctcagcctccgtgagcttggcggcggcgacctgtgcggcctgtgcggcctgatccccggcaccggcggcctgctcggaggcggacttcagcgtcgcattctcctgctgcagggactgcacctgggcattaagctcggaaatcttggagttgagccccgcgacatccggaccaagagactgcgtggcctgaccgacggcgaccgcctgcttgcccaaggcctcaacggtctcagttacctgatcgaggaaatcgtcgacttcatcaacgtcataaccttccttgaaacgcacggtttggaaggtatgctccctaatatctttcggcgtcaacagagccataaatcttacacctcgctttgggcttgatgcctcgctgtgttgtatcaacttccgatgctatcacggaacctgcggattcatgcggaaaaagggcgtttcacctgatattaaatgaggaaatcaatcacgatgagaatgaaatacagtacgataaacgccacatcgaagtagatgggacccatcggaatgggccgaatatattgccgcaaccaacgcagcggcggctccgtcaactgatagacggcgccgatcagtgaggagatgatgccgctggggcgccaagtcggtgacagtaccgacacccagtcaagaatcatgcgcacaaacagtacgaaaatatacgcgttaacaagcagatggacaatctgaccgatcaaagacaatatcatgcgacccaccctagcaacatcacatgagaataggctgcatgaatgcgttgcatgcattccgaccgcctctcgccgccacaaggcctgcggacggcgagaggtgaatgaaggatgtcagtcggcgaaaagatcgtgggcggcgctcggagcctgcggctcctccaccttgatgttcacctgggccgggctcagcaggaacacacgcggagtgacacgttcgatggaaccgcgcaccccgaacaccacacctgccgaaaagtccacgatgcggtaggccacggactcggccacaccggtcaggttcagcaccaccggaatgccgtcacggatggcacggccaaccagctgagcgtcttcataggacttcggatgaatcgtcgtaatacggctcacacgacccccctgaaacggattgctttgctcacgagacgaagctgcggaggcggaagacgtggtgggtgtcgaagccaggggtgtcaccgagtggtcggagtcgaatgaggtttcggtgccgtcggcttcgtcggtgaagtcatcgtcatcctcagccacgtcggacatgcccagataggacatcgcactcttcatgaatcctgccatgaatgttcctttcgcctgtacgcgtcaagtctagcgcaggaaatccggaatatcgagatcacccggatcgttcggggagaccacttcatgttcggtggtctggtcgaacgactggggggcacccggttccggggtggatggaatatagctcgatagcggctgcacctgcggtgccgccggagtttgcaccggctgaggttgcacctgcggctgctgctggggagtacctacgctcaacgcggaaaccggcaccgtggcagatgcctgcggttgcggcttgtcctcggcgacggccggctctgtctttttggagttggcgtcgaagcccgccgcgataacggtaatgcgcacctcgtcgccataggcgtcgtctagggacagaccccagatgatctgggcttccggatggatggctttgcgtaccaattcggtggctgccgcagcttcctgcagtttgatgtcggtcgggcccgcgatgttgatgagcgcgccatgagcaccctcgatgctctcttccagcaacggcgagctgatggcgatttcggcggcctgggtggcgcggtcctcgccccgtgcggaaccgatgccgaacagcgccgtgccggcaccgcgcagaatggcgttgacatcgttgaagtcgacatgaatgtaagagttggcggtgatcagatcggtgatgccctgcacacctgccagaagtgcggtgtcggcggtcttgaaggcgtcgacgatgccgatcgtgcggtcggacagctcaagcagtcgatcgttgggaatcacgatcagcgcatcgacctccttgcgcagattctcgatgcctagagcagcggaagccgcacgctgaggtccttcgaagctgaacggtcgagtcaccacggcgatggtcaaggcaccctgctggtgcgcggcgcgtgcgacaatcgggctggcgccggtaccggtgccgccaccttcgccgcaggtcacgaacaccatgtcggcgcccttgagcgactcctcgatatcggactgatgatcctgggcggccttggcgcccttctccgggtcggctcctgcgccgaggccacggctcgaggcatcgttcaaagagatcttgacgtccgcgtcggaacgcagcagatcctttgcatcggtattgatcgcgatgaactcaacgctctgcagaccttcggcaatcatgcgattgacggcattaccgccggctccaccgacaccgacgaccttgatgttggtcttgtcgttgaaattgtcagtctgggcaatctcgctcaccattgtctcctgtcactcacgtttacgcataactctatcgcagacggactgatattacgcgcacttttccgggcgtgtaccggcgtttcgccgacttttttatctcaccgacgtttcccattcgttccaaggtccggacggaatccgccgttcagtagctcgcatccatcggatcgtccccgaacagcgcctgccgctcggcatgcgttgtttcgcgggattccaaccatccgtaaggcagatggaccttcttggcaaagcgcacgcgccccctcggtttgtctaccacccgctcggggaaccgaatgtcaggatcaagttttccaatctctcggcgaacatcctcaaggttttcacattccatgaacgcacgacgcgtggaaccacccaccgggaaccccttgagataccacgcgacatgttttctcagatcatgaacggccatccgctcgtcgccatcatagaactccgtcagcaactgggcgtgacgctcgatcaccgtacagacgtcccccaaagtcgggtcgatgcgttcgtcgctgccggcgaatgcgttcttgatatccgcgaacagccatggacgcccctgacagccgcggccgatggcaactcccgcacaaccggtctcggacaccatggccaatgcatcgttggcgccccagacatcaccgttgccgaataccggaatgtccaatgccccgaccaactcgccgatacggctccaatcggaatgcccaccatagtattcggcggtggtgcgcgcatgcagggtcacggccttgcaaccttcctcctgcgcgatatgaccggcctcaaggaacgtctcgtgctcatggtcgatgccgacacggatcttggccgtcaccggcacattcgccgcatcgcagaccttgaccacgcgctggatgatctcacggaacagatccgtcttccaaggcagtgccgatccgccgccgcgccgcgtcaccttgggtacggggcaaccgaaattgagatcgacatgatcggccatgttctcgtcgataacgattttcgccgcctgttccacgatcgccggattcacgccgtagagctgcagcgaacggattttctcgccgggagcgaaacggcacagccgcagtgccttgggattacgggccaccaatgcacgcgcggtgatcatctcggccacatatagaccgtccggaccgtagctttcgcaaatcacacggaacggccagttggtgactcccgccatcggcgaaagcacgaccggagtggcgacatgcacgggccccagatcgacgggtctgataacgggaggaaccgacggccgtgccgcgtcggtacgcggatcgagcacgtcggattcctcgtaggctgtcacaatgctatcgggcatacgaatgctttagtacagaccaccggcttcggcgatcttgacggactcgggccatgcctcgccgcccatctcgaccggcacctgcgggtaacggacttgcttctcgccgatgcgggcggccacgtaatcagccaccttgtcgagggccacacgctcctgctgcatggtgtcacgttcacgaatggtgacggcctgatcgtcgagggtgtcgaagtcgacggtcacgcatagcggggtgccgatctcgtcctcacggcggtaacgacggccgatggcaccggcctcgtcgtagtcgatcatccagtcgtgctgacgcaggtcagcggccaggttctgggccacggactgcaattccggcttcttgctcaacggcagtacggcggccttgaccggggccagacgcgggtcaagacggagcacggtgcgcttgtcgacgccgcccttggtgttcggcgcctcgtcgacatcgtaggcgtccacgaggaaggccatgagggaacgggtcaggccggcggccggctcgatgacgtacggcacatacttctcgccggtagcctggttgaagtagctcagatcctcaccggaatgcttggcatgggcggacagatcgaagtcggtacggttggccacgccttcgagctcgccccaatcggagccttggaagccgaacttgtattcgatgtcgacggtgcgcttcgaatagtgggccagcttctccttcggatgttcgtagtgacgcaggttctccggcttgacgccaaggtcgatgtaccactgggtgcgggcatcgatccagtactggtgccattcctcatcagtgcccggagccacgaagaactccatttccatctgctcgaactcacgggtgcggaagatgaaattgcccggggtgatctcgttacggaaggacttgcccatgttggcgatgccgaacggcggcttggaacgcgaggaagtcatcacgttcttgaagtccacgaagatgccctgcgcggtttccggacgcaggtagtgcagcgagttctcgtcctcgaccgggccgagatgggtgcgcagcatcatgttgaagtcacgcggttcggtccagttgccgcgggtgccgcagtccgggcacacgatgtccttcaggccgttctccggcagcttgtcgccatgcttttcggcataggactcctcaagcttgtcggcacgatggcgcttgtggcagttgaggcattcgatcagcgggtcgttgaacacggacacgtggccggaagccacccacacggccggcgggaggatgatggacgtgtcgacgcccaccacgtcacctcgggtgacgaccatggaacgccaccattcgcgcttgatattgtccttcagcgcgacgccaagcggaccgtaatcccatgcggaacgggttccgccgtagatttcaccggcggggaacacaaagccgcgacgcttcgcgagggatacgacttcatcgagtttggatacagccacaatgcaccttctggtttgaacggtttggggtctttttacaagcgcacagcctaccggcatgcactgacagcagacggggctgtctaactggaatccgtaccgcagaatgatctcccccgatcatacgtcacacgcatgaaaccatatgttggcgatgccttcaatcatatggtcaatggcaaggatttcggttgacccgaatgccttgttttcgcagcatgctcaccgcgattcactcgcggcccgcacgcgctttgacgtagccgacgaagcggtcgaccgcctcgggggtgtcgtgatggaagaacaggctggtcttggtgtcgagtcccgcgatggtcttcatttcgtcgtcggtgagacagaaatcaaagatgcttagattctcttccatacgctccttatgcgtggacttaggcagggcgatgatgtcgcgctggatgagccaacgtaggatcacctgcgccacggatttgccgtgcgcttcgccaatcttggctagggtcggattggagaacatgttttgcatgccctctccgaacggcgcccacgcctcatgcgccacaccacgcttaagcatgttcttatgggcttcgatctgctggttaagcgggttggtctcgacctggttgaccatcggggcgatttcattgaaggcgaccatatcggccaatcgatccggatagaagttgctcacgccgatggcacgaatcacaccgtctttgtagagcttttcaagcgcgcgccatgcgccgtaggtgtcggagaacggctggtgcagcaacacaagatcaagataatcggtaccgagcttcttcaacgacacgtcaatggattcgagggtattctcatagccgtaattgctgatccataccttggtggtcaggaacagattcttacggtcgataccggaatctttgatgccttgaccgacttccgcttcgttgaagtacgactgtgcggtatcgatgtgacggtatccggtctcgatggcttcacgcacgcagcgaggagcgtcctctttgccgacctggaagacgccgtagccgatcttcggaatctcaacgccattggcaagtttcagatattccatttgattcccttccatgagatcactatttgcgaccgacggcttgccggtcggtgatgctccacattagaatccggtagttactaccggtcaaacggcaacacgccggtagaaactaccgacagaaactaccgacaatggaaaccatgtacacgatgaagcaagcatgcgaactcaccggcatgaactatgaagcgctgaaattctactgcaattccgaactcgttcccgcggttgggcgagacggacgcaatcatcgcatcttcgacgaccaagccattgcatggatcatcggtttgaactgtttgaaacgatgcggcctcagtatcaaggagatgcaacactacaccaaactttgccaagaaggcgattccactattgcgcaacgcaaggaaatactcgcgcagaagagggccgtcctcgaacaacgacttaccgaaatccaaggagacatcgactatatcgacaaaaagcagcagtactacgacatcttgcttgcaggagaaaccccatcccccggaatccttgccgaactcagacgcaggccggacagcgccccacgccaataacatagacgtgacgtctcaaacacggcactgtcaaggggcgcgtataggttaaaagcactttgtacatgcaggggagcttttcggcgaatggtcgaaagctgagaaaggcggcaagcctgaccctttgaacctgttggttaggaccaacgtagggagcagcgtcatgagtgacaactcatatatcgatacctcatatagcaatgcctctatcgatgcactatgcggagatgcactgcgcgaacggatcgcgcaggccgtcaacgatgtacgtaagcaaacgccgctggcgcagtcgtttaccaatttcgtcaccatcaacctcgtagccaatgcccagcttgcggcgggcggcaccgcggccatgagcttcctgccggatgacatcgtcgacaccgccgaaatcgcaggatcgaactacatcaatgtgggcacgctcctgccgttctacaaggaagcgctgcctcagatcgcctacgagctgcacaagaacggcaagacctgggtgcttgacccggttgccgccggcatcggcaagacgcgcaccgcgattctcgaatccttccgcatgtatccgccgaccatcgtgcgcggcaacgccagtgaaatcatcgcactcgacgcgatgtggggactcgccacgtccgactccgttacttccggcacccgtccggcaggcgtggaggccgtcgacgaggtggacgccgcgatcgaggccgcccagcgcatggcgcgtcacctggcgaagcactcgccttcaggcaagggtgccgtcgccgtatccggcgccgtcgatctagtgaccgacggcgagcataccttccgactgcccggcggcagcgcgatgatgacgaagatcaccggcgccggctgctcgttgggcggcgtgaccgcaacgtatctggcggtctccgaaccgctggtcgcagccatttccgcatcgttgctctacaatcgcgcatccgaaatcgccgagcaggaatccaatggaccgggatccttccaggtcgcactgctcgatgccctgtggaatgtgaccgccgagcaggtggccgcttccgaaatcatcgaggactgacgattccaccgcacgtcacgcatgcatcgttccttcgatgcccggccatcatgcatgacaacgtgcgatgacagcaaaatcgtgtacgtacggcggcacagaccggtagttccgacatcacatcatcacaagacttctggattacttaccacaaacaagggggaaccaacaatgaatgattatccatacgcgtcgatgcgcgactgtttcgacatgagcgcgtacttcgtggtcggcccgcaggactgcaagggccgtcccatcacggacgtggtcgatgacgcgttgcgtgggggcgcaaccttcatccagctgcgtgccaagaatacggacgccaaggatctgacgctcatggcacaggacatcgcgcaaatcatcgaagacaacggcaagtccgatgccgtggccttcgtgatcgacgaccgtgtggatgtggtctggcaggcccgtaacaagggcatcaaggtcgacggcgtgcatatcgggcagaccgacatggaacagcgtgaagcccgcgcgctgcttggcgaggaagccatcgtgggcctgtccgccgagaccgaaagcttggtgaggcttatcaacgagctgccgaatggctgcatcgactatatcggcgccggcccgctgcatgtctccaccaccaagccggaggcttccgtaggcggcaatgacggttccgggaatacgctcgacgaggatcagatcaacaccatctgcacggcgagcgattttccggtcgtggtcggcggcggcgtcacggccgatgacatggagatgctggcccgttcgaaggcggccggctggttcgtggtgtcggcgatcgccggcgcggacgatccggaggcggccacccgtgagatggtgacccgttggaaggccgtacgcggggaaacgaagcatggcttcgcgccgcgagtgcagtcggcggatacggcaacgaccaccgatacgcagatgacggagagcaacaacgggaagttcacgaacgccaaggaagcgaaggcctcttccaaactggccaagcagcagcgcgtagacatcgccgcccgcggctccaagcagcgcgacaaggcgcatgtccgcaaaaccacgccagtgcatttcgaaaaccgattcggctcctacgaccttgaagtgccatataccgaaatcaagttgtccgacactccgggcgtaggcccgaacgcgccgttcaaggattacaacaccgaaggtcccaagtgcgacccgaaggaaggactggcgccgctacgtctcgactggatccgcgatcgcggggacgtcgaggagtacgagggccgtcggcgcaatctcgaggatgacggcaaacgcgccatcaaacgcggcaaggcatccaaggaatggcgtggccgccagcataagccgcttaaggcgaagaaccatccgatcacccagatgtggtatgcgcgtcacgacatcatcacaccggagatgcgttatgttgccgaacgtgagcactgcgacgtggagctggtacgttccgaactggccgcaggtcgcgcggtcatgccgtgcaacatcaaccatcccgaggccgagccgatgatcatcggctcgagattccttaccaagctcaacgccaacatgggcaattccgcagtgacctcctccatcgacgaggaggtggagaaactcacatgggccaccaagtggggagccgacaccgtgatggatctttccaccggcaacgacatccacaccacccgcgaatggatcctcaggaactcccccgtgccgatcggcacggtcccgatgtaccaagcgcttgaaaaggtggaggacgacgcctccaaactcagctgggagctgttccgcgacaccgtgatcgaacagtgcgagcagggcgtggactacatgaccatccacgccggcgtgctgttgcggttcgtgccgatgaccgccaaccgcatgacgggcatcgtctcgcggggcggatcgatcatggccgaatggtgtctgcaacatcatcaggaaagcttcctgtatacgcatttcgatgagctgtgcgagatcttcgccaagtacgacgtggcgttctctctgggcgacggcctgcggcccggctcactggcggatgccaacgacgcggcgcagttcgcggagctcatgaccttgggcgagctcacccagcgagcatgggagcatgacgtgcaggtgatgatcgaaggcccgggacacattccgttcgacaccgtacgcatgaacatcgaaatggagaaggcgatctgcaaggatgccccgttctatacgttgggcccgctcacgaccgacaccgcccccggctacgaccacatcacctcggcaatcggcggtgtggagatcgcccgctacggcaccgccatgctgtgctatgtgacgccgaaggagcacctcggcctgccgaacaaggatgatgtcaaacagggcgtaatcgcctataagatcgcctgccatgcagccgacatcgccaaacaccacccgcatgccatcgaccgcgataacgcgatgagcaaggcgcgcttcgaattccgttggctcgaccagttcaatctgagctacgatccggacacggccatcgccttccatgacgacaccctgcccgccgaaccggcgaagatggcgcacttctgctcgatgtgcggtccgaagttctgttcgatggccatctcgcagaacatccgcaggaagttcggcaatgccgaggcgcaggaaaagctcgtggccgacgcgcaatgagccagagcaaacggtctccccgaccatccccaggccctttcacggcagcttcatccatgggaatcacaagataacaaaggagcattcatgaccagcacattgccaccggtattgagcatcgcaggatcggattcctccggcggcgcgggcattcaggccgatctgaagaccatgctcgccaacggtgtattcggcatgaccgccatcgcggcgctgaccgcgcagaacaccaccggcgtgcgcatggtcacgaataccccaccagacatgctcgccgcacagatcgacgccgtgttcgaggacattccaccgctggcggtgaagatcggcatggtctccagcgtcgagctgattgacgtgatcgccgatcgactgaccttccacaaggccacgaacgtcgtactcgacccggtgatggtggccacttccggagccaaactcatcgaggatgacgccatcgtggcgctgacttcccaactgtttccgctggccacggtgatcacgccgaacatgccggaaacgcaggcgctgtgcgatctggccgtcacgcagggcgcgcagccaatcaactatgacaatggcgaaagcatctccacacccgccgatatgacggtggcagggcatctgctagcggatcatttcgactgtgcggtactcgtcaagggcggccatggcacacaggatgccagtgacgtgctggtcgagccgaacggtcgggtgacctggttcacgggtcatcgcgtcgataatccgaatacgcatggcaccggatgcacgctgtcgtccgccatcgcatcgcatctggcgcttggcgaggatctgccgaccgccgtcgaccatgccaagctgtatctgacgggcgccttggaggcgcagctcgatctcggccatggctccggcccgatggaccacgcgtggcggtggcgctgaccgtacgggctgaaccatcgcataagctgaatcataatgaaaagacgagccgaagaaaggaataccatgtcccttgatcgcaacgccgaacggcaggaggtgccggtcgacccggcaaccggcaagccgtatatcaacaccttggccgccgtcgccatctcccccgccggcgcaagtccggaaaaatccacctacgtgtcgcaggcggtcgacgtgattcgccaatccggactgccgaacgagaccaatgcgatgttcaccaacatcgaaggcgacatcgacgatgtgctcaaggtgatccgcgatgccaccatgaagctcgccggacagggctaccgtaccgacgtggtgatcaggcttgacatccgtcccggattcgaaggccagattcacgccaagcaggaactcgtcgatgagattctttccggtgaccaacaatgatgcggcactgacacaccgtcggttttctcaagaaatgcaatcctccggaataagggaaggtatagtgttgcccttatgacgacgatgaaggaaattgccgaaaagaccggtgtgtccgtatccaccgtttccctggtgctcaataaacgcgatgtcgggcgtgtcaagcccgacatcgcgcaacgcgttcgtcagaccgccaccgatctgaggtataagcccaatcctctggcgcgaagccttcgtaccagcaagacccgcatcctcgggttcatcagcgaagaggtcgcgaccactccgtacgcaggcggcatcattctgggcgctcaggatgcggccagcacctacggctatatgctgatcaccgtcagcaccgacggacaggccagcgaggaaagcgagatcgccgcactgaagcggtacggcgtggacggcttcttctattcgaagatgtcgaaccgcatcgccaccgtgccgaaaagcctgtccgattatccggtcgtgctggtggatgccaccgacgcgaacaacacactccccagcgtcgaaccggacgaattccaaatcgcctacgatgccaccagtcgtctgatcgaagccggttgcgaacgtatcgcctatgtcggctgctccgagaacatgatcgcccaggacggtcgtcttgccggctaccgcgccgcattggaaggcaccgaccacggtttcgatgcatcgttggtatgtaacgtattgaacaatggtccggccttgcgtgccgtggatgcattgttcaatacgtgcaatcccgatggattcttctgtttcaacgatgcacgcgcctggtatgtgtacgagtgcgccgcccgccgtggtctgaccgtaggcaaggatctctcggtcgttggcgtggataaccaccgtgtgttcgccgagactttggaaccacagctgaccaccgtggaactgcctcattacgagatgggatattgggccgcctgcaagctgatctccatgatcgaaggcaaaccggtcgacaccaccaaatggccgcgaaccacatctcccctgccaccgcttgacgccccgattcccgcgaagattcattgcgccctgatcgaaaagggctccgtggcccgctgacgccccggcgccccaccccgacgcaagccatcgaccatactcacgacacgccgaaagggtggtattggcataccccactttcggcttcattccggcaattgtgtatatcctttgcgattattgacgtcaatcgatttacgtcaatcgattgacgtgttacacttgagtcagttcgccacccgacatggcagctgggaagacgaacggtaaacaatacaacatcagcaaataacagcggtgtcgcacggcagcggcaccaagaagagaaaaagagaaatcaatggcaagctcaactcgatctgcatggaagaatccttcctatctgcagagctcctttggcatcttcatgttcttctgctcctggggcatctggtggtccttcttctccaggtggcttaccgacccgacccacggcctgggcatgacctccgccgagcagggccagatctactccatcaactcgctggccactttggtcatcatgttcgcctacggcgccattcaggaccagcttggcatcaagcgcaagctcgtcatcttcatctccgccgtagcggcactggtcggcccgttcgtgcagttcgtatatgccccgatgctcaccgccggcggcgcaacccgctacgcaggcgtgctcatcggctccatcgtgctgtccgcaggcttcatggccggttgctccctgttcgaggcggtcaccgaacgctattcccgtaagttcggctttgaatacggccagtcccgtgcctggggctccttcggctacgcaatcgtggcgctgtgcgcaggcttcctgttcaacatcaacccgctgctcaacttctgggtcggctccatctgcggcctcggcatgctgtgcgtctacgccttctgggttccgtccgagcagaaggtagagctcaagaaggaagccgatccgaacgccacgccgaccaacccgtccttcaaggagatgatctccgtcctgaagatgccgaccctgtgggtgctcatcgtcttcatgctgctgaccaacaccttctacaccgtgttcgaccagcagatgttcccgaactactacgcctccctcttctccaccactgaaatcggcaacgccacctacggcaccctgaactccttccaggtgttcctcgagtccgccatgatgggcgtggttccgatcatcatgaagaagatcggcgttcgcaactccctgctgctcggcgcaaccgtgatgttcctgcgcatcggcctatgcggcgtgttccacgacccgatttccgtgtccatcgtcaagctgttccactccatcgaggtcccgctgttctgcctgccggcgttccgctacttcaccctgcacttcgacaccaagctgtcggcgaccctgtacatggtgggcttccagatcgcctcccaggtcggccaggtgatcttctccaccccgcttggcgcactgcatgacgccatgggcgaccgtccgaccttcttcaccatctccgccatcgtgctcgcagcactggtctacggcaccttcgtcatcaagaaggacgaccaggaggtcggcggcgatccgttctacaccgacaagcaactcaaggcaatggaagcctccaaggccaacgcctgagtcgcaaatcacgaatcgtagaacgacctgaaacgtggtgctcgaagcggttttccccttttgccgcttcgggcatcatcaccataaccaaacacatcaatcacattccctcatgaaaggcaatcaacgatgactggcttcaccccggacgcaccggtgctcaacgaatttacgaaccatggcgaagagctggccaaagccgaagcgggcgtggccgcaatgttcgccaagcgcaacaaccgctggtatccgaagttccacatcgcctccgacggcggatggatcaacgatccgaacggcctgtgctactacaagggtcgctggcacgtgttctaccagctgcacccatatggcacccagtggggtcccatgcactggggtcacgtctcctccaccgacatggtcaactggaagcgcgagccggtcatgttcgccccgtctcttgagcaagagaagaacggcgtgttctccggttccgcggtgatcggcgacgacggcgagctcaagttctactacaccggccatcgttgggccaacggcgtggacaacaccggcggcgactggcaggtgcagatgctcgccgaaccggataacgacgagttgaccagcgctaccaagcgcggcatgatcatcgattgcccgaccgatcaggtggatcaccactatcgtgatccgaaggtgtggaagaccggcgacaaatggtacatgacctttggcgtctcctccgccgagaagcgtggccagatgtggctgttctcctccgacgacatggtgcgctggacctatgagcgcgtactgttcgagcatccggatccgaacgtgttcatgcttgaatgcccggacttcttcccgattcgagacgcggaaggcaacgagaagtgggtcatcggcttctccgccatgggtgcgaagccgagcggtttcatgaaccggaacgtgaacaatgccggatacatgatcggcacgtggaccccgggtgaggctttccagccggaaaccgagttccgcctgtgggactggggtcacaactactatgccccgcagtcgttcaatgacggcaagcgccagatcgtctacggctggatgagcccgttcgtcgagccaattccgatgcaggacgacggctggtgcggcaacctgaccctgcctcgtgagattacgctgggtgccgatggcgatctgcacaccgctccggtcgccgagatggaaggtctgcgcgaggacacgttcgaccatggcgcgatctcgctgggcgtcaatggagagaagaccatctccgatgacgccgaggccgttgaaatcgaaatgaccatcgatctcaacgcctccaccgccgaacgtgccggactgaagattcatgccaccgaggacggcgcctacacgtatgtggcatttgacgctcagatcggacgcgtggtgatcgaccgtcaggccgccgcacaaggcgaccgcggctaccgcgccgcaccgctttccgatgaggagctggcctccggtgagctcaagctgcgtgtgtatgtggaccgtggctgcgtcgaagtgtacgtgaatgacggacgccaggccatgagctccttcagctacgcatccgaaggaccgcgcgccatcaagcttgtcgccgaatccggcacacttgaagtcaagtcacttaagcttcaccacatgaagtccatcggtctggagtaaatcccaatccacacggatcatagtccagcgaagaacctacgccggaggaatgatagcggaaagcgcccattcctccggcgatttcgtaatctccatatgtccgccgcggtcctcgatcagacgcccataccgcgccaagccgctgccatgcaccaaatcagcatcacggttggcaggagtatcgataagcgctatgtgcacggcgtcgtcttcgatgccgacagtcagcacatatccttccgaaagttcggcatgtttgatgatgttgccgtacagctcctccacgaatccggcaatcagatcatcgcaggcgacttcgccttcgccggaaacgatcgtccttccggaacagcccagtttggtaagcctacgttccatgagctcggaaatatcctgcagtttcgaccgcaatgtcactccattccgcatcggttgcgccttcgccgagccgcgagaccgcgcatcgccggaatcttgagagccctcgtcccgttcgatcagatcaatgacccgatgcgtatgggtcagcgcattcgccgcgacggaccgcaattcacgcagctcggcatcatcgggaacatgcccttcggcgatgtcgccgtcgatgcgcaacaccagataggccagatcattggacacatgatcgtggatgcttctcgccgcacgggcacgccgccgccgctgttccgcacgcatccgttccaattgcccgtcatatcgtcggcgcatgcaatagccgccgaatacgaatccaatcggcagcacgcacaccataatcatcacctgccatgggaaaccggatggcgttacgatttcgacattcgcatcaccgctgcttccggaatcgccatagacatcatccgtttcagcggacccttgtactgcggaccgttccggcgacgatgcagacgttgccatgaacggcatgtccgcatcatgtatcagcggcgcgatgccttcgcacatcatcagccaggcgaccatcgcaagcatcgcacatatgccggcgacgaccgcacgccggaatgccatcaccgccaacgagaccaacatcaacgcagtcaggccgaccggcgtcacgccagccaccaagcatagggcgatccacatcgcaacggtcgccattgcggcccttaggggaaagcgaagcatcagcatcgctacgcatgtggcgagaagcacacagcagcccagcggaatcccgatctccccgatcagcatatgccagatggcttccgtggccgagcccacgccaagtgatatcagagcgaccgtcctccacttcatcagaactcatgcctccgtatgcagatcgcgatggcatgcgccctcgagcgtgcgttcagtttcatggtcgcccgtcgttcgaaggtggcgaccgtcgccacgcttacacccattcgccccgcgatttccttggtattcagcccatccgcatagagtcgaagcgtttcgcgttccttgttcgacagtttgccctgcctggcatactgctgatcctctatgtagttgctggcatcctgcaaatccatgaaccgtactgcttcgccattggtcgcctgcgtcgcttcggaagtccgcccgccttcgactccgtcacatgctttgatcggcattcgatacgccttgccctgcgccgcatcgcaaatggcgttcctgagattcgctatatccgttttcgcgaccagcgcctgcatgccactgaaggccgccgcctcccggaagctcgatacggtgtaggaggtgacgcccacgatgccgacctgtgaggtgcgggcccgaatcgcgcggctgatttccggaccgtccgcacccgccatggccatatcggtgacgagcacatccggacgtttggccgtgctgacgcaacgactgatcgccaccgcacctatgtcggtggtccaaatcacttcgaagccggcatcaagccgttctatcaacgttttcattaccgtaagcgcatatgggtcgttgtctacgattccgattcgaatggtcacggcaggccctttcctacgtttctatcattatccgaaatgcacgatgccgggcaagttgtcattgaggctctgacaaaagatgaccttccacgcacggttcgatatgctgaaagccaacagacggcaatccgccatttcgaagatgacaggcgggtctcataccaggtacgaacaccagacatatcggcatattgtaaaggaaaggacaagccatgaagcgcatcgatctgaagggcacgaccatagtcacaccgaagtcggcgcaacggaacaaggccggcagacgtgtcatcatcgcgatcatcgcggcggtacttgccatcgcaatcgtagtgacggggggattctggtatttcgcttggggcggacgttacacagtggccgacctgttcaggccaaaggcagttgcggcgagcgatgccgcggtggagtcatcacggtcgttcgcctacgaaagcgcggtgaagttccttgccaagcagaagaacgtcaactactcccccgcttcgttgcagatggcgttgctggtcgccgcgcagggagcgaaaggcgatacgctgtcgcaactgcaacaggcgctggccagtgagaagctgagtgacagcgatcttacgtcgatctaccggtcgattatcggcaaacgcagcggcaagtcacgtttggatgcggcgaactcgatatgggcccgtcgcgatcttacgctgaacaaggactacaccgatgccgtacgacgtatcttcgggacgcaagtcaagcgcgtcaaggcattcgacaacgacaccaacaaggcgatgagcacatggatcagcgaccagactcgcggcatgttgaaacccgaaatcgacactcccaagaataacggcatgtcgattctcaatacgctctacgccgacggccgttggagcgacccgttcgacaaggcatccaccaagaagtccactttccacacgctgcagggttcgacgagcaccattgatttcatgcataagaccttcgagaccgaacagcatgcggatgatgtcgacgcgtacacgaaaggcgacggctggcaacgcgtggatcttacgtttgacaatggcggacgcatgaagattctgctaccggacaacaacacacggttcaaggcgttgcgaggtgacgccgccgcattacgtaaggcgttctccgccaaatcgaatgcgcagagcgataccgaagtcaatgtaagcctgccgaagttcagcatcgacagtacgttcgacagtgattcaatgatcaaggcgatgcaagagatgggcgtcaccgacgccttcaacgtggataaggctgatttttctggaatgtcggatgcgcagatgttcatcggagcgatcgttcagggcacgcgcatcgaagtgacggaggctggggccaaggccgcggcttatacgcaaatcgatatggaattggcgatgatgcccgtcgaaaccgtcgatttcaatgtagaccgcccattcctctacgaattcgactcccctgacggtctgccgttgttcatcggcgccgtgaccgaactgtaaaacagtctgatttccacggaaagcggcttattcatgacgcccacgtatcatgaataagccgctttccgtggaaatccgccatttactgttggagataagtcccaatccatccgaaaacacgataatgcactccgcaccatggcctatactggtctgccggtaatgaacttttctgaccggagggcgggcaggctcctcaccttactgatttccctccgccggtcgcgtgggcgcccactttggcgcagaaagcaaggtgaacgatggctcaaacgcacgttcaacacatcccttcggctgggaacaaggtctccgcgacggcgcctgcgacttcggattccgtcatcattacggcactgcatcgcttcatgacaatctgcacaagacgtgttcccacgattgccgcaatcgtgttgctactggtgatctgggaggcttgggtacggttcggccatgtgccgagcacgatgatcgccgctccgagcgaaatcgcacaggccaccgtcgaaacctggccgacgctttggcccgcaacgcaggtcacgttattggaaggcaccgtcggattcctgttcgccgtagcatgcggcattctgattggcattctcctgtactgttcgcgcacggcgaacgccgcattgtttccgctgctgtcggccgcgcagaccatgccgctgatctcgatcgccccgttgtttctgatttggttcggttttgagatttccggcaaaatcgtgatcgtgacggttttcggcctgttcccgatcgcggtgcagacgattcgcggactcgaggcagtgccgcaattttattccgatgtcgcgttaacctgcggtgcgacgaagacgtggaccctgtggcacgtgaagctgcgcgtcgccgcacggcagatctatggcggcatccgcgtctccgcagcctacattttcgccaccgccgcgaccgcggaatatctgggcgcacgcaaaggcctcggcatctggctgcaggcggcatacaactcgttccgcacaccgctgatcttctcggccacactggtcatcatcgtgatcaccggcatgctcatgtgcctggtgaacctgagcgaacgcatcctcctcggccccgccgacgccgacgaggatccggatgcggagcagtgaaaccctcagttccatcacacgtcacaccaacccgtataatgggtgacgctgttaagccaatgtgtggcaaaccggccatattccaccgcccgctgggtgcatccatagggcacataaggaatcgtcgggggcattggacgagcggagggcttgggcccttcgtaccgttttctgcccgaactccgcccgcagcacatccctagaaaacggtagagaagcaagattcaagggaaatcacatcgtatgaagaacagcatcttcagcaagttcgccggcaaggcaatcgcactactgggctctgcggccatggttttcagcgtctccgcatgcggccagagcaacgacacctccgcccaaaccgattcggatggcctgaccaaggtgacgttcatgctttcctgggctccggataccaaccatatcggcgtgtacgtggctaagaacaagggctatttcaagagcgtcggccttgacgtggatatcgtggccgtagcgcaggccggcgccgagcaggccgtcaacaacggcgtggccgacttcgcgctgtcgaatctcaccaatgtgagcatgtatgccgtcaagggcgcgaagatcaagcaggtcatgcaggtacagcagaagccgagcgccatctggtgctcgctggcgtccaacaccgagatcacgtccccgaaggacttcgacggcaagaccttcgccaccttcggctcgaacgaatccgacgcggtgatccgccgcatgatccagaccgacggcggcaagggcaccttcgacaaggtgaccgtcggcacctccaccttccagaccctgtccagcaagaaggcggacttcggcggcttctacgccacttgggagggcgtgcaggccgacatgtacggcccgaaactcaactgcttcaccgaacccgattacggcgtgcccggcaatgccgacaccatcggtgtgatcaccagcgacaagaccatatcctccaatcccgatctggtgaagaagttcgtcgaggccaccaagaagggctatgaatacgcgtattccaatccggacgatgcagcggaaatccttgtgaaggaggctcctgatgcgaatctcaagcccgcattcgtcaagaagagcatgaagacgatcgtggacggccagtattggggggatccgtccaaaatcaaggacggttcgttcgtgttcggcacgaacgacaccgaaggtgcgcaggagtatttcgacttcctcgcgcaggaggacgcctacaccgattcgcacgacaaggtgattcacaaggctccgcaggccgatgatctcgccaccgacgaattcctgaagtaggtaacgacatgcgccttcgtgccgaatatgcggaacacgcttggaacacgcgtgataacactgcatgttcggcacgtcttctacggcatcgattcggtacagtgaatgcatgaccatacagtctgaagaacccatgaacgaccgcaaactgattctcgacgtggacaccggcatcgacgatgccttggctttggcgtatcttgcgactttcgatgatgtcaacctgctcggcgtagtcggcacatacggcaatgtcgcgatgggaaaggccgttcgcaatacgcagtatgtgctggagcggttggggctccggcacattccagtgatgcgcggatcgtcgcatccatcttgggctgcatcattcattcctgacgccggctgtgcgcagttccacggcacggacggattgggaggattcgggccagacgcttccgcacttgccggaatgtccgattctggcgaaacggacattccggacacttccgcacccacttgcgtgtccgattcggccgaatcggacatgtgcaggctgatttccgtcggcggctatgacgtgcatgacccgcacgcgaatcctgccgctgactcgttttcacttaccttctcctcccctggtgccgcaaacgtcccttgctcccctgtcctgtcggaaggcgtgcgcttcatcattgacacggtccgccgatatggccgtaacgtcacggtggtggccaccggcccactaaccgatgtcgatatggctcttaccgcagcaccggacatcgccggcagactgcgactggtgatgatgggcggcacactcacccaggaaggcaactgttgggatctgaccgccgaaacgaacatcatccaagatcccgaagcagcggaccgtgtgttccattccggcgcggatatcaccatgatcggtttggatgtaacgcaccagtgtctgctgggcggcatggccactcgacgttggaggaaaactgccgacctgcgggcgcacgccaggctggatccatcggcatccttggaaggcgctgcatgctcacatcgcttatccgacccaggcacgctgcgattccttgccgatatcgctgacttttccatcgccgccaatctcagggccgacgcacgcctcttttccgcaggcatgccactgcatgatccgctcgccgcagccgtcgccgtcgattcgacgttggtccgctgccttgacctgccgatgaaggtcgagacgaaaacgggtgacttccacggtacgcgcggccgtaccgtcggcgatccggagggcctgatcaatccgcaggcgccccgcatccatgtcgcattgcatgtcgatgccgaacgcttcgtagatgaattcgcgaaccgtatcgacggcatccggccttagtcgggctgtaccggcacggcacttggtggttcgttcggacgaaatttggaagatggtggtttgtttggacgaaatcagcccggatttagtccaaacaaaccaccaattccgtagaaacgtctgaacacaccaccatcagccataattagccgcacgattcccgccttggcacacgcgcaccctccaatcgccgcgtcagggttcgagcatcgtccaaatccgtgtaatacatacgaatcatgtccacgccttgcttgcccaaacaccgctgccgatcgcgctcctcatcgacaacctgcctaatcgtgcgtcccgaggtcatcgacggatccacatattttcgtaccccatcaaattccccggcgatcaacgtgccgtcctcgcgtttccacaggaaatccaccctatgcatatgaccgtgacgattcgagcagggaaactcagcctgaatccaatgcacaggaaatcccaactcatccaataccgcacggcattccgattctccgccgttctcgctgccaccattgcccttggcgattacggagcgaatgcgttccctgccgcgcagcatcggaagagcatccgcatacgccagcaacgactcgatcgtgattcttccctgacgcaacgcggaatcaatcggtgccaacgcgtagcgaaacggcatcatcgcggcgcaatcgacaagcgtgcgctggattgacgtcacatgcacgccgtcaacgactacggcatcgggatcattgagaacgtgataccgtacgttcgcctggcttttagagcgacggcaccgatccactgcgacatgaattggatacagctgccggtatgagcattccaaaccgtgcacgaccgccgcgcttgccccgcagaacaaccattgttcatgccattgccccagcgaacggatgacatgtcgcaaccgttcatgctggtcaagacgctcccaatactccttgaccgcatatagaccgcgatatacccgcacaatactgccttgcttgacacgtcgcgaaaccaccttgacatccgtatcccagaacggacgcatgcaacgtcgctcctgctgcaccttcgcaatcaggagattcaaagaacagtgcgcttctttttcacccatttgcgcagtctaaacgacctgaccatgtcaagacaagttgacggtgcggtcggaagggccgggctaaggcacacgtgtgcgactcattcggacgaaatcagggaattggtggctcgtttggacgaaatcggccctaatttcgtccaaacgaaccaccaatttcacggaaacgtccgattgaaccgccaagaatgcctggcagattccaaaatgcctggtgaaatcctacttcttaaccccaccgaaccggcggtcacggtcaacatagtggctgatggaacgccacaacacctcacggccgcagtcggggaagagctccggcacgaagtcgagttcggcgtaggcggcctcccacggcaggaagttggaggtgcgctgttcgccggaagtacgaatcaccagatcgcaatccggaatgtccggattgtacaggtgatcggcaatcatcttttcggtcacacggtcgccggaaatcctgccgtcacgcacctcacgcgcgatggctgcgcaggcgtcggcgatttcggcacggcctccataattcaggcaaaacaccacatcgatggtcttgttgttcttggtgcgctcctgcgccacctcaagttcgtcgatgacggacttccacagtttcgggcggcgaccggaccagcgcacgcgtacgccccactcgtccatctgcgccacacgacggtggatgatgtcgcgcgagaagcccatgaggaagcgcacctcctgaggcgagcgcttccagttctcagtggagaacgtgtacagcgacaagtagcgtacgcccgcctcgatggcaccggcaatggtgtcgaacaccaccggttcggcggcctgatggccgtcggtgcggatcaatccgcgctgctgcgcccaacgaccgttgccgtccatgattacgcccacatggcgcggtaccttgttcttcgggaaatcgggaataatcgacggatcggaaaaaggagccgccggaatgtcaagcgacttgtagtccacgttctcaaaagccatacccgctaatctagcaagcgcagcgaacgaatcggccgctccagatagtactcgccccatttttccaccaattggcgggtttcggcggtcagtggtgccgtatccaactctccccaatcgccgtcgaccagcgcctgcatctggcagagtgtgttccaaggaatcagcgtggattccggagtgtggtcggcggagcacatcacgccaccggctggaatcgaaaaataccaggtccttccggcatcgatcggatctccgcagaccacgcacgcacgcaagcgcggagtccatcctgcaagtgccaatgcccgcatcacataggagtctccgatcgcattcgaatcatgcgcatgtttggcaagcgcattcaacgcacccaacaccagccggtactgcatcgtcatacgctcgtgttcgccggccacgagtttgtcggcggtttcggcgatcacattggctgcggcataggcgccatagtcggcgcagatcggtccggcataggcggaaatcgattcggcctgtgagatcacatcaagggagcggccttcggctaccagcacatccacacgcatgaacggttccagacgcccgccgaaccgtgatttggtacggcgcacacctttggcaacggcacggatcttgccgtggtcgcgcgtcaacaaggtgatgatgcgatcggcttcaccgagttttgccgtgcgcagcacgaccccttcgtcctgatacaacggcatgatgtgcacctcctttccggataatcgccctgcgttgtctctcccggccccagcggatacttcagtagatgaacagtccccagaaggcgaagaccagcagcacgtccagcatggcgatagccgtcagccagaacaatatgcgaccgaatcgtgtggaggcaagcaccggctgccggccggagactatttccctgatggcgccttgacgtggcggccattgcgcaagacctcgactgcccgccacttcgatcagtctcatgaacacacgcgaccacgcccagaccacggccacgcagacaatctggatgacgggccaactccaatacatcatgcccggatcctcggctggcgcactgccccatgccaatttgaccacgcccatgatcacttcgcccaggcccgcgaagaacaataccaatgtggccatggtggcgatggtcagcgtgaccagcgcattgccgaaaccatgagcgaaccctaggcggtaacgacgccgatgtgcacgcgcccaaatcttacggatcaacaccgccagccataccaccgcaatcgccagcagcaacaacagcatgctgacatgcaatacgaccagatagatggtcaggcctcgattcgccttcaactcgagcggtaccgcaatcgactggtacagttcggctccggcaacgcgttcactggtctgtgtcagaccttccgtcgtgccgacggcccaactgatcacatcattgacatagtcgtcggcgaacggcgtgccggtgttcgcctcgtcccccaggcgcaacacatgattggcgatcgggtagctgcgtacggtcacgtcccagttgccggccttgtgcgccatatccacgattttttcggtgccttcgacctgtgcggtcatcacatccttggtaccgtaggccaccagcgtcggtatcgaataggcctgcggcaccagcgtctcgatatcgaaattggtcagtccgaacagttccggatcgatgttgaagacgcgacgcacgatcgactggtagccgtcatgcgcgccaaccagcgcgaaatcctgcgcggcgagaaatcccaacgaatgtcgtggcgagtagaccatggggctgaggagcacctgaaacgccacgtcatgatcctgctgcagcagatatgaggagatccatgtgctttcggaagtcgcataaatgccgaccttcgtctcgctgacattgtcgagggagcgcagatatgtgatgacctgatcgtagatggcggccgatcccggataatcacgagtcgcatcattggtggaccacaccggcttgtcgagcacggctgtgacgaagccagcggaggacagatcgtaggcgatgtcgccgaaggaattgtcgcaggttccgtacccggctccgtgcatgaaaactacgccgggccgattgccgccggcgcctttcggttcacggatgagcactttgattttttggatttccccagtggatggctgtttcgcgtcgatggtgatgtagcgttgactcacctcatagtcgccctgttgggcgacggccttgccggtcgtgtcgtcgaaggtgatcgcagtatcggacgccagtgtttcgatggtctgtccggtcggttcgtaattccacgtggtcgcggtcagattcgagatggaaaccagaacacccagcagaataatgaagatgggcaggcttaccatcaaccgtctgccgcgcgaccatgcccgcgccgggcgagcggtttgaagctgacgttcctgatgtgacacgccgttcattctaccgactccggctgagatgaccttcagtgcgtaacaggtacgaccaccggtccggtggcgttgaccggcacctgaccgtcgctttccatctgtgcggcgatatcctgcgccttggtgagcagggtttcgacgatctggtcttccggcacggtctggatgactttgcctttgatgaaaatctgtcccttgccattgcctgacgccacgcccagatcggcttcgcgagcttcgccggggccgttgacgatgcagcccattacggccacgcgaatcggcgcggtgatatccttcagcccctcggtcacggcattggcgagctgtatcacatcgacctgcgaacggccgcaactcgggcaggaaatgatgtcgaatttgcgttgccgcagtcccatgtattcgagcagcttgcagccgaccttcacctcctcgaccggcggagcggacaatgacacacgaatcgtgtcgccgataccctccgccagcaacgcgccgaacgcgagacacgacttgatggtgccctgccatgccggacctgcctcggtgacgccgaggtgcaacggccagtcgcctttggaggcaagcagacggtaggtttcgaccatggtaatcacatcatggtgttttacggagatcttgaagtcatggaagccgacgtcctcgaacatgtgggcttctttcatggcggaggcgacgagcgcttccggggtcggaccgccgtatttggcgtacagttccttgtctagcgatcctgcgttcacgccgatgcgcaaggagatgcccgcatcggtggccgccttgcagatggagggaccgacttcgtcgaatttgcggatattgcccggattcacacgtaccgcggcacagccggcatcgatggcctgaaacacgtatttgctttgaaagtgaatgtcggcgatgatcggaatcggcgatttccttacgatttccggcaaagcgtcggcatcatcctggctgggcacggccacacgcacgatgtcgcaaccggctgcggtcagttcagcgatctgctgcagggtcgcgggaacatcggctgtgagcgtattggtcatggactgcacggagatcggcgctccaccgccgacaggcaccggccccaccatgatacggcgggattcgcggcgcgggtgcagcggactttcgctgatggcggcttcaccggtcttgcggaacggcttttcgatttctggcatcgtcaataatccttgtaagtcaaagcatcgtcggcggagccaacgaaaccactactgagcaaaccactacttatttatcagttcgtcggcacgacggcgagcttcatgttcgagttggctcatttcctccacggatgcgaacagcggattgcctcgcatttcacggtccatgtcgtcaagcacctctttgacggtatcgacgatgccaaggtacggtagacgatgctccaggaaggcatgcacagcctgttcgttggccgcgttcagtaccgcggtatgcttttcggacgcctcaaggcagtggcgtgcaaggtttacggccgggaacgcctcatcatcaagcggttcgaaggtccatgtggcagccttcgtccaatcacaggccgcagcgacatcgccaagtcgttccggagcggagagtcccaacgcgatcggcagcctcatgtctggtggcgaagcctgcgcaatggtggcgccatcacggaactcgaccatcgaatgcacgatggactgcgggtgcacggtcacctcgatgcggcttggcggcacgtcgaacaatcggctcgcctcaatcacttccaagcccttgttcatcaacgtggacgagttgatggttacgaccggccccatatgccaagtcggatggttcaatgcctgctcgggcgtgatgtcgatcatttgattgcgcgtccaaccgcggaacggaccgccggatgcggttacgaccagtttggacacctcgccatgcgtgccggaacgcagcgactgccagatggcggaatgttcggaatcgaccgggttgatctgctgcgcacgaacctgcgcgtcgaacagcaggtgaccgccggccaccacggattccttgttcgccaatgcaagctgggagccggaccgcagcgccgcaatggacggctcaagaccaatcgaaccggtaatgccgttgagtaccacatcggcaccggaaccggccatattcaccacggcttcgggtccggcggtcacttcgacatgtgcagctcccgcctgtgccagagcatcacgcaacggttgcacggcatgctcgtcgaacacggccacgcttgaaacgtgaaattgcgcggcctgccgggcaagcaggtccacatgcgcaccgccggccgccaaaccgaccacgtcgaagcgatcgggatggcgtgagatgacgtcgaggccctgcgtgccgatggaaccggtggatccaagaattacgactgttgaagtctgcataagctatgcgttttctccagtgttgatagatgcgacaatccgatgatcgaccgacgacagttgccgatcagtcatcgaatgtcgggaaggacagatcgggaatgtcgacgttcaggccatgcgaatcaccggggaacagcggcgaaaccttcgattcgtccttcttctcctcggtcttgcccgcatcccccacagtaggggactcaggcttcgtggcggttccggcgggctcagccggtgccgccgaaggtgcggaagcgctcgaaatgtcaatggacggaggaaccggcgtatgctgggcggccaacaacgaggtcatggagctcaggtcgagagcgtcggtgttgacctgtggcacgcttgggacggacagatccggaacatacggcgcagacgaggtttcggccggggacggctcgtcggtcgattcagccatatgggccaaagcggccagcgaggaatcggcagcgggctcagccggtttgtaggccggggccgcaggagcgaagctcggcggcatatcagaaacgggagcttcagcgttcgcgtcttcctcggccttgttttccacggaggcgcgagtgacggacggttggaataccggaggcacggatggcgggagcgtcgccgatgtctccgcctccggcgtgctgacgggagagacggccggagccgcgaaaatctcacgttcggccttgttaagcgcatcgaacgactcgcccggcttcgaagccgtttcgtcgtcatgttccgtcgtcatcgcaggcttggcgaacagcggagcgatcaactgggtctccttggcatcggaggaggccgacgtctgctgcgaggtctcagtgggctcgcccacgaaatcggccacgcgggcgtatgactccagacgggtcagcagctgcacgcatgaactcaggtaatagtccacctgacgttcgtcataaccccgcttgcccttgcgttgcgtgaagatcacgttggcgacggacgtcgaattcagatcgacgagatgcttggcatcctcacgggagatcttttcgatgtcaagttcggaagcggctttcgccatgctctggtcgatgatgcggtcgacctgcttgcggtcgtaggacggcgtcttcggctcccccgatttgaaacgttcgccggccgcacgcttggcatgttcgtcgagctgacggtatagcgcctcggtctgggccttccaggccacccggccatgctgagagatctcccacgtggtctgcttgtcgactacggcacgttccagacgggccagagccgcgtcgacctgggcaatcacatagccgcccttcaccagatcgaacgagacattctgaatgtcatgctgggtcagctgaacgccttcgctctcatacagcatgtgcgcacgctccaaaaaagcgtccacctgcgcagggtcatatccccacttgcgctttccggtgcgagcgactccagatgcgttcctaccggcttcaggttcctgcgccattggctatcgacctcctacagacagtattcaacgtcatcactttacgtgattgattcgacgcccatgcgatttcatgcaaaatgtcgcggaaacaacacgcgaaacacgtcggaacatacctgcggggctcgcgcgactcgcccgacacgcgatgcacgacgcaccatacggtacagtagagcgttgcgggcgattagctcagttggttagagcgccacctttacacggtggatgtcgggggttcgagtccctcatcgcccacggtttcctgcaatcatcagcgaatgagcattctttattttgcccccgtaggcacgcatccccttacggcaagagattgttctattgcctgttgtaatcgcatttctggcactgcgccatcacattgtcgctgctttcccgttgaaaaataccagcccatttgcagatattctgaagaatcggcaccactgattttcctctgtccgttaaggaatattccaccctcggcggtatctcatcgtattgtttgcgagcaacaagaccatcgttgatgagttccttcaatgtggaggaaagcacggcatcggtaacattgagcatttccttgcgaatggcgctgtatctcagaactcccttttcattcagcacacagatcacacgggatttccatttaccgccgaacactttaagcccatattccaaagggcacctaatgtccgcctccatcttcttccggtacatttcaacgcctcccgatttttcatcttcaccatagcatgattactttgatggatatagttactattaaatttataagtaacttataaacttctttatatcttccattcgctgagttagcacgatatgctcgaatcgcatccggaaaggtgcaatgcaagcaaaaacgctgataatcggaaggattcataatgaaggtgcaagcttatcttgaaatcaccatggtcatcaatccggaaaaccgtccggccgcggcaaaggtctacactgactatcgtcagccgttccttgacaccatcgaaggtgccctgacaaaagagctccttattcgcgacgaggacgttcaggttatccacggtttcgacagcatggagcatgcaaaggcatacctcgaaaccgatttgttcaagaacgatgttttcgtcgggctcaagccgacttgggccgctgaccctgatgtgcgcttctacgaagttgcataaccatacaccttttggcccctgtagagttccgttgcctatgtcaccggcaacggaactctacaggggccaaaattattgtagaaaacgtccgtaacagacaagccgacctgttccatcaatgaaaaatggcttgaatcctattggagtcaagccatggagcatcgtgttcacggtgcatgccgcacttgcggcagacgctcattcgtctgacgcacaccgcccgtgtcgagcggaagtcttatctgcctttgccgaaggcgcgcagccggataccgttccaatcggagcttacggtcagcggcgtcgcagcattcatgcctgcggtcttggccgcggactgcaccgtgcttgagcttgcagcgcccggacgtcccggtttcggggtcaacacccacaacgggccatcatcgccaagaaccgcatacgcgtcgacgatggtatcggacagctcatcctcgtcgtcgccgtcacgccaccagatgattacgccatcgacagcggaatcatagtcctcgtcgaccagttcctcaccggtcagttcctcgatcttggcgcggatcgagtcgtccacatcgtcgtcccacagccattcctgtaccaggtcgccggcttggaaaccgaattcttcagcgttatcagatgccgtttggttcacgttcgccaatataccaacacagctcgaacatatacgttacgaacgctggaattgctcactgttcgagattgcatccgcacggattgcgcctctacgatccgatcacccgctactcggccttgcaccccgaaagagatgagcccttcccgtcgcggatggcaatcaacacctgatatgcctcgtcaagggtcgagaccttcaccacattgagtccgtcgggaatatgacctaccacaccgtcgcaattggattcgggcgccaggaaccaggtggccccgtcacgtttcgctccgagcatcttcaggcggatgccaccgatcgcaccgaccttgccctgatcatccatcgtacccgttccggcgatgatgttgccgccagacagccgttcgccggagatcttgtcaatcagacccaacgaatacatcatgccggcggaaggcccgccgatatcatcgacatgcatggtgaccttcgcctgtgagacgtcatagcccttgtctttgaggaagttcagggccgcggtggtggcggaatcctgcgaagaagtcatttccttttcgctgctgctcttgtattcctcggtagtctgtccgaccggaaccacggcctcgcgcggcatcaccgtggtatgaggatcggcccagccccacagcgcctgcgcattggtgacgggatatcccggcacgcctgaggcgttgacggtcaccagcaacagctgaccggaatccttatgggtcttgacccccgatacggcgatgacctgcttgccgccggactcgccaagcacgttctgcgtggggccgggcgtttcgaccacataggcactgggcaataccatcaccagcacacacaggaccacggtgaacattcccgtgagatagcgccatgaacgggccgcgaagaagccatccacgcgcttgccgatgcggttgagtgtgcttttggcgtgaagttgacgtgttacatgcatattgggcatacctcccatagtatggaagcatctgaacttaagaaaaacatgcagaaagcagggaacggcatggacgagaatgcgatccgccagtggcttatcgagtgctttggtccgattcaaggtgaaatggcttggaatcagctttccaaccttcccgatgagattcgcgagcagctgctcagccaggaccccagcaaactgccgaatccggccgaagtgcagtccctcatgcaggccttcaccgccggaggtctcaatacgatgggtgacatgcaacgcacggtcgaagagggcccgattaatgtgaagttggcgaaatcgctggctttgcagcaggcgaacgactccggttccgaaggcagtgtcagtgccggcgacggtgaaatcgcacgcaaggcgatcagcgaggcgaatctgtggctcgacaccgcctgcgaattcaatccggctcccggcgaaacgcaggtactgacccgtgcaggctgggtcgaaggcaccattgacgcttgggcgcagtttgcctcgcctgtggcccagtccatgaacgatgccctggcctccgtaatcgccgaccgtctgggaggcgccgtccaaggtgaaatcgccggcatgttcgccggaccggtgccgattccgattccggaaggcatgaaggatccggagcagctgatgaaactgctcggcaacacgtccttcgccatgcaactcgggcgcgccgccggagatctgtcccatgaggtgcgcggtagcttcgaccaaggcatcgcactgctgaagaatccttccggcgcgttgattgcgcagaatgtcgtggaatatgcgaagtcgctcgacatcgatgtgaacgaggtcatggcgttcctggcattgcaggagctggcccatgcccgcctgttcgccgccgtgccgtggctgatgccgcgttttgaagccttgatcggcaagtatgcgcgcggcatcgatatcgatctcgatgccatggaggagcaactgcgagacgcgggcaccatggatccggaatcgatggccgatgcagtcaatctcaccaaggtcggcattccggacactccggaacaacggcaggcgatggcttcgttggagacgctgctggctctggtcgaaggttgggttgacgccgtggtctggcgcgccggcatggcccacattccgcatatcgagcagcttcgcgagatgcttcgccgtgaacgcgccatcggcggtccggccgaacgcaccttcgaaaatctgctgggcatgcagctgcgaccgaagcgcatgcgcgaagcggcggcactatgggagagcatcggagcacaggaaggccccgaggctcgcgacgcgaaatggtcccatccggatctgctgccgcagttgcccggtaacgacgcgttgacaggcgcggcatcgcaggtcggccatcccgctgaatccgccaacccgcccgcagacagcgaggcggagaacaacgctccggccccggagtccggcaccatcgactgggatgcggaactcagcaagcttctcgacgaggagcagggcgacggcggagagcgggaagaacagcagtaaggccttccgccaattcaggacacgtcagctcaggaaccggctgccccgacggcctcgaccatcgttgaggccgtctttggagcgtgcatacgacagatgcagggtgtcttcggcgcgagtcacgcccacgtacagcagacgtcgttcctcctccaactgatcgccgtcctgcggcgaaccgtatggcaggagtccttcggaacagccgatcaggaacacatgcttgaattccaggcctttggcggcatggatggtggagatggtcacaccgtttatgtccgagccgacacccaacgcctccaacatggccaggcgcgtctgcgcgtcatcggcgagcgcggagttctgccatccgctatcccgacgcatgcgatagcgcagatgctgttcctgcaatgccttgcagaggatctgttgctgtgcgttgatgcgggtcagaatcgcacagtcggaaggagacaccccctgcgaggcgagtttggctatgcgcatggccacaccctgcgcctcttccgtatcgctggcgtatacggtctgtgtgaccctcgggccttgttcccgaccggattgcaatacaagatagtcgtcccgctgcggtgacgctttgagtactcgattggcgtagttcacgatctgcggtgtggaacgatagtctctgttcaggctgatatcggccgaaagcggaccgaattcaccggcgaagtcgagcagactgtagctgctggccccagcaaacgagtagatggtctgcgcggggtcgcctaccacgcaaatgttgcggttgccgctcagccatcgtgtcagcaggcgatgttgcagtggcgaaacgtcctggtattcgtcaacggtgagccatccgatggatgagcggatggtggctgatgcttcgtcatagctctccagaacatggcatgcgatgagcaggatgtcgtcgaagtcgatttcgccgcgcgccgtcttttcggtttcgtatgcctgatacacgtccatgaactgatcgggttcaagtcctgccggaggttgtcgatgcgtggctgcgcacacgcgttggtagtcgttcggtgcgaccagggagatcttgcaccagttgatttccgcctgtagattgcgtaccgtttcgtcatcgacctgcatggtggtgactctgcgcagcgaacgcgccactaattcccttggctgtctgctgatgtgcggaaacggtccttcgcacaggtcgggccatacgcgacggatttgatgcaatgccgcggaatggaacgttgcggccttgaccgcgccgtcgacttcgagttgcgacagtctggaacgcatttccgctgcggcctttacggagaaggtcacggcgagtgcacgccgtggatcccattcgccggtggcgcatgcataggcgatacggcgcgtgacggtacgggttttgcccgcccctgcgcctgcgatgatgcgtacgggtccgttcaccgtcgtggccgcggcccgttgcgcatcgtccagcccttcaagaatcgtctctgcggatgcgtccatatgcaccattgtgcaccctcgcatgccatggaggtcatcaacgtcggcaagtcggtgttgttttacgcctttacgccttatgtgtattagtgttgaccttgtgaccgaacgaagcaaactcatgatggctgccctgacgagcgcggcgatgccgaatatcgccgtggcgggcgtacgtggcagcgaacagaccaattcgaccgacgagggttgcggcatcgatcatgccgtggtccaggacgccgccggcaaactgtatgatgttttcgcatccaacaccgtggctggccgtaagcgtctcgcggggcgtgtgcgtgccgcgcagacgttgcatcaggcacgtgagctggccggtctgggtttcgatctcgatcacgtcatcgcgttttccaatggcgatctggaacgttccgccactggggacaccacggtcatggtcgccatgcatcatgtcggtcaggcccgttccttggatttgctgacgctggacgattgtgccggcgtaggcaccgccttgggtgcgatccatcggttgcggcccacctttctgcaggaggcgaagtatcccgcgttcacgacgggccagattcgcgcccagctgaccgcttggatcaaaaggcttcggcaggcgggccacgttccgtcggaaatcactacgagctggtcgaacattcttgagaccgacggcctgtggtcgtttaccacctgtccggtgcatggcggtttccatgacggcgatttcctgttttccggatcttccatcactgcgatcaccaactggcaggatatgcagatgaacgatcccgcccgcgacctggcttggatcttcgccaaacttgatgagaaccatcgcaatgcggtgctgtcttcgtatggtcgcatgttgggcaatcgtctggatgatttgatcatgctacgcgccaatctgtggctgcagatggaacaggtcggcgatttcatctccgcattgaaccaggccgatagcgccaagatcatgcagttcaaggcgcaagtcgaacgtcttgcgcaccaattgggcgtcgctacggccaagacgcgcacgcagtcggccccgcgtccgcaggatgaccgcaacggcgaccgtccgccgagcaccatcaccgtcggtacgctgctgaatgaatccgaacgtcgtcgtgaggcggcgcagcggtcgctcatcaatgatgataccggcgaaaccgatgtcaccggcgaacgtcatatcgaggcgacttccgaagtcgaggatgattccaccggtgagttcgacgtaaccggcaacctcgatcaaaccggctccgcacaaatccaggcttccggagattccgtcgatgatgcgaccgaggcttttgacgtcactggcggccagcatgccgatgacggtccggcggcgccgatcagcacgttcattccggagcattccgcgaaggaattgcatgatacgatgccatcttccgccactatcgtcatcaatggtccggccggtgacggcgacaccaacgagcagacgattccgcaggagcacagcgatgccgccacgatgatcattccgctgttgcagcgtgacgaggccaccatgcagcaggctcaggccaggatcgacggtcaggacgtctccgacgcaaccggcgggaatacgcaggtacaataaatgccagcgccgggcaatacggcatgtgcatcatcactactcacaaggagcatcatggatatcgaattgggcattcagaacgtggcacgcaccgtcaccttcagcaccgaggaaagcgccgaagccgtgaacaccgccatcgccgatgccgtggagcatggcaggaccatcaatctgaccgatgacaagggccgccgcatcgtagtgccggccggatccctcggctatgccatcatcggttccgaaaccaagcatgccgtaggtttcggcaatctctgattcatgtacgttttggatgcccgttggcgaaattgccggcgggcattttcatgtacgcaccaaacagcggcagcacgcctcgacggacgatctcacgcacggtgtccgcatcggtgaggttctcccccagctcgttcggtttgcccttgccatgccaatccgaaccgccggtcaccaacagatcatgtgccgaagcgattgccagcaaccgttcacgctgttgcggaggattgccgcgatgccacacttccagaccatccaagccttccgcgatcaggctttcgatctgtccgtcggacagcagccgcctgttgcggctcagatcccccgcatgggcgatcaccgtaacgccgccggcggccttcaccgcggcgaccacatcatgcgtagtcggcgaaggcgtgggaatgtagtacttgctggaagtgctcaccacgccggcgaacgcttcggaacgggttcgatacacgccggccgccaccagcgcatcggcgatatgcggccggccgatggtggtgcgcatgccttcatgcgcctgaacctgtacgctgtgccacgtaatcggatagtcctcggcgatatgctccaccatgcgcttggtgcgccgtaatcgcgcagcccgcgtattggcgaacatctcacgaatctgcgcattgtcgggatcatactggaatgccagcatgtgtacggagatccgattgtcgtcggcggtgatttccgtaccgcgcagcaacggcagttccgcccatgtcgcggcctgttgcgcatccgaccagccggcggtggtgtcgtgatcggtgatggcgacaccctgcaatcctcgggatttcgcctgttcgagcaaggtgcgcggcgtttccgtaccgtcggagaacacggtatggcagtgaatatcccagccgacgacaggcggtgcggcaataccaacgtgagtcatatcaccatcgtaagctgattggcagcataacatggcgcaaaccagccggtttgtgtcgcaaacgaccgttacaaggattgacgtatgagcgaaatcgactacaacaagccacgcgggtggcgtcatggtgccacttggacgtatctgatcatgctgctcgcctcggccgttgcactggtcgtatcgttcgtgctgtcggccgagacgctcgaactggctcgtaatcccgggcagaagctcaactgcgatgtgaacgcggtactgtcatgctcgaccgtcgccgaatcctggcaggcggaaatcgtgaagttcgcaggattgagctatccgaacgcgttcttcggcatcgccgcggagtcggtgttcgtgacgattgccgtaatcggcttggcacgcatcgccgtgccgcgttggttcgcgatctgcacgtggctgggcggactcgcggcactcgcctattcgtactggctgacctcacagtcgttgttcgtgatcaacgcactgtgcccgtggtgcttggtgctgatgttttccacgaccgttcagttcatggcgctctcgcatgcgactgcggtcgtgcaggagctgccgatgaaccgcgacggcgtgcgtacatactaccgtctcaacatcgatctgatgatcgacgccgtttggctggtcgccctcgtcgtcatcatcctcgtcaaggacggcccgatgctgttcgcctgagcttacagcaattccactttgccgacgatcgtggcactgcccgtaagcgtcacgtcatcatcggtcacgtccacgcgtagggtgccgccgcgaaccgtgatggtccaatggtcgatgccggttttggaacgcaacgtaatcgccgtggcacacaggccggtaccgcaggagagcgtttcgccgcaaccgcgttcgttcacgcgcatggtggcctccccttcgtcgtcgccttcgctctgctcgtcgatgcgcacgaattccacgttctggtcggtcggaatctcgggcgagaccaccggcttggcgaccaggtcaagctcttccacggtcggtagcgaggcgaacgcatcctcgatcaccgcgaccacatgcgggttgcccatgtccacgaacgtgccgcgcgccgaaccggcggttccgggaatcgacacctcgtacccgtcgacgtcgcctcgctgccatgagcccatttcgacgcggaacacgtccttgccgagtccttccacctcgccgagcgacgtcaggatcttcacgccggcgcgcgtaccaaggcggaacggttcgccaccgggccggtcggcgagcccttgccgttgcgcgaacaaggtgatcgcacgcgtgccgttgccgcacatttcggccaggctgccgtccgcattgcggtaatccatgaaccattcggcttggcccgcggcgcagtcggcgagttgcgcctccttcaggtcggacacatcctgcgggtgcgcaaggcggatcagcccgtcgccgccaatgccaaaatgacggtcgcacaggaaccgaacttcgtcggcggtcggctcgtatcggccgtcgggatccgcatagaccacgaaatcattgccggtggcgtgcgctttgtaaacaatgctggggatactcataccgattcactgtacacgcggtaggctatgtgaagacgtcatgacgggaagatgggaggaatcatgacttcgacggcaccgatcggcgtgttcgactccggcttgggcggcatctccgtggcacgtgagatccgcaagggtatgccgaacgagcaggtgctgtacttcggcgactccgccaacgccccgtatggcacgaaaacaccgaaacaggtgcgtgatctgtcgttcgccatcgtcgagcgtttcgtgcaacaaggcgcgaaggcgatcgtaatcgcctgcaataccgccacttccgcggctgcggatgccttgcgtgacgcgtatgacgtgccgatcatcggcatggaaccggcattgaaactcgcctgcgagcgcgggcaggggcaacggcagcgcgtaatcgtcgcggcgacgccgctcaccttgcgcgaacggaaattcgcggtgttgatgggccgtttcaaatcggatcatacgattttcccgcagccttgccccggtttggtggaaatcgtcgaacagggccgactcgacgatcatgatctggtgatgcgcacattgcatgattatttcgaccggtatgatctgtctacgattgattcggtggtgcttggctgcacgcatttcgtgttttatcgtgattatttccgcgagttgctgccggattccgctgcgatcatcgatggcaaccagggtaccgtccgtcacctgagcgtcgttctcgaatcattgggcaaactcgctccggaccaagccgtcggcggaatcgaactcgccaattccgacacttccgaacgaattgccgaattagccgaagcccttcttcatcgctgaacgcgaatgtccccaatacgcgcgtaaagtcgtgggaacggacgaaaggacggcatccatgacgaacaagacggcgatgatcgatgttggcggtggcttccgggcgatcttcggagcgggcgtgatggatcgcatgatggaggacggcatcagcgtcaaccactgctatggcgtctccgcaggcagcgcgaacatggtctccttcatcgccgggcaacatggacgcaaccataagttttacacggagtatgcgttccgtaaggagtatgccagcttcgacagttacatcagaaatcacaatttcgccaacctggactatgtgtacagcacgctgagcaatcatgacggcgaatatccggtcgactatgaagccttcgaggcgaatccgaccggtttcaccgtcgtcgcctgcaatgcggaagacggttcggccaaatatttcgacaagtcggatgtcggctacgacaatttcgacatcatgaaggcctcttccgccgtgccggtcgcctgcgaaccgtatgtgatcgacggcataccgtattacgatggcggcatcgctgacccggtgccggtgcagaaagcgctggacgacggctacgaccgtgtggtcgtggtcctcacccggctgaaggatgtgcttcgcgagcagaagaaagacatcgggccggccagaatcttgaaacatattcatccggctgcggccgaacgtctgctgaaccgctaccggacgtataacgacgaggtcgcattggccaaacagtatgagagggacggacgtgtgctcatactcgcgccggaaagcctatacggactgagcacgttgagcaaatcgttcgaaggactggaacgcatgtatcgcgccggctacgccgcagccgaagccattcctgattttctcaacagctgacgggctgcgccgcactcccctaccacctttcgggcaggcgacgctgactctccttcagcctgcaagtatgttccttcagcctgcaagtaatgtgttgcgtctgttcaacggacttttcgtaacgtaaggattgtccacgatgaagaatcggcgcagccgctctgccgccttgctgatgccgattctcggggacgccgcgatacgctcgccttccagcagggcattgcgttccaaatacaatggagccgtgctcaggtcatgcccgtacagtttcagatcgatgcccatggcctgacacagttttgccggaccgttcgtcaaatcgacgtccttgcgactgccgacggttgtgcggctgccacttcgattcacaaaccgccgttcccgcatgatttcaacgccccgcaccggttcaacggcacgaatcaacgctcccgcgccgaagccgtcatcccccgcactgacattgaaacagcgatgcatgccataggagatatagacgtatgcgcgtccggaagggccgaacagcgccgcattgcgttcgcttctgccgtgaaaggcgtgacttgccggatcgttctgatcgtaggcctccgtctccacgatgcgggcggccgcaataccgccatcatcgaattcacggatcaacagacagccaagcaatccaatggccgcctcatcggccgaaccggacaatatgtcattcgggaaatcccgtgacgccatacacttcctcatgcagcaccgcctttccgcatgtcttttcgtacgcttgttcatacgttttgcattgccgtagaacggcctcgcgtggtgaaacagctttcatgataggtcgggcgctacgattacgccgaccgcatgcgtaacggctggactgccattcgttggcctgcatataagctgatggtatcaggaatcttcagaatcaagggagacgcatatgcgcataagaacggtgacgaacatcgatttcggcagtgacgacaacctgctgttcctaggattccacggtttcggcaacgacgaaaccgaaatgatccgcatcatcgaagcactctacgacggctccgaccatgaaccgaactacatgtcattccgcggcacatacagcagaccgttcatcggcaacaatcattggtaccccgacggctgctccacggaagaacgccgccgcgaatgccatgatgttggcgacgccgtcatcgaactactgcgctcgccctcgtacgtacggttccgtaaggtgtcgatcggtttttcgcaaggcggctatctgtcgtaccgcatggtgttggaacaccccgattcgtttgacgccgcgatactgatgagcccgtcgttcaaaggtgaagaaggccctgcacccgttaccggccgcacacggttcgcattgtgttacggacgtgaggatcgcacgattcccgccacggaccagcacaccgcacgggccaaactcgagcagaccggcaatctcacgtatttcgagtatcccggcatgggccatggcatctgcgatgccgaaatcgctgacttgcgtaagtggctggggttgtgaggggggggtatgaatgccgcaagccgtgtacttgtttacaatcacggtacatgtttgggattgccataactggtgacgccggaattaagtgcagaaagagagctttggggaatggacagaaaaggaagtggtagacaagaatatttaaaattatacttacgccttatgtgttttatgtcgaagcttcgttacttatcgtcatcgtcaagcagtttgcgaggattagccacatgcaaggcatcacacatacgcaacgccttagccaacgtcatattgcttatggaattgacaccattctcataagcggcgacatgctgctgcgtaacgcccagcttttcggccagctgctgctgcgtcatgccacgcttcaaccgtaactccctcaaacccatgacgaaattcctttcaagatcagtcgtcgtccccgatagtgcattccgggtcaagatattcaacaccatccacgccatagtggacattcagaatcgtagccgggtcatgcaacgccacgaaccagtccaccagccgttccaacgtcatcgacgccgcaaactcgtggacacgatcatagaacgaatcccacaccgattgcgaatcctcatcagcatccaccaatcggtcgaactcgccgcgcaaaccctcatcaggcagcacggccgacgcgaaacgcacgtcatccaaaccaacccaatcggacgcgcaacggccagccaactccttaacaggaataagcatcgtcccgccatgacgctccaacctcgtaaaaataacaacctcagccttcatcacaatatcctttcaatcaattagaaaatcaacagggtcacattgcaacgcctccgacaggcgtcgcgcagtatccaaatacatttgagacacaggacgatacccggtctcaaaccaagaaatattaggctgaggaatacccgtcaaagaagacagcatccgctgcgtcaaatgccgttcccgacgaatcctcctcaacccggtcacgccggcggacacgccgccacgccacgcatcctcatccggatacaagtccaacacgttgcaatgcaacgcgtcggcaatccgccgagccgtacccaaatacatgttgcgagcctcggacgcattgcactccaacgtgctcaaccgcgtgtaggcgataccggtcaacgcttccaactggagcaacgtcaacccgcaacgctcacgccgttcacgcaatcccatggccgctcccatcatgttttaatctcactctccgtgaggagagcgacctccctgtcgggattcaacgggcagaccaacgtatttcaatccacgctctccgtgaggagagcgacctgatgatattgatgtcggttccggtattcgtttatttcaatccacgctctccgtgaggagagcgacttattggattatcggactaccgacaaatcaagctatttcaatccacgctctccgtgaggagagcgacatctcgccaccggcatcgtcgacaacggatacatatttcaatccacgctctccgtaaggagagcgacctgagcacttcgatgtgttccctgattacgagatttcaatccacgctctccgtgaggagagcgacgtgtagccgtcgtagattgagtgagcgcagtctgcatttcaatccacgctctccgtgaggagagcgaccccgtctacctgctgtggcggcgtaccgtttcggatttcaatccacgctctccgtgaggagagcgaccagctcaatactccatgctcgccatatgtgttaagatttcaatccacgctctccgtgaggagagcgactggcaccggcatcggcatcggcatggtggcaccaatttcaatccacgctctccgtgaggagagcgacttcaacgtggtcgcctgttcgctgatcttcgtaatttcaatccacgctctccgtgaggagagcgacttcaacgtggtcgcctgttcgctgatcttcgtaatttcaatccacgctctccgtgaggagagcgacccggcaaacaggtggcatccaccacaaccgacgaatttcaatccacgctctccgtgaggagagcgacacccgatggtcgagaaaccggtcttgaaatcgttatttcaatccacgctctccgtgaggagagcgacctgaccgcgctgcgaaatcccttcatcgaagggaagatttcaatccacgctctccgtgaggagagcgaccagacggcatcatcgctgagtacgaaaatcagtatttcaatccacgctctccgtgaggagagcgactgcatgacacgtccaccggacgaacgatgacggatttcaatccacgctctccgtgaggagagcgacttggcgttgttggctcggctcatggataaaaagcatttcaatccacgctctccgtgaggagagcgacgtgcatccttgccctgccggatcatcgtatctgatttcaatccacgctctccgtgaggagagcgactggtcttgttcccggtctgggattccaacggcaagatttcaatccacgctctccgtgaggagagcgacggcgagttggatgtattggctgacgagctgtatatttcaatccacgctctccgtgaggagagcgacctgatcttatccgccaaaaacggcgtcacgttcggatttcaatccacgctctccgtgaggagagcgacccgatttcggcgtggtgtggcatgtacctgcaatttcaatccacgctctccgtgaggagagcgacgatgtttcagagtcccttctctgagcatgtcgagatttcaatccacgctctccgtgaggagagcgaccggcaccatcaccatcaggccatccggcaacacgatttcaatccacgctctccgtgaggagagcgaccgctcgtcgatgtacggcggtaggttgatccacttatttcaatccacgctctccgtgaggagagcgacagtatcgctgctgcgtgttgtcccagctgtcccaatttcaatccacgctctccgtgaggagagcgactggcgtggccggcgtggtgacgtggatggtgagcatttcaatccacgctctccgtgaggagagcgacataagcagttgcctcatcgcatgctcccttgcttatttcaatccacgctctccgtgaggagagcgacctaagaaaaatcccgtcaagcaccatgcacaggatttcaatccacgctctccgtgaggagagcgacggcgatcgcccgcgcgacgcgtccgggcagttcatttcaatccacgctctccgtgaggagagcgacgtgatttcctcacgggtgacgactgaccataatcatttcaatccacgctctccgtgaggagagcgacgccacgcagccgccgccatcccgacatgctgggcatttcaatccacgctctccgtgaggagagcgacctggttgatttatgcggcttgcgtcagatccagatttcaatccacgctctccgtgaggagagcgacctcggtggatggcgcattgaatgacatcgaaagatttcaatccacgctctccgtgaggagagcgacatctcgaccgcatcgaatcggcggaatcgcaggatttcaatccacgctctccgtgaggagagcgacgtcatcaacaaagcaaaccaactattacaaggaatttcaatccacgctctccgtgaggagagcgacaaactagacacgctaaaaatcacagtagaataaatttcaatccacgctctccgtgaggagagcgacgttcgagcttgatggccgcggcctgggcctgcgtcatttcaatccacgctctccgtgaggagagcgaccctccttatgttttggtttggtgttgtcttgtgtatttcaatccacgctctccgtgaggagagcgacttcgccaccatgcctgtcacggcggaccgtgcgtgatttcaatccacgctctccgtgaggagagcgactgagggcctccagaataaactgcccgccatggcgatttcaatccacgctctccgtgaggagagcgactgcacagatggacagcatgtttcacattgtggaacatctatccttcgtacaagttcaagagtagcagggtttgaagtcaaaacccgttattctaatcactctaccaaaaaataataacgattcttctctctgaaattatcaaacagccaaggaaaatcgacttacttttcgattccaagttccatccaggtgcgaagcttgccttattcgatgagagcttccacttcgcacaacgacaggcctcggcgtctaaatcatcatcacatcatctacaggaagatgccgctgtacaccataatgttcaatcttctcagaatattttgtccctaatttatataagcgcaggctatctttttcttgatccatgattttcatcacttcatttactaaagttagataatccgatgaagtgaccgagcactcgaatacgctattctgcacccgttgcccatatttcatacatgtcttcgcaacgttacgcaaccgtctcttccccgcagttgtctcagtattgacatcatatgccacgaccaccatcatgtcttatcacttccacataaatggtggataagcatctatgtccccgcgtaagaagcgcgctaataaaagcgcctgtacatagggaaccagaccccaagaaattttttcctgtagatacggatgaacaatttgttcggctttctttctttgccaagcaccaagcactgcctttcttcctgtttctgagaggaacacgcttccattttcgcgttcttcaaagtctttcatctgtattgcaccagtattgaccagagtcaaagcgaatctatcagctatcaccggacggaactcctccactaaatctagggcaagtgatgcacgtccgggccgatcgacatgcataaaacccacgtaaggatccagtcccactccctgtagtgcagcacagcaattattggtaagcacggaataaatgaatgacaacaatgcattcattcgatcaagtggcggtcttcttgttctcccctcaaagaaaaagttatctttatttctcaaaattaaatcatcaaaagcataaaaatactctttcgccgccatcccctctaggccacgcagtgcatccatggaatcgcattgacggatttctggtagccgttgtgtcagtcgattactttgctgagaaatccgttccacattcactcgcaaagcatgatcccgtttcgttcgttctagcacccactttgcattaaaaatcttgccaatgataaatgatttagcaacagggagagcatccatctcattatctgctcgacggaattgttctctcctcaacagaacattacgattcttctcccccatgattgaacaataataatgccctcttggtgaatagaaggacatgctaacgcccatctctccacaacgtcccataagtgatggagatgctcccttatatgaaaagcacagtattgattcaatggaacgaagcggtattttcgccagaatcacatcttcttggtgcacagccacattgtcattttccagtgctaagtatgcatcttcggtcattacgaataatgtgttgagaagctgtttcatcgcaatgcctcgattcaggaattcataccgttaatttggagatcaatatatttctgcgcagacctagtttttgttaactcgggtaaacaccaatttcgcaaggagcatgctgagcatgcctttgtaggtctcacttgtggcgtatgagcacgagcaaacaagtcatgcatctgtaaaaaatctttctttaccgtattccgcaattcgtcattaagaggaatcctctcccgccgttttatccgttgataaaacaaagcaccttcttgaatcgtgcacgcaagcatttcctccaagcacatcgcctcggcacacagctgtaaccgatcagcatcatttgtcttaggttttccatgcttatattcaacgggatacgggtcccataaaccatcccttccgtgcaatttaattccatttgcagccctatggaactccacaacatcgcaagcaccagtgattccgagagatctcgagaatactcgcaaatctcgcataattaacaagtctccacgactctcagaagactcataatcgtgcacacgagaatgctcaagctgcccagctgtggtcagataattttccgaccatagctgctcgatatgaatcagagcccactgccgcttgcaaaaagcaaaatgctgtaggccagacaaggccagccaatcttcttccggatattcagctggtcttgtcatggcaatctctcatcttctctaagcagtctttagggttaacgaccttcgatgatttcaaagtgaagcccaggaatagcactctcgtcaacactgatttcgccggcagaatccacagaaatagcacgatgaactttagcagaggaatattgtccacccttgcagttgtgttcgaaccagacgacgttagttacttccatcgaacctgaaggccgcgctgaactttcatcattctcaaataaggaaatcaatgcttccttaatctttcgtgcatcttcctcagagaagccagttctttccgccagctgaggactgatgctcccaaatgttgtatatacggcacgcccagaaacacgatacttcatgcccatagtatctgatgatttcttacccgtatccgtcgtctcgctgttcacagacttcgtaatctgcacatcatcgatggctataggcagagtagagaaagccggttggatcgacaccggacctcgtacaccaagagaaacctcgtcgacatctttagctttcttgaacgcaaagacctgtccgaaagcccgaacatccaaccagtgttcacagactttgtgaaaaacaatatcctttgttttttgctcatctttcgatagggtcttcaggtaggtattaaagcgttcagacagagacttggccccatcatcagaacgctcatccatctgtacaaaaatagattctccagcatcctgcaagcgattacgaatcttacgcttcaaggccacatcagaaacctcaccaaagccatccgacgtagtacgggggcgattcccattcaacggatcaccattaggattcgcgttctctgcagagaaaaccactgcgaaatcaatcttgttttttaagttagtcatgtttttcttccttaatctgtatagttttaattcttagttctgcttatctgattcgtctttgtgcagtcgtgttgggtttctcaaagagcggcgctgagaagaatatcccaagaggaatagaggagacagtgtcttattatcctcaaaatcaccctcctcaaaaagagccataacatcatcgattccggactggaaccattcagctccattcatggtcttcaaatacgggatcaattgtttccataaggctccccatgttgaatatggttttgcgataaagttgctcatcaacttcaccgcatttgtaggacgatctacttgctgtttcagtagcacaccccgctcaaaataatcagccagagctaaaagtcgaccatataaatagtcacgatcctttcgctccaaattcaattccatggatacctccttactatcatgatgcctctttgcttcatcattgaaatgcttcttccacagactgcatgcaatttcaaaatcacgctcccagactaaatcgccttcgttatagcttatcggtctagttactttatggaatgcagcgtttaaaatcgaaataggtagagctcgatcaccgaacatacattcgataagcctcttcttcatgtatttagcatatcttttgtagctcttgctactacgatctgaagcatcgtatgtgcaattgatgatatcgacgaaagacggtgcccctatataaggggttcgtttgaaggatgttttgtctccattttgatttcgttcaaaataagtcaaaggccacgctgtatccgtatgccattttaaaatgttttcaagatactcgttttctcgtaattcacgatagaacgtaacacttagtcgtccggatgtcgcagcatcaagaatgactatcgccatcttgtttgcatgcttctgcaaaaaatccggactgccatacccccgcagtaacgcacgaaatctcttcgcgtagttcatatctgttgctataagcgcatcttgcaccacatcatgttgttctgattcgctattcaacagcatatggctaagagtctcagcgaaatttagctcgggattcactacgttctcttcaggtttctttaccgcccagatgatgatggcttgcgtatccgtaatcgttgcatggttgtttacaagccaacgcagtgtggaatgaatcttttgagaagtctccgagtcaattctcaatgcctcatccctattcccaaaacgccctctataagtgaaattcgtattgtcatttgccgagatgagtttcgcgtttcccgcagtgctgacgatgttcttaggatagtttgaagcctgtgagtaaaaatctctcccaaagatatcggtaccagcccaagcatgctctctctgctggaattcaatccatcgattcctaatttctggatcatcggcaaccgggcgacacgctttcccaggtatctcgacctcgaaacatacaccaattttctcgtctttaccggtcaactgtataccgtattgtatcgcatctttgctaatactatgctcagatacataccggtaaatcgcatttaatttctcgtcatcgcctttccattttgcaagttggtccagatacatacaagttctcttagcatcgcagactttatccacatattgcagctgatcacataatgggtgaggaacaggtttactggttcttcccatcgattcctcggtacaaggaataatcattgtccatgcaactgcttccttttttatactctcaagacagccatcggatttcagaatcacacgcaactggccaggcatagacatatgatcaagcggtaataggatttttttcgcctcatcgccattgccgtagccttgatgtccacgccccgaagcgttctgtacttcatcatacgtctcaagtaagctggaccacagactcatcattcatctccttccagtattctgaagttttcgccactcttaaatgatttaaccgtttgattctcgcggataatccggcaatcaagatttgccgaatcgggacgatcgaattcaatgactccgttcctcattgtcggagcccagaacctcgccaccaaatcatgttttggattctcatccggataagtgaacccatggaacatataaccaagattccattgtccgtaatcatcataaaatccgatattttcgccgaacgcacaaggttccacatatccttggcattctctggttccaagaaatacatccctgcatccaccttgatttactgaacgttgcgcaatttgataatgtttgttctcatctcgatcatcggtaagatccggtctctgttcgttccactcaaaatgagctaaaacttgatatctcacatctttgagatatgtgtaataggataggtcgtttcctccgctcatcttgattggacggattccttttccttcagtctgtattttattcatcacgcgaactgcatcaatgacccatgtaattgtaggcttccagtagatgctttccgtcatgccctttaatgcctgataggtaggtacttggtaggagtatttttcaccaccaatcctagtcactgcctccgagaatagggcatacgaccctgaaacctcatattcaatggaatttttatatttcttcataagaaatgctcactttcagatgtagagtaaagacatctctgtctccgtcacaacaccatattcttccttgtaataatctttgttcaacatgtagataccaaaatcctcattttccagagtaattgctcctcgctcatccagactgcggtactcattatcaaataatgacaccgagtaatcttgcaactgtcgaagcgccgcaaattgctctcttaaattcccccttgaaagtcgctccatgtgcttctctacacgtccataatgtaccacgacattatgattctgattgggaatgacacggaatcgattcccaacagttttaaatgcttgagcatataccttcaagtattgcgtccccgagctattgacatactgacctcttgctgcacgattacaggaaagtaaatcgtacgcatataggttctgctttcctggaattggataatccataattccaaatccattatcgttaccggattgtatgccttcgaagaacagctggtaatattccaacagcatttcattggaaagaagatcttcgtcaggatgctcccgaaccattcgctcggtaatctcctttcccattttgatatcaggtaaataactcagccctttctcatccttgattccaaatacataaacttttttcggcgattttgactcgccatttcgattgcaacgaccagcagcttgtagaatgctatcgaggcctgccatggcacgaataacgcaagaaaacgaaacatctactcccgcctcaataagctgtgtacttatgcaaattactggcgttcctttatcgatactagtcaattgccggacgagttcaagcttatctgtcctatgctgaccacacattgaagtactcaaatgaataattttaaagtgattgtctccattcaatgttttaagacactgatatattattctcgcctcagatttaagattaacaatggctaagcaattgccgttttcctttgccttctcataaattatttcagctaactcgtcacagtttttcatttctgttgcagcaactacgcatgtacgtctcagcttctcgaaatattcttgagaatcatcaataagattcggacaatccgccaacaataggttttttctactggtccgttcaagaagcggttgcgtagccgaacaaagcactatagtcgagcccagaattttagaaagaaaacttactacttcattgaaaagattgatagcgttcgtaggtagcgattgaatttcatcgaatatgataatgctatccgccatgttgtggaatctccggagatcgccactcttagaggacattactgtttctaagaatctgaccatggtagtcacaatgatttgactgtcccaacgttcggtagcaagttttctttttgcattctgttcgtcatcctcttcttggtcaaattcggattgtgtattggtaaatgtatcatcatcctttcttccacctgcggatgaatagtgttcgagtagtgtttcagtatcatcctcatccagctcgagaatctcacgaaaaaccttcacggtctgcgaagtaatcgacaggtatggaattacatatatgattcgtcttttattggtctctattgcatgatgtaaagcaaaattaagtgaggccagtgtcttacctccacctgttggaacagctaatctataaattccagtacttcgtttcccctccaagcggcattgctcggaaattcgattacgaatcttattgatttcagaggtatgatcaaactttcttatattcttttcgaaacgatcgatcaaagatgaccaatcaatcgatttggatctgtatgttctccgttcttcaaaacaggcagcatctaatctatctgcatcaattaatcgagagtacacatatttggcaaataacccaagatagaaataaaagctatctgaatttgctatgcctcccatattaaatttctgcatgaaatgctcgacatccctgatacttttgtcataattaccagcaatatcaaggtcaagatacgagattctgtccttaacttcttgatacgagaatctgatttcattcttccgatccgtagcaagaccgtcaaaaaaagtcgagagtccatccacatctaaacagtccggcaactcaccatgatgtttagcaatggcaagttcaagtatctccctagtgatctcttgtaccgcctgctcagcagccgatttttcagaagataaggcacatgcatcatcaactaaaaaagctccctgccatgcatgaattacagaaccgcgatgtccctttgcagataacagatattcctgaaaatcttctgaagcttttccgatgtcatgcaacaaagcagcagtgtacgatatcgcagagaattcttcttcgaagtctctcgccagttttcccgcgccgtgcaaatgatcacggagagtttgtacagctccagtcgcgtctttgcgtgcaagcaattgtttcgagttcatgcgatgctcctttgatcggcaatgtactgaattgctatcctcagtgtagcacagcttttgaagtatccgctcatcatacaccgaattttttctttgattcttggaatcaggtatgctgaataacgggtcttacacccatagtcgttcgctatgaacgtggattgaaatggtgtctgatgtgcgggaccattaaaggagcttgttccacgaccatatctaacgatcgcggaacaagcttctagccgtctagtcgcagaagctagacatccatcaattcagatagatcgcatagtcgcagaacacgcccatgccgtgtctcgaaccgttcctcgcctccatataccaaaattctgtgattcgtatcgacctccatgacgtcagccagcttatcgatgttggcccatgcgtgcacgtcgtaggtactggaggccttcacctcgattacgtattgaggcttaccacctttttcgacaataaaatcaatctccaaacccttattatcgcgccaatagtagagtttaggctcactgcctcgcatgtaatactgcttcacaatctccaccgcaacggcgttctcgaacatatttccccacatctcaccattgcgcaaatcgtccgcagcatctaagccaatcagattcgcagcaagtcccgtatcgtagaaatacatcttcggcgcttttaccaactgcttgccgtaattcttgtaatacggcaacatacggaacgcaatgaaactcgactccagtaccgacatccaatcattggcagtcagtctgctgatgccgcatgcttcagcaaaactcgtcgcattaaatgactttccgcattggtgcgcggcataatgcacgaaacggtcgaaacccgcaatcttgcgcacacctaattcgttacgcacatcccgttccacatatgtcgaaaggtagtcgccatagaaattggcgattcggatatctccgtcgtataaacgcggatatccgcctttgaaaatccaattcgcggcatcgcaagtctcgtttgattccaatagttccgaatacgcaagaggcaacaggtaccgtaccgccacccgtccggcaagagtctgcgaaatagtattcattaacaggaagttttgcgaacccgtcaacacaaactgcccgggttcgttcgttcggtcaacggcctcctgcagataggagaacagttccggcgttcgctgcgcttcgtcgaagatgatgtgattcgaatatcttttcaggaaatatcgtggatcgtccatgaattccctacgtacatccggattctccaacgtcacatactcataatcagggaaacatgcccgcaccaacgtggtcttgccactctgcctcggccctgtaagagtaagtactggcatctctctggcagattgcagcagctcctgttccagacctcttgaaatcatggacattccaacccctccagtgcactagcctactattcttcgttttgctacttcacaaattctaccattcctactttacgatttttccttttcctactttacaatctataccatttctattatgcaattcctactaagccgcaacgcatgccagacctcgccgaacgttcccacaacaaaaaacagaatctacaaaagaaaaccggaagggcggatactgcggaaattaatccgcaatagtccacatcttccggcagtgcgactgcttctcatatgtgtgcttgactcacatggatggtactgagaaccattcgctcaacgatctgctcccgcatgcatgaccgaacatgcgcacggaacacaaatcaagtcgtagggcttaaagccaatgcataactgtagccgcacgtttgaataatcacaaatccagccaacaggcatacagatagatggcaaatacatatatgggaagcccctatacgaaaggcggcaagtcgcgcccacacggaacacggctcaccgcctagattatgaggttataaacctcacagcccggctcaggccttggcaacctcaactgccaactcggagccctcggcgccggccacaacctcgaaggaggtggcaagcgtttcggaagccacaaggtccttgaactgctcgaccttcgccacgtcacccgccggaacggtcaacttcaacgcaatacggtcggagatctccagatcggcagccttgcgggcatcctgcacggcacggatcacgtcgcgagcatagccttcggcaatcaggtcgtcgttcagctcggtgtcgagaatcacgaaaccaccggtcggcagcgcagcggacacggagctggcggcctcttcggcgttcttctcctccacgctgttgatcagctcatattcaccctcttccagtgcaatctcgccgttcggagtctcgcacaccggcacgccggaggcatcgacatgccaggcaccggacttggaagccttgatggcgaactgcacgtccttgcgcaggcgcttacctgcgactcgggcgttcacgcgcagctcgttgatgatcttcaggccacgggattcggcatcctcaagcgtgcacagctcgacatccttgacgttgagctcggacttcaggatttcggcgtaggcagcaacggcatccggatcggagacgatcacagtcagcttggaaagcggctggcgcacgcgaatctgcttcgccttacgcatggacagcgtgctggaaacgacctcgcgtaccttctccatagcatcgaccaaggccggatcatcccccagcacgcgaccaagttcggtcgcctcgccagaagtcggatcagccaggaacggccaatcggccagatgcacggactcgccgccggtcaggccacgccacacggcttcggcctccatcggagcaagcggggcgattacgcgcatgaatgcctcaagcacggtgtacagcgtattgaacgcgttctcgtcctcgttccagaagcggtcgcgattgttgcgaatgtaccagttggtgagcatgtcgatgaaatcggacacagcttcgcaggcgtcggaaatcaggaagtcatccagcgcagcctgggtcttctcgatcagacggcgggtgcgggccagcaggtaacgatccatttccggcaaggcggcaacctcgtcggcacgtagcgaacgagcgtcgaaaccggcaccgccattggccgcgttggcatacagggtgaagaaatagtaggagctccacaccggcagcatcacctgacgtacggtatcgcggatgccgtcggcggtcacgatgaggttgccgccacgcaggatcggcgaactcatgaggaaccaacgcatagcgtcggaaccgaagtcgttgaacacgccgttcacatccggatagttgcgcagatgcttcgacatcttctgaccgtcggaaccgagcacaatgccgtggcagatcacgttcttgtatgccggcttgtcgaacagggcggtggccatgatgtgcagcacatagaaccagccacgggtctggccgatgtattccacgatatagtcacacgggaagtgctgttcgaaggtttccttgttctcgaacggatagtggtactgggcgaagctcatggaaccggattcgaaccagcagtccattacgtcggtgatgcggcgcatgtggctcttgccggtcggatcgtccgggttgacgcgggtcagttcgtcgatatacgggcgatgcatgttgacattgccttcatgatcgcgcggataatcaccgaagtcggccttcaactcctcaagcgagccatatacgtcgacgcgcggatacttcggatcgtcggatacccacaccggaatcggcgaaccccagaaacggttacgagagatggaccagtcgcgggcattggcaagccacttgccgaactgcccatccttcacgttgtccggaatccagttgatctgctggttgagctcgagcagacggtccttgatcttggtcacggacacgaaccaagagctcaccggcttgtagatcagcggggtggcgcaacgccagcagtgcggataggagtgcacgtagctcttctcctggaagagaatcgcgcgctggtcctccggcacacgggccagcggaccatcgcctgcacgcaggttacgcagaatcggcagattcgcatcgaacacatacagaccctcgtaatccgggcacagcgacgtgaacttacagcccgcgtcaagcacgtccacgctcttgatgcccttggcattgagcgtgttcatatcgtcctcgccgtacggagcctgatgcacgaggcccgtaccttcgacggtatcgacgtaatcggcggtgaaaatctgatagccttccggccccggaacctgaccctcggcggcatgctcgtcgccagcgaaatacgggaagaccggatagtagcgccaaccctccatctcggcacccttgagctcgcgcacgatctcatagttctcgccaagctccttggcataggagccgagcagcggcttgcccagatagaatttcttgccggcgaacctgccttcggtcggacgtacttcgacatagtcgatgtcggcgccgaccacgatggcgaagttggtcggaacggtccacggggtggtggtccagaatacggcgtaggcgtcttcctcgtcgcgcagcttcacggccacggacacggtggtgtcctgacggtcctggtacacgtcggcgtccatacgcagctcgtgtgcggaaagcggcgtctgatccttcgggcaatacggcagcacacggtagccctgataggccaagcccctgtcatacagctgcttgaaggcccacatcacggattccatgtacggaatgttcagggtcttgtagccatgctcgaaatcgacccagcgcgcctgacggtgcacgtagtccttccactcattggtgtacttgagcacggaggcacggcaggcgtcgttgaacttgtcgatgccgatttccttgatctggtcgacggagtcgatgcccagttccttctgcgcctcgagctcggccggcagaccgtgcgtatcccagccgaacacgcggttgaccttgcggcccttcatggtctggtagcgcggaatcacatccttggcatagccggtcagcagatggccataatgcggcagaccattggcgaacggcggaccgtcgaagaaaacgaattcattctggctgtgatctccggatggacgacgctcgacggacttggcgaaggtatcgtccttctcccaatagtcaagcacggactcttccagcttcgggaagctggggttcggcgcgacgttggcgctctgctcaccggcagcagccttcggatacacatgattggtggtttcgctcaccgtatgctcctcgtttggcaggtttcctgttcttcttaactacctacgaggacgacgacttacgcacgattgccgcacgtccgccaccgcggtaccacctcgcttgccgccatcccctgcatactgcacagtgcgattgcgaccgcttgcgttcggctgttcgggccgatcccgccggttctactaagcctgcgattgcactgtacggacttacgccccctgcaatcgccgccgttcttccggaagctccccgctgataacggatcactgctgtacgtttcagcagttcagcctagcacgccgtatgaacgttgcatacggaaagagccgcacggcgtccaccatgcggctccctcaacccacgaatcgcataccggttgcgattaggactcagacggctccccctgcgcgagctgcgattcgagctgcctgacgatgtcatcgtgcatcttttcgctgatcttcaccttgaaaagaaagacgagcaggctcagcacgatcacggccagcggcacatagaaggcgcaaatctggaaggtatggatgttggaggcggtcatatcggcggcagtggcgttgccgatcatgccggcggccacggccacgaagccgacgatgccgttggagcaggcacccgcaatcttgtcgagcatcgggcgcacggacagggtcacggcctcgttgcgcttgccgttcttcagctggccgtattcgatggagtcggtcagggacaggatggcggtcatctggatgaaggtctgcggcaggtagaagaagaccagtccgacggtgaccatcggcaggctggacgagccgatgatgaacagcagatagcctatgatcatgagcgccataccgccgagatacaggtagcggcgcggaatgcgcttgttgaggaccgggtatgccggagccatgatcagaccagtgatgaccgggatgacgcccacgatggagtacgcgttggaattgttgaggatgtacttgaacaggtacatgagcacgccggtggtggctacgttggcgatggcgtacagcaggtagctcagggcgacccacagcaactggtcgttctgggcaagggccttgaacgcggcgagcgggccgccgttctcttcggcgttggcacgcagcgtgctggagctttccttggtgccgaacgccacggagcatacggtcaggatgccgagaatggccacgatgatggcgaagcaggtccaaccactctggctttccgtccggttaccggtgaacacgaagctgaagtaggtgacgatcgggatgacgatgatggtcaggccgttgtagccgatggaaccgccgaaagagccgagtgcggtataggtggaacgctcatgggagtcgttcgacagcgccgggatcatgccccagtatgagatgtcgcgcaacgagtagaacacgtcaagcacgatgaacaccaccacgaacagcacgatgaaccaagtggtgttgacattgaccagaccgaacaggccggtgtacaccacgacgagcagcaatgcggagaccgtacctccgatgagctgccacggcttgaaacggccccacttggtgttggtgttgtcgatgatgttgcccagcagcggatcgatgaagatctccgcgatgcggatgatcacgacgaggctggtgatgatgccgatgagtttggtggcgatgcctttgtcgacacctgcgaacagcgagctggtcacatacacgatgaagtatgtgctcagggcgttgtagaacgcagactggccaacgttgccgaatgcatatgccatacgggatttcaggtttgagccctgcttatccacggtgagggtttcttccatcgttacttctccttagaagtttccgtgcagtcttccttcgactcatgcatcagtatatgccttaaccctcgttaagtaaaaatgtgatactaatcattacacttcgccggcgtgtcgcattttgttcgataatgatagaaaatgccacatatcatgtgtgttcaacgattgattcgaccatcaaagcaaacatgaacacaccacgccacgcatatgacgtacgtacttgcgagttttgataacgaaagttactatttatcagtaaaggattttacatccttcgcacagagccgtgacactatagaaagagagcaggcagatcatgtcgcatatcttttcctcaaccgaagcacaggaatcgtggctgaccgatcctaccgttttcgcggtcaaccgccttccggcacattccagccaccattgctacgaccataagccactcgccggtgagccgaccggactcaaacaacggcttgatggccaatggcaggtcaaggtcgtcgacatgtccgaagccggattccccagcgacttcgcccagacccaatgcaccgaatccggattctcatccatcgaagtgccatcgaatctggaaaccaagggcttgctgaaaccgcaatacgtcaacgtgcaatacccatgggacggccatgaggatcctcagcagccgaacattccgcagcacaaccacgtggcgctgtaccgcagggaattcacgccgtccgcatccgtgacccgcgccatccgcgaaaaccgtcagatcacgctcaccttccacgccgcatccaccgccatctacgtgtggctgaacggtacattcatcggctacgccgaagattccttcacaccgagtgaattcgacgtgaccgatgccattcaggaaggccacaacacccttgccgtcgcatgcttcgaattcagtagtgcagcatggctcgaagaccaggacttctggcgcctgcacggactgtatcgcagcgtcgaactcaccgccatccccgccgcacacgtacgcgattggaaaatcgaccccgatttcgacgccacgaccggcgatgcgacgctcaccttcgtcgcatccatcagcaatgcggacgctgcttccaaggccgtcgcaacactgtacggaaccgatggcaccatcgcatggcagtccgaacaactgccggtaaacgaaacgatcaccacggaagccgtaatcgcgaacatcaagccgtggagtgcggaagagccgaatctatacacgctcgacctgacgctgtacggtacggacggcacagtgatcgaagtcagccgcgagcgcatcggcttccggcatttcgccatcgaaaacggcgtgatgaagctcaacggcaagcgcatcatgttcaagggcgtgaaccgtcatgagttcgacgcccgccgtggccgcgcggtgaacgaggaagacatgctgtacgacatcacgttcttcaagcagcacaacatcaacgccgtgcgcacctcacactatccgaatcaggaacgctggtacgagctgtgcgatgagtatggcatctacatgatcgacgaaaccaatatcgagacgcatggttcatggaccgcaccgagcgacccggtcacgccggacaccaacgtgccgggcagcaaatccgaatggcaggaagcatgcgtggaccgcatcgagtcgatgatgcgccgcgactacaatcatccggccgtggtgatctggtcgttgggcaacgaatcgtatgcaggtacggtgttcaaggcgatgagcgatttcgcgcacgccaacgatccgctgcgtccggtgcattacgagggcgtgttctggaaccgtcagttcgatgacatttccgacatggaaagccgcatgtatgccaagccggcggaaattgcggaatatctcgaagccaatccgaagaaaccatatatctcatgcgaatacatgcatgccatgggtaactccgtcggcggcatgcatctgtacaccgaactggaacgttacgagcagtatcagggcggcttcatctgggattacatcgaccaggcgcttttccagcgtctgccggacggcaccgaacgcctgacgtatggtggcgactgggacgatcgtccgaacgattacgaattctccggcgacggcatcatcttcgcggaccgcactgcctctcccaaggcgcaggaagtcaagcaactgtatgcgaacgtgaacatcaagccggatgcgcacggtgtgacgatccgcaatgagaatctgttcgtctccaccgccgactacgtattcacggcgcgtatgctggtcaacggcgaggagcgctggcaggctgactatcgcttcgacgtggcggccggtgcgagcgaacgtttcgacattgcattccctgccgcgtccgatctgatggcgagccgttgcgacgaggagctgccgaatggctcgatcgaggtgacgtacgaggtcgatcagcggctggccgaggccaccgcctgggctccggccggattcgagctgacgttcgggcagcatgtgcaggtcttcaacgatgccgccgacgccgatgccgccgcgatgaccgacagccacacgcatgatgtgacggtcaccgacggacgctggaacgccggcgtgaaggcgggcggccgcgaggcattgctatccaaggcacagggaggactcgtctccttcacccgcgatggccatgaaatgctttcgcgcaagccgagcctgctgacgttccgtcctctgaccgacaacgaccgcggcaatgcctccggcttcgaccgtgcacaatggttcgctgccggccgttacgccaagacggtcggtaccgaaatcgtccgtgatggcaatacgatcgtcggcacgtacacgtatgaactggcaatcgcgcaacgcacgaaggtcaccgcacgctacgagctgctggaagacgggcgaatccatctgaccctcacctatccgggcggcatcgaagcggcttcgctaccggcgttcggcatggaatggatgctgccggtcgagtattcgaacctgcgcttctacggtctgggaccggccgaaacctatcgtgaccgcctgcacggcgccaagctcggcgtgttcgagagcactgccaaagcagacaacgcaccgtatctggtgccgcaggaaaccggcaatcatgaggggctgcgctggattgaggtgaccgaccgccatggccacggcatgcgtgtgagccaagccggcgacgaacacttcgcggcaagcctgctgccctacagcacgttgatgctggaagaggcgacccatcaggaggagctgccaaccccacgtcacatgttcctgcgtctgcttgcagcgcagatgggcgtcggcggcgacgattcgtggggcgcaccggtgcatgagcggttccagctaccggccgatcgaccgctcacgcttgatgtgatgctggagctgttctgatacggcatcacaacggctgaaagtcaccgttccaccggcacgaagctgtcacgtacgaccaacgaggtcgacagataggcgtgctggcggatggttcgcttgcccgcgatggcatccgccaaagtcaggatcgccacgcgggcaagctcgctctggtcgatggcgaatgtgctcaaaggcggtgacgtaagctgggcaatcatctggttgttgatgctgatcacgctgatgtcgcgcggcacaagcactccggaggcattgaaggcctgcaatacgccgaccgcaatcacatcggcggcgatgatcaccgcgtccggcagcgcaccgttgtgatcgtgcacgaaccgttcgccaagcctgcggccgttctccacggtaaacaggtcatccgaatagatcagaccctcggcgtccaatccgaaacgcttgacttcacgccgaaaataggtggcgcgattctcttcgtccagctcatagaagttcatcaggcagcctttgccgccaatgaacccgacacgtttcattcccttcgccgcacaagccgcaacggcatcatgcacggtctgctgcagatcaggctgtacggaatcaaacagacccggcgctggattcacgtcgatgaacacgccatacggcatggcatcatgcaaccgttccagatcctcttcgacgatccggtcggcaccgatcgacataaagccgtcaaatccgctactttcggcaatcatatcgtcaagattgcggaacacggtcagttccatacgctgctgcccagcattgcgttcgagtgccgcacgcagatcagtgaaataggaatcacgcaacgcctcattggattcctcgttgtcaagcaaggccacctcatgcggaatcacgatgcgtttggtctgcatgctgtagccaagttcctcgctgacctgaatgatcttgcgacgcgtctcctcgcggacggataatgtgggatctccattcagcaaccgagataccgtagcttgcgagaatcccgtccgtcttgcgatttccttgatggtcgccatcgatgttcctcattcagtgaagtaaaaactttaccgaatcagggtacctcatcttcctatcagattggtaatcaagtgcaccctatcgcgcgatcttatcgcacgccgtccgtcattgactttcaacaataccgtcatcagcaccgccaatgcggcgaacacggcgccgacaggaccgagccaacgcaatccgacggcatcgtaggccacgccaccaactgcggaaccgagcgcaataccgaggttgcaggacgtggagttcaacgacgaggcaagcgtgccgcagccgggatagccggtttcggccacatatgaatacagcacctgcgaaggcgagttctgcagatagatcgtaagacccagaaccaccagcaacaccgatccaagcatcgcgttcgccgtggcaaagggaagtagcagcatgcacacgaactgcaatgcataggccttgctcatgccgacgagcggccaaatgccggtgccacgcgtggcgagcttgccgctgtacaggttgctccacaggcaacaagcgccgaacgccacgagcgcgacgctcacataggccgccggcacatgcaattcgttggtaaacatgggtgtcaggtaggtgtaccacacatagctcgaggcgaggccgaacaccacagtgagcacgccgaggatgattcgacggtcggagaacagcttgaactggccgagaatacccacctgcgaaggcacggaacgcttcggcaacaccacgaacatgacgccgatcatgactaccgtcaacacgtcgatgacgacgaaactggtacgccaacccgccaaccccgcaatccacgtacccatcggcatgccgagcacggaggcgatggaaaatccggagaacacccatgacatgtatctcggctggttttcacgactcgtgacgtccggtccgaaggtgagcgccaccgccacaagcactcccgaaacggaggcggtgaccacgcgagcaagcagcagcatcggatagttcacggcaaaggtacagatcacattgccggcaagaaatacaagcaacaatgcgatcagtgcacggaatcgctggaatttcgaacagatcgcggcgccaatcggtgtgagcggcgcatacacgaacgcgaagatagccacaagattacccaccatggtcacggcaatgttgagatcggaggcaatgtcgggaagtacgcccacgatgatgaattcgctggtaccgagcagaaaactctgaaagaccagaatggccacgggaagcgtgaacaagcggtgcgatgccatattcgtatctctccatcaatgtagaaaatcttcttctttacatgaaaagagtaatatttatcagcattcagaacacacgatgcgatatcattgaatcgtttgtaaatagcaaaatcgtattgcattgaacggaaaacccatcgaaagcgagaacggatgaaacaatgtcaaccgttacagcctttggcggtattctcggatctttccgaacgcatctactacaatcagcctgatctgccgctgtatacacgcaatgatgcgctctcccgcttcgacttcagcatggcctgtcactggcatcgcgacctggagttcgtacatgcgctcaccgggtcgatgaaatacttcgtcaacggcgcgatcgtcgacattccgaccggcgacggactgttcgtcaattcgaatcggttgcattacggattctcaccgacccgcgaggaatgccattacccggcggccgtagtgaatccttcgctgttcgaatcattatggcgaccggcgagcgccgaactggacatgctgtgcgggcctgatgcaccggattacatgctgttggatcatactgattcacggcatcggcgcattctgcaactgattgacgataccgtgcggttcaacgtgccgaatgccgacgaagccgccaatccgcagtccgatacgattcaggcgattggaacggcgatccaattgtgcggggcggctttggcgttggttcgggagagcatggcgaaagcgtctggtcatccgacgaccggacgaccggagccggcgcaggaccggcaatcaccatcctcaaatcattcggcatcgcactcccccgccaataatcgtgatttgatgagtgcgttgaccatgaccggcttcattcatcagcatttcccggaacgaatcacattggccgacatcgcggcggcgggtaccatgagccgcagccaatgctgcatcgtatttcgcgagtatgtgaatcgcacgccaaatgaatacctgaccgattaccgcatcgagcaggccatgcacatgctttccggcaccgcttccgacgtgaccgaagtggcccgtgcctgcggtttttcgacgcccagctacttcatccgcgtatttcgcaagcgtgcggggctcactccgcaacagtggcggcgagcgcactgacgggcgaccgtcaaatacaatatccctttatgcatgcgcaattccataagtcgacctggccaaagccggataaacagcaatcctttgccccgcagagcttccgaggcaaaggattcacgaaaccattcaaggccaccggtcataagggtggcatcagccggcaaggttccaagcggggttagaggggcgtgcccgttatccaataggcgtgccctcaaacagttcagcatgggatgcaggctgcgagaaccaacgtgccactcaacaggcagagcctcaaatcggtaccgaaaagggccgaatctgcgagaaccgaatggttacccaacagccacggccccaaatcacccgggaaaaggtcctaacctgcgagaaccaacccgttacccaacgaccacagccccaaccaagacacaaaacggccgcaatccgcgaggaaccgcccgttactcacaccacaacgtcacggcggcgttgtgaccatggccaggaaccaacacaacgccgccagcacgctacctgatgctcgagcaggcaatcagccttccatatcctctagggcaacgcccttggtctccttcatgaacttcagcacgaagaagaaagacacgaaggcgaagaaggcgaacagtccataaatcaggccgacgttgaaggccaacagcaccgggaagcttaccgtgacgatgaagttcgacgtatactgcaccgcggtaccgacggacatgccggcggaacgcatggagttcgggaacatttcggcgagcatggcccacgagacggtaccccaggtcaggccgaacgcaatcacgaatccattggcgcacacaagggcaagcggaccagtgaagccggcgagttgcggcgcaccgttgaccatgggtgcggtaccgaagagcagtgccagaccgccttgggtgatgagcatgccgatggacccgaccaatagcatcggacggcggccgacgcgatcgatcaggaacgtgccgccgatggtcgcggcgatgttgatcaacgacgtgatggcagtgatggtgaaggagtccttctcggtgaagccgaccgcaccccacaaagtgttggaatagtagaaaatgacgttgatgccggtgaactggttgagaatcatgaagccgatagccacccacacgatcggcttcaaacggccgaccggagtgatgaggtcgcggaacgacggcttgtggtcgataccgatggaatagcggatgcgaccgatctggtcggaaatcggagccgggtcggtgctgatacggcctagcacgacggccgcctcttcgtcacgatgctgtgccaccaagtaacgcggcgattcgggaatggtcaatgcaagcaggaagtacagcacggatggcacggccatgcacaggaacatccactgccaggtttcgagcggccccatgaacacgctggcgccaccggagatgtgcacgagcagcgcgttgacaagcaacgagatgaagatgccaataacgatgcccagctgctggaacgctccaagcacaccacgctcgtcggtgggcgcgatttccgcaatgtagaccggagccaccatggccgcaacgcctgccgcaaaaccaccgaatacacggaaggcgaccagtacgaagatgttcggcacgatggcgcagccaatcgagcagatcagaaacagcacggcggcgatcttcatcatcggcacgcggccgatcttgtcggcgatacgaccggcaagcaacgcaccgatacctccggaaatcagcgcggatccaacggcaagaccgagcaacgcgtcgcctgtggcgaattcggttttgatggcgttggtcgcaccgttgatgacggcggagtcatagccgtagagcagaccgccgagtgccgcgatcagcgcaagccgacgggctacggatttgtgggctttaatggttgattcactcagcgtggtcggttttgccacattcgcttcagctgaagacatgataggtccttcttccttgaaagatagtgcgattgtatgggaagacgggtcttcccataccccttcggggattctcccccatcggaggaggagatgccggccgaacggggtatccggggttcaaacggagcaatagagagattcaaacccgttcagaccggcaagcattggtaacgccgcctctcgttatgagagaagggcatcgcgacgggccagcaatgcatcgatggcctcgacgccgtcgagcacggtgaaggtgacggtcttgcgttcgcaggattgcgcggcaagcatatgcagattgtcacgttcctcatgccaaccgcggccatacaccttggaattcgagggttcgagaccgaccacataatcaccggaacccatcgacttccactccatgaaatgcgggaaatcggccacattgaaatcgatgaccacacccaggccgagcttacggttgacgacagcggcgaagcttccgccgtccgcatcggccgccagttcgtggatgtacacgctttccggcttgttggcttcgggcgcaccgatctcattccatggcgtgacgtcggccgcggtggtgtcatcacgcggggttgcgccacggctcggaatgaccacctgcgcaccttcggccagcaacggccagccaaagttgcagtggtacatccacatgagcggctcctcacggaacgactcgttggtcacctcatcctcgaccgtgatagacggcttgccgtacacggaacggatgcggcggcgtagcaccatgttctcgccgaatagctccgcctcacgcatttcaccggacacttcgagcacataatcgtcgccatcccagtaggcgtcggagcttacatgttcggctggcgtggtgcgaatacggccatgcatcgggtagtcgcctgccggatatcgcgagccttccggcgtagagtacgggccacagatgttctcgaaaccgcaggtgaagaacaaacctcccatgatggagcgcaacgcttcctggccattggtgtcgaattggttgcgaccgttcagccccggcttcgacaggaatgtgagattctcgcctttatattcgaacagtgccacatcgagcgccttgtcggccatcgacatgaagcgcagtggcccgttcttgacttcgaccgccttcaggccgtgcgtacgaccttcctggtattcgatcggacgaacataggcggcctgttgcatgctgccgacgtgggcgagcatatcggaacgcttcatctcagtcctcctgcaattgggctggatattccggccatgcaccttgctgggtgcatacgaacgccgacacctctaccgcacgctcatgagcggcacgcaggctgaatccgcgcaaccagtatgcgaggaacgctccggagaaggaatcgccggcgccgacggtgtcggcgacctcgaccttcggcgtcggcagcatcgagatggtctcgtcgtccatcaccagactgtaggaatcgccggcggtgaggatcaccacgtcgagatcgaacatctccttgatggccttgacgcattcggtttgcgacggcaccttgaactccggttcgtcgatgccaaagagtcgcgccacgatcggtagttcttcatcattgatcttgagaatcgtcgcgccgttcagcatgcgttcgagcacgtcatggtcggcgaagccggaacggatgttgatgtcgaagaagcgcacggtgtcgggcccggcggcatcgatcatcgcatagattgcgtcgcgcgtaccgtgcggttcgcgggccgcgatgctgccgtagcagatggcgtcggcattctcgaccagtgtgcgtacctgatcggtgaaggcgatgtggtcccatgcgcgatcgcgcaccacatcataggaggggacgccgttctcatccagggagacggcggtgatgccggttgcgtattcgttggtttgcgcggccacgttgacgccgcgttcggtgagcagctgcaccagttcacgaccgagttcatcgtcgccaacggcggtgacggcggtggctttcacgccattctgagcggcatggtatacgaagttggctggcgcgccgcccggcttcttgccgtcgggaagcatgtcccacagcaattcgcccatggtgagcacggatttggattgcgcgttcattgcggatgtccttgtttttgggtgagttgagccagaggtacggcaatgctgccgcacctctgcagtaatgatgggggagctcagtcttccttggctgccggatactcgttgcagagcagacgataggccggctcgtcctcttcgatcttcgggaagcggccgagcggtgcgtagaagcggttgtcggtgttgtcgtcgttgcacatggacacctcgcccacgagggtcgggacggagtcctccttgatgtagtactcgtgataggtgtacggatagaaggtcagggattcgccctcgttgagttcgatcggttctcctgccggtacgtagtagcggcggccgtcacggcacaccagcactggggtgtcgagtttctcttcggtctccgggtcggcgttgtacaggtggaacaccgcggtgccgccaccgcgcacgatgatgtcttccatcttgttccagtggaaatgcatcggggagacctggcctggcatgctcatcatgatcttctcggcgtacaccttggtgtactttggatccttcacattgccattgcgcaaggtgatcagagccaagcccttgtgctcgaagtcaccttcaccgtaatcggtgatatcccagcccagggcgttatcacggatctcatcccattcgtgacccttttcggcccactcctccggagtgaagctcaggtatggcggaatccggaacttgtactggtcgagcagggcctcgaactgcttgatgaccgcattgacttcagaacgcttcatggcgaaaactcctttgtcatacactgtgacgtttacgcgtccgttgttattttcgattgtggcgtattttttcgttttcgagcggttcgcctttcggcgtgtcgttctcaacaacaagcattttcgattgatttcgttttacttgcgatttctttcgttttgcctgttgacaacaacataacacaaggttacgatagttgtcaacacgaaacgaaaggaaacgaaatgatttttccgccataacgataaatatcgaaaagtgattgctaagatggatgacaacactcggtccagcagtacacgacaaggagcctgcacgatgatgaaagccgaacgccaagagcagatcttgaggaagatcgacgccaacggccgcgtcgtcgtcaccgattacgccaaggagcttggcgtcaccgaagccaccttgcgcaaggatctgcaggaactggatgaccgaggactggtgcaacgcgtgcacggaggcgcgatgaaaccggataccgagctcagccgattcgagaatcgagtcgatctgggcaaggacgtcaaaacgaagctggcagcggcggcgatgaacgaaatctccgaaaaccgcgtcatcttcattgacggtggttccactaactatctggccgcgcaagcgtttccacgcgactacgcgggaaccatcatcaccaacagcccggccgtggccctgtggatgtccgactacgacaacgtcgaggtgaatatgcttaccggcaccattcaccacaaatccaaggaaaccgtcggttcggcagcactggcgatgctgcagcaactgcattgcgatctggtactgctcggcgtctcgtcgatcgatccttcgcacggcatcaccacgccatatctggaatccgccgagaccaagcgtgcgctgatccaagccggaaccaaggtgatgagcctaatcaccccggaaaaattcggacatgtctccacttacaaaatcgctgactgcaacgcgctggacgtcatcgtgacggaaggcactccggagtgcgccgacgcactcatcgccatgggagtctcattgcgcatcatccgctgattcgcaattccttcggataatccggagccaacctctcacacacctcaagatgcggcaatgtcgcatctctaggcaaacacacccaaataccccaaacatcaacggacttttgtcaacgatcgacaaggagcacatcatcatgaccgcaccattcagcgatccgcatttcgccatttcgctgtattgcagcgatttccgtaaccccgccgcacaggtcgaggtgctgaacaactatgccgattcctaccatgtcgacatcatggacggccacttctcccccagcatgggcctgtgcaccacctggatcgagcagatgatgccactgtgcgcgctgcgcaaggaagtgcacatgatggtcaccgacatcgaccattggatcgatcaactggtcgccgcaggggccaccatgttgactccgcatgtcgaatcactgggcgcacacgccttccgtacgctacgcatcattcgcgaaaatggttgcggcgccggcattgcggtcaatccgctcacctcgttctccgaaatggagaatctgctggaacgcatcgacctcgtaaccgtcatgacggtggaaatcggctattccggcgaaccactgattcccgaaacactgaagaagatcgagcgtctggcacagttccgcgacgcgcacggactgaactatgagatccagatcgacggatcatgcaatgagaagaatttcaagcgcatgcgcgaggtcggcgccgacaccttcgtgcttggcaacaccggcatcttcaaacgctctcccgacatcgaagaggcctggcacatgaccatggcggcctacgaggaatccaccggcgaaaaggtacgcatgcgctaagcggccttgcacgacattcaattccacaatccccacatcacacgtaaggaaaccatcatgaccaccgcaacctctttccacgaatgtgaacgcatcatcatcaacgaactttccgacgtactgggcaacgtcgacgagacccagatcgaccaactgaccgatctgatcaccggcgcacgcaaagtgttcttcgtgggcgtcggccgtgtcgagctcgccctcgaggccatcgccaagagactcgcacacctcggcatcgacaccgtgatggtcggtcagattaccgagccggccatctgcgacaaggacctgctcatcgtcggctccggttccggcaagaccggattccccctgttcatcgcaggcaaagccaagtcgttcggtgcgaaagtggcccgtatcggcatcgtcgaggattgcccgatgaaggagtacaccgacctgttcgtacatgtgccagccgccgggaaaccgggttcgggcaccaagccgagcgagcagccgatgaccagtctgttcgagcagtcgctgctgctggtcggcgacgcgatcgccatgagcctggtgcgcaaacaaggcatcgaccttgattccctgtgggagttccacgccaaccttgagtagttttgttgttgacttgggttgttgccagggggctctaatccgcgagaaccggcgtattacccaacaggcagggcctcaaaccggcactaaaaagggccgaatctgcgagaaccgaatggttacccaacagctgcggtcccaaaccacccgggaaaaggtcctagcctgcgagaatcagcccgttatccaacaagcagaacctcgcaaccaataacataagcaagtcccaaacgcaaaatggctgtgaccacactcggcggtcacagccatttcattgcggttcctactccagttccacggctcccgtgtacagctggtagtactcgcccttgagcgcaataagctcatcatgcgagccgcgctcgatgatgcgaccgtgatcgagcaccatgatcacatcggaattgcgcacggtggacagtcggtgagcgatcacgaacacggtacgccccttcatgaggttgtccatgccggcctgcaccacttcctcggtacgggtatcgatggacgaggtcgcctcatcgagaatcatcgccggcggatcggccacggcggcacgtgcgatggagatcagctggcgctggccctgcgacaggccggaaccatcaccctcgagcacggtctggtatccattcggcaacatgcggatgaagccgtcggcattggtcaggcgtgcggcttcgatgcattcctcatcggtggcgtcgagtcgtccgtaccgtatgttgtccatcacggtaccggtgaacagattcacatcctgcaacacgatgccgagggaacggcgcagatccggcttgcggatgcccttgacggagataccgtcgtacaggatcatgccttcctgaatgtcatagaagcgattgatcaggttggtcaccgtggtcttgccggcaccggtcgcgccgaccaaggcgactttctgaccgggtttcgcaaaccaggtgatgtcgtgcagcaccggcttgtcggggttatacccgaaggtcacgtcggtaaagcgcacgtcgccctgcagcagggtcaagcgaccatccggcgaggtgattgcgttttcgcgagccttcatcgccacttccgcggcgcgcggactcaacgcatgtgcggccttgagcgaacgggtgccgtcatcgccttcctcacgcttccaagcccagtgaccggtttcgtgatcgacttcggtcatggtgcgaccgtcggaggcgagctccacgttgacgagcgtcacggaaccgccatcgtcttccggcttttcgtccataagctggaagatgcgggatgcgccggcgagcgccatcatcaccatgttgaactgcatggagacctgtccgagcggattgatgaaggctcgggacagggtcagcaatgaaatcagcgtacccaaggtgagcgtaccgaatccggacaggccgaagttgccgacgcccgacagcgccatgaccccaccgagaacggcaagcaggatatacagcatgtagcccatgttgcccacgatcggcatggtcacgttgccccatgtgttcgcttcggcggaggcttcgaacagtcgctcgttcttttcatcgaagtccttttgcgtggcatcctcatggttgaagaccttgatgaccttctgcccgttgacggattcctccacgaatgcgttcacgtcgccgatttcgatctgctgcttgacgaagtagcgcccggaacgggagacgaccttgcgcactaccacgaacagcagtgcggagaagaccagcacgaagacggtgaccggcacggagagccacagcatcgatatgagcgctgcgatggcggtgatcgcggacgagaacatctgcgggaacgactggctgatggcctgacgcaacgtgtccgtatcgttcgtgtagcggctcatgatgtcgccgtgttcgttggtgtcgaaataacggatcggcaggctctgctgatgggcgaacatgtcgtcgcgaatcttcttgagcacgccctgctcgacggtgacgataagccactgccacagccagctgcagagaatgccggccgcatacaggcatcccataagcgtcaacgcgcgcagcagcggaccccaatcaggattgttcgcaccgaccatcggcaggatgtaactgtcgatcagtgattgcaggaacagcgcggatccggactgtgccgcggctccgatcagaatgcacagcaccacgatggccacgcgccacttgtattggaaaatgtagccgaagatgcgtttggtggtgccgggagcggccttctgcatcggtttgcctatgggaccattcggcccgccctgcgactttcgtggttcgctttccgcggttttcgcctcgtcgatcgcctcttggcgctcgttcatctcggtctcttcatcgatgatcatttcagtcattgccctctcctcctttcactgaagttcctcaggctgtgcctggttcctggtctgcgattcatggatggaacggtattcgtcacagcttgcaagcagttcgtcgtgggtgccggcggccatgatgtggccggcgtccatgacgagaatcatgtcggattcctgtacggaggcgacacgctgcgcgatgatgatcttcgtggtgtcgggaatctcgttgtggaacgccgcacgaatcagctgatcggttttggtgtcgaccgcggaagtggaatcgtcgaggatgaggatcttcggcttcttcagcaaggcgcgggcgatgcacaggcgctgacgctggccgccggagacgttggtgccgccctgttcgatgtatgtatcgtacttatcggggaattcctggatgaatccgtcggcctgcgccaactggcatgcgtgacggatttcctcgtcggtggcgttcggattgccccaacgcaggttttcggcgatggtcccggagaacagcacgttcttctgtagcaccatggccacctggtcgcgcaacacttcaaggtcgtaatcgcgcacgtcgacgccgccgaccttgagcgagccttcggtcacgtcgtacagtcgcggcacgagctgcaccaggctggacttggcggaaccggtgccgccgacgatgccgatggtcatgccggagcggatcttgaggttgatgtcgtccagtaccggcttttccgaactgtcggaatagcggaatgtcacatgatcgaagtcgatcgaaccgtcgacgacctccctgaccggattgtccggattggtgacggtgctttcctcattgagaatctggcagattcgttcggcggaagcctgcgagatgatgaacatcacgaagatcatggaaagcatcatcatggccatgaggatctgcatggcgtaggtgaccaatgcggtcaggtcgccggtggtcaatccaagggccgcgttgttgccggaagcgacgatctgctgtgcgcccatccatgcgatgagcagcatggtgccgtagatgcagatcatcatcagcgggctgttgaagctcatgatgcgctcggccttggtgaaatccttgaagatccgctcggaaatgcgaccgaacttgcctatttcatgcgattcgcggttgtacgacttgactacgcggatgccctgcaggttctcgtcgaccacattgttgagctcatcataggtgtggaacacacgctcgaacaccgggtgcacgatgacggccagaccacacaggccgattgcgagaatcgggatgcaggcgaggaacaccaaggagatcgacgggctgatgcggaacgagaagatccatgccacgaccaccatgatcggggctcgcacacccatgcggatcatcatgccgtaggcgttctgcagattggtcacatcggtggtgagcctggtgatgatcgaaccggtggaaaacttgtcgatgttcgtgaagctgaagccctgaactttctcgaactggtccttacgcaggttcttcgcaaggcccgcggcggcgatcgccgcgaattttccggcaaggaagccagatgccagggagaacatcgaacatacgaacaggatcacgccgaatttgatgatcgccggcatgctgccgccggaaatgccctgatcgatcagcgacgccatgaccgtcggaatcaggatttccagcacgctttccaccgccacgaatgcaggcgccagcaagctgtcctttttgtattcacgcagcgatccgcccaacgtgcgtatcagatgctgtttcggccgtgactggttctttgcaaccgaaaccgtttgcgttgttgcgctcactcctcttccttcccttcgttttccgcttgcgattcatccgcccgcacatcacagatcgccagactggagtaacgtttttcgtctccgatcatgccggtctccaccagattggattgcatcacgtcaagcacgtgcatgaactggcgaatgtcgtcatcgttcagcccctgcagcagtatgttctccatggcgacggcgttttcacgcaacgcttcggcgatgtcgcgggatttgtcggtcaagactattttcttgagccttgcgtcgcgccgcaccgattcacgaacgatcagtccttttcgttccatgagtccgagcaccctgcttgacgtcgatctggtcacgccgaagcgccgttccacatcctgtggaaaaatctcacgttccgaatgacgggtgaggaaagcgatgatgtcgatgttgccaccgctcaatccatccacctgctcgggacgcgtcgacgcaagataccggttgatgacgttgtgcagagatctgatggcgacgctcggcggcttgcacacaccttggtcccacgcctcggcgaacgccgggttcaccgaagtcgtttcattgtttcgttcatctgtcacgcgctatatcataacccgttgcacatacaacagttgcatatacaacattccgcgtgtcgtcggattttctccgacgagaaggcaccggttcaaggattgccgaaaccgcaaaaacaatcatggtgcgaacctcatgatcccgcccgtaaaactcgggatacgtcatataaggttcgcaccatgatcaattgtacagcacccttatggcttatggcgataagggcggcagacgaaatcacgccgcgtcacgtgccttgatgcgttccatgaatccggtgcgatcctcgtccgtgatttcgcgcagcacacgtgcgggattgccgacggcgatgcagttcgccggaatatcgtgcgtcaccacggctccggcgccgatcaccgcaccgtcgccgatggtcacgccgccgagcacggtcacatgaccgcccaaccatacgccgttgccgatcacgatcggcttggcctggcacgcgccgtttttgcgctcttcgaaatcaagcgcatgattggtggcgaacagaccgaccatcggcgcgatccacacatagtcgccgagcgtaatcggcgcattgtcaagcatcacgcaatcgaaattgatgtaggcatgcgaaccgatggtgatgttgcggccgacctcgcaacgaaagttcggttcgatgaacacgtcttcaccaatcgatttgaacagccgttccatgatctcacgacgacgttcgacatcctcgtaatcggttttgttgtattcgacgaacagtctcttcgcctcggcgcgcttgcgttcgatgtccggatgcgagtcctgatatacctcgccggccaccatcaactcccactcgtgacgacccgcttcgctcatgccagccgtctcgtcgatctcggtcattgtgcctccttgcatgcactcgtcgtctcgcccatcttaccggagcgagatgcccccctaccggcaaacatgccggcaaattcgttatgtgaaaggccgagggcctggtccgcaccggttcattcgcggactaggctctcggcccaagtctgtttgggttccttttccgtcgccttactcggtgaccttggcgtattcgtcaagcatgaaggcagtgatcttcttaccgccttcgctcatgagcatcggcatggagttgatcggcatggacctgaggaacatgcgcatcatgtcgttatcgggcatcttcggcagattgccggcctcgccctcggcatacacggatgcgacgatcttggagccgaccggatcatcggaccattcgccgaaggtagaccattcggtaagcggttcggccttgccatcgccatcgagctcaaccacgccggtgccggcgatgtcacgactggaagtaccgacctcaatggcgtattcgccggattcgacatgccagtcatcgaacttctcggaccagtaggcgaaggcgcgctcgtccaggtcgaagctcacttcggcagattcgccagccttgaggaacaccttcctgaaacccttgagctcgtggatcggacgtgccacggcggacttgcccggagccacgtacacctgcacggtttcggcggcgtcaacgtcggaggtgttcttcacgaccgcgcttacggaagcggtgttggcgccggtcttggcgaccttcacgtcggacacttcgaaggtggcgtagctcaggccgtagccgaacgggtagtcgaccgccttatcataggtgtcgtagtagcggtagccgacgaacacgccctcaccatagttgacatggccttcctcgcccggccagttgatcatgctcgggtcgtcgttgatgtccatcggaacggtctgggcaagcttgccggacgggctgacgttgccgaagatcacgtcggcgagcgccggaccgccggcctgtccgagcagccaggattcgaggatgcccttggcgttatccgcccacggcgccacggagacgacggagccgttggaaagcacgaccacgatgttcttgttttcggcggcgacggcttccagaagttcgacctgtttggccggaatgtcgagggtttcacggtcgaagccttcggattcggcggcttccggcagacccaggaacatgagcactacgtcggcacccttggcgacttcgacggcatcggcggccattgcggcatcagccggttcgaggtcgagggtgaagcccggcgcgaacttggcgtccacgccacgtgcggtgagcgtgtcaaggaagctggtcatcttggtcggagtgatatgggaggaaccaccgccctgatagcgcggggtacgggcgaattcgccgatgacggcaacctttgcatcggatgcgaccggcaggatggcgtcgtcgttcttgagcaacaccatggattcgactgcggcttggtgggctacctcgtcgtgggcatccacgtcgaagcggtagccttcgacgctcatggcggcgcgggtcttgttgaccaggtcgatcatgccttgggccatcctgtcgagctgctcaggctggatgcggccgtcgcgggcggcgtagacgatctgatcgtcggtgtaactcggcggcatttcaaggttgaggccggcgttgagggaggcgacacggtcatggtctgcaccccagtcgctcatgacgatgccttcgaagccccattcgtcacgcagcacgtcggtgagcagccagtggttctgcgcggaatgcacaccgttgatacggttgtaggagcacatgatggtccacggttgagcttccttgacgatgtgctcaaaagccgggaagtagatttcgcgcagcgcgcgctgggagatgttggcgctgacgcgcaggcgatcggtctcctggttgttggcggcgaagtgcttgagcgaagtgccgatgcccttggactgcacgcccgcaacgatgccgatggcctcatggccggccagatacggatcttcggaccagtattcgaagcaacggccgccgagcgggttgcgcttgatgttgacgccggggccgagaatcacggccaccttctcctgaatgcattcctcggccatggcctcgcccgcttggtggatgagttccggattccaggagctggacaggcccgcggccggcgggaagcaggttgccggcacggagtcgttcaaatcggtttcaccggtgctggatgccaaggacttgcgcaagccgtgggggccgtcggtgatcatgtagcccggaatgcccttggcttccacgccctgcagatgccatgcgtcgccgccggaggtcagtgacgccttctcctcgagagtcaggtcgttgacttcaggataggtgctttcgctcatacgaacctctttcgtttgctcggcaagagttcaactccgaactctttaccaaccgattggtaggtactttatcaaaatcgaatacgcgacacgccaatcatctttggaatctcagttaaccgaccgtaaggtaatcataattttccatcccgatgaggaactgttgtcagagctgcataggagagaacatggccaacgacgaagtcgaccgcagaagcgaaatcctcaacgcggcggtcgaatgcttcggcacgctcggctactacggaacgtcactgcagaaaatagccaccatggtcggcctgaccaaagcgggcgtactgcactatgtcggcagcaaagaaggcttgctgcatgcggtgctcgacgagatgtacgatcgagaaaccgaagacatcaccgccggcatggtgcgcaacgaacaccctcacatcgccgaaatgtggcgtaagaccgtggcgatcaacgccaaacgtcccaagcttgtgcacatgttctcaaccttgagcgccgaggcgctgaaccccgatcatcccgcgcacgactatttcgccaaccgcgaggagcgtatcgtggacgtggcggagaacatccgctggcacgtgcccaaaggcgtcgacgccgaacaggtactgcgcgccggcttcgcgatgatggacggcgtgcagctgcgctggctgcgcaagcctggccaagatctcaacgccatgtgggtcgaatgcgaggacgtgctctttccgctgcctcagtgggatggctaccgctagacgccaaattcctccagtcactggaacaatcaacctgctcagggacctctcagaggtacaaaacatccagcgactggaagaattgacccactgaggagcctttcagaaggatgaaacttccagacattggaagaaacaggacgcagagaagccattacgaggtaagaaacctccatctactggaagaattaccccgctaagaagcatcccagcagggtaaaacctccagtgggtggaggaatcaagacgcagaagcgaaatcacacgacggcgcgcggcccgtcctgcagatcaccgaagatcaccgaagaccggcgtctacaacgtcaccatggcaccttcatccgccgccttcttgacggcgttgagcacctccagcgacttgatggcatcttccggagtgacaatcggctcggtctcgccacgcagcaccttcagatagtgcaccagctgaagacgatgcggcagtccctccttcacgccctgaatctcacaggtgagcggcttcgtccagtcacttacaccatcccggtatgtgaagagctgcaatctcggcagagacagtgaccccttggtacccatgatgaaatacgcgtcagtgtcgaacggcgcgaagaacgggttctctcgtgcggtcgcttcccaattccacgggctggccgccgcgtcggaaagcgtgatcgagccaagcgtgccggattcgaagcgtacattgaccactgcggaatcctccacttcgaatcctcgagcgctgttggccgccatgccttgaatttccacgggttcgccgatcagatagcgcatgagatcaacatcgtgcaccatgttcacgagaatcggaccggcgcctttctgcctgcgccagggaatgtcgtaatacgtatccggcttgtagatgttgtaatgcacggaaaccgtcacgatgcggccgagcacgccggattcgatgatttccttggcacgctgcaccttcggattatgccggcgatgctgaccgaccaataccggaaggccgatttcgcgggcctccttcgcgaagatgcgcgcgtcgtccaggtcgtcgctgatcggtttttccaccagtggcggcacgccatgttcgagtgccgcgcgcgccatgggcaggtgcaggccgttcggcgatgcgatcaccacgccgtcaagcgccacatgatcgaacatgtcattgtagtccgcataccattcgacgtcgatggatttcgccaattcctccgattcgggcatcggatcggcgatcgccaccaatttcgcatcaggattgtcttgaatgtaacggatatggtcgcgccccatagcgcctgcgccgattacggcgagtttgagccgttgcgtcataagtaactcctttgttggcgtcgtttcgctgtctggttcttccttcggaatattccgcgactgcggctacttgcgtttcggcatcatagtgccggttttcctaaccttcgtcaccagcagcaacacaacggcaaggccgatgagcgtaatcacggccgcagcatagaacgcgttgcgatatccgaccgtctcgtcgaacaggctggtggcgatgcgcggtccgatccatgcgcccagcgcgtaccctaggaacatgatgccgtagttgatgcccagatgctttgttccgaacgtctcgccggtcagcggtgggtaaatcaccagcaacgcgccgaaagcgaatccaagtacgattacacagccgatgaagaacggcgcgttcgttgcgaacgacatggccaccatcgccagcacggtagcaatcagcatcacggcaaggcacttgaacgcgcccagcttgtcgtacaaagcaccgaatgcgagtcgtcccacaaaattcgacaacgtgttaatcgacaccaccatcgctccgaaggcggcggccgtcatcgcaccgacctggccgacctgatactgggcgatcgaggacagcgcaccgacaagcatggtgccggcggtcgccgcggccgcgtagacgagcagcagcacatagaaccgcggcgaagcgagcatcgccttccaatcaaagccgtcgtcttcggcattgtcggcggaggttgcggaagtaggcggattccagcctttcggacgatacccttccggcaccggcgagacgaacagcgaacccaacgtgatggtaatccagaacgtcacgccgagaatcttcaacgcggtggaaacgccgaacgtgctcgacaggaagctggctatcggagacagggtggctggcccgatggcggccgcggcaagcagaatgccggacgccttgccgcggatgtcggggaaccagcgctgtgcggtggtgagcgtcgggttgtataccaggccgtttcccatgccggcgatcacgccgtggcagaggtacagcatcggaatgctagtggccataccggtcaggaaccaacccaatccgaataccagtccgccgacgatcatgacctttcgtggaccgaatctgtcggaaatgcgacccgaaaagatgccggtgacggccatgaccgtctggaagatggaatacgagaggctcacgtcggttttgctccacccattctgctcgctcagcggcgtcagaaacacgctgaacaatgcgatggacgccacgaagaacatgaccacgaacgcggccgatagaatgccgtaccgattatgttccttagctgcggttgacataaggccttcctttcctgtgattggttttgcggaaccacgcctccttacgcggttccgcgttgcaccaagatccttgcgtcggcgcctacagcagtccacgctgcttgagcgagttgaccgcgaactggcgacgaccgcccggcttcggtgtcagatcgcccatcatcagatggaacccaccgtccacactcacttcatctccgttgacgaaatccgatcgtggcgacgccatccatgccaccgcgttggcgatgtcctgcacttcaccgatgcgacgggatgcaatcagccgttcgcgatccttggtgacctgcggatcggcgtagaatgaggccgacatcggagtcttcacaaaacatgggcatacacagttggaccgaataccgaacggcccccattcggccgcgatcatcttggagagcatgccaagaccggctttcgcgcaggaatatgcgccggagaacgtttccggagagtgcgaggcgaccgtggagatgtgcacgatccgaccggacttgtgctgcagcatcaccttgccgaatgcctgtgaaaggatgaatgcaccggtcaggttgacgttgattacatccttccaatcctgcaaaggcagatcctcgagcggagcgaaccgtagaatgccgacggcgttgacgagcacatcgacggtgccgaagtccgcgacgatcttgttacgcaggatctcgacatcggcggcatcggagatgtcgcaaccgtaccctttcgcctctgcgccgtaggtctgtgcgacttcgacggcaaacgtgcgggtagcctcttcgctcatatccaccaatgccagtcgggcgccggctttggcgagttcaccgcagatcgcggtgcccatgccgccaatggcacccgtcaccacgcatacgtcgcctgccaatcccagccagtcatactgtcttgaagccggattttcaatcatcttttcattcatgggagcttctcctttaaatttttcccagattccgcatctttgtcggaataatcagcaccgatggtagactttgccccgagggtaaggtcaaggaggacgacgtggacgcggaggacgaactgctgacgattggcgaggtggccaaattggatggcatcaccaccaaagcgctgcgttactatgacgcgcatggcattttgaagcccgcagccgtcgacccgatgaccggataccgctattacacacccgaccagatgcttgacgtggatgtgatgcgcatcttcatctcttccggcatcccgctggaatcgttggaacactaccgtttcgaggatgggtcattggattggcggagcgtactggcagccgcacaatcgcaagttgacgaacgcatgaggcagttgcgatatttgcagaccacgatcaacgattacgccggcgaactggtccgcaaggcgcactcccccgctgatggtgtggtccgttccgatctgctcccaacgtggctggtctcaaccgattggccgttcgacgctccgtgcaacatgaagcagtatctgcgcacgatgacggacctgcgcaaggccattcgcgaagcgtcggcaccgcatcttttacgccggggcatacttatggatttggaacggcgacaggcgttcgcctttcatcagttcgccccctcgcagcacatgcttgacgtattccattccggcgatcgttcacgattgatatgcgattacgattttcccggtaatacgaccgtcatcaacccgcccggaggccctgcagaaagccaggtgatcgagcgtgaatccctcgtggaatgcttcaacgacggcactgcgatggcgttgaaactcaacccgcgggattggccgcacgtgaccatgacggagatttggggcagccgcacgcccgacggatcggtacgcatccgcttcacccgccaccgctgcacgccgctctacgccctacaatcgtaattattcaaattacgatttaacaaattacgatttgccgctcggaaaagcactatctgctgttcgcgctcaacggtttcagcaccgaactggagagactggcacaggacaatccgtcaatacggctggtatccgttgaacagctctaccagtagtaacgccaccgattcacgcggcacgaacacgcaacaccgtgcgcacccagctactgtccgtcggcgtagccatccatgtcaggaccgtcaaaaccatcgtcgaaacccggaacttccgggccggggccactaggaccaccaatgaattcacgagcggacatgccgttttccttgcgggaggcatccacggcttcctgtagcgcctgccgaacttcgaagccatgcacgatgttcttcaacaccacgacaccattgccggacgactggtcacgcgtgtcaagaaccagcgtactcatgccgaacagacgctgcaggaacgaacgctcgacactgatgtcgacgatacgaaacagtttgatcagattgaatttctcattcaatatgcccgttttgatgctcatctccttatcggtgagcgtatatacggtgaaggtgaacggagtacggcaccaattacgcttacgctgcttccacagcacattgccgcttgcaactttcataggggctcctttgtctcgtacaataattgccacaacacgacgcttcacgcatattgtaccggttatcaaacgacacagcccgcatcatccacacatgttcagcaatcggcaacatcgcactccgtcaatcatgacccaacggatcacgattccttgaacggaccggagacgcgatcaacccacgcgcttcgagaagcgaaacatgagcagggcgagaatctcaccgactacggccatgccaaggaacacccacatgctggtggagaatcccgccacgtaggacgccgactgactcattccggaagcggcgttcgcgcctgcacattcggcgatgagcgtggaagccaccgccgtaccgatggcaccggcaagctgctgcacggtgttcatcacggcggatccatcggcgttcatcgaagccggcaactggttcagcgcatgggtctgatcaggtacgagcacgaacccggaagccgccatgaacagcgcgtaggctatcgccaccgcccattcatgagcaccgccaagcatcatcgcaacgtccatgaccgccacgcccacgaaaccgcaggagatgaatttcggcgggaaatgcgctttcagcgcactgccgatcagcggagcggaaaccgcgccgaccacggctcccggcagtagaatcagggcggcgatcatgctggtatgtccaagacctcgctgcagcagaatcggcaacaggaagttgacgccgagcacgccaccggacgacatgagcagaatcaccatgccaagcgtaaagccagggtacgtgaacgtacgcacttcaatcagcggatgttccatcctcagctgcacgaaggcgaacactgccaacaccacgacggcaccgacgagtacggtccagaatcgccaatcgctattccattgcgcgaagaagctggccgcgacgatgaccccggccagaccgagcgcgatcagcagcaacgacggcgccgacagataccccttctcaccatgacggatgtcggggatggttgcggtaccgagcaggaaagcgatcacaaggaacggaatcatggcgtagaaaatccaatgccagtcaaggaattccatgaccaagcctccgaacaccgggccgatggccggggccgcgcaggtcacgaggctgaccaggccgagcatcatgcctcgcctgtacaacggcgccttttccagaatgatgttggtcagcagcggtagtgaaacgcccgttccgagcgccatgatgagtcgcgccgcgagcagcatcgggaaattcagcgcaagagctccgaccagagtacccgccgagaacagtacgatggcggtgacgaacagtgccttcgtcgaaaaacgtcgcaccatgaacggtgaggtcggaatcgccaccgaaagcagcaacagatagccggtggtaagccattgcaccacgtcagcggaaatggcgaattcctccatcagtgtcgaataggcgatgttcagtgatgtttcggacaggatgccaagaaacgtcaggatggcgagcgccaccaccacgacggtgagccgtccctcattcatatatttgccgggctgcgattcctcccgcattgtttccatcggttgtccctgctgtttttcgcgttccgtcatgattggcgattcctctctcttcaacatgcgcgaccgcatcgtgtgtcgcacgattcggttgtccatctggtctattgcttcgtcgccgtatgcgatcgggactcgtcacccgccatcagcgtttcgacgtgcgccggccaggcatcggccacctgcgtggtccactcccctccccgatctgcgcccatcagccgatgcatggcctgcagcgtggcgaccgtggtggcggcgtcttgcggatcgatgccggacagtacgccgcacaggtgttcgtggaactgatgcacgtacagttcacggatttcctcggcggcctccgtcaggctcaacgtcaccgcacgaccgtcggtttcggatgcgtgcttgaccacaagacctttgccgaccagctcgttgaccagtttcgtaatgctcggtgcggtcactcccagaaaagcgctgatgccgctgacccgtgcgaccggagtcggggattcggcctgatgattgagattccagatggcgtcgatgacgtgcacatgccgcggtttcatgcttctcggtagttccggcaacgcttcggtgatacgtttcgccgtccagcatgcgtcgatcagatcacgcacgtcatccaaagacagttgccgtcggccacttcgcgattccgtcatgacgcctccgcatatcgttaccaatagtcattaccaagagtaagtatatgaatgccctagacaaccggcggactttccgtatcagccgccagatcatgtttcggaaaaccataatttcatcaacgaaacaggcgtgcacccattggatgcacgcctgtattccacagaaacctcaatagccttttccgttacgcatggcgggcggcaagctccctgccgatccggccgatgcgcccgtcaagatcgtagaagaaaagcaatacggccatgaccacgaccatggcgaccggcacccatacgaaggtgttgaccatggcggacacggtgacggcggactgcgtggctcgcgaaccgtcatagccgctggcgccgaggacccatgcgatggcggccgaggagacgcccatggccaccttcatggagaagctggacgagctgaacacgatgccgtcggagcgcacgccgctttgccattcgccgtactccaccacgtcgccgctcatggcattgagcgcggcgttcatcgggatgatgccgatcatgcgcacgacgatggagacgaagaacacccacagatcgctcggatcgatgaacaccagcagactgccggcggcgacgagcacaagtcccgccatcgaggagttgcgtttgccaaacctggccacaagagggccggcgaacggcaggccgatgaccatcgggatgacggtggccaaaccgattacggcggtcagattggaattgccgagcacatacttggcgatataggcggccatgccgttggcgatgccgttataggtccacagcgcgaaattcaggccaagcgtgagccaccagtacttgttgcgcaccagcgctttgaaatgtccgcccacgcagaccttgccatcgttgccatccgtgccgccgtcagattcgaaggaagcgacttcacgcgtattcgcgaaggtgaaccagtagccgaacggaatcatgacggcgattacgccgaagaagacgccccagccgatcgacgttcccccgaacgcgttcacgatcggcatggcgagcacgtagacgagcatggcacccacattggcgatggtcatgcggaagatgttgagctgcgtcttttcaccggaatcggcggtcagcagcgaggtgagcgaggcatacgaaacgttcacggtcgaataggccacgttgacgatcgcatacacggcccacgcatagatcacgccggccggagagttgccgaacgggtcgaggaagaggaacaggaacgcaatgccgtaggcgatgccgccgaacagcatccacgggcgggccttgccccaacgggacttggtctggtcgaccagaatgccgacggtcagatcccagaaggccaccaccagacgcacgacgagcagcatggaggcgaccatggacggcgagagcctgaccacatccgtatagaacatggtcagataggtggccatggcgatgttgccgatggacgtccagaaatcgcccataccgaaggcgaatttcgtcaggaacgtcagtttgccctggggtttgatggttgcagacatagttcttccctcatgtcgcttttgtgagataacaggcaggcccctccctctgatgagggaggcggcaaagcatgatgtcaggccttgcgaatgcgcacggccatgtattgacggccaagatcgacgcgcacggagttttcgtaggcgtccggcagcgtttcgacggtcatgttccacgtgtcgatcacgtcgaccacgtaggcggatccggccggcaacgggatttcacgatacttcggacggaaccagccgaaatagatcagctggtaatcgtcaccaccgcgcagcacgggaacgtcccagtactgtgcggccttctcgaccgcaggtgccacgtttacggatccgttgatcggattggcaatcggccatgcccgatcggcgtcgagatcgccatccaacggcgtcgcgtcgagcggaacgtcgtcgaagatcgaacgcatgaacgcgatgcgcgccggggcgtcgccgtgcagttcgccgccatgcgcccaccagatctgctcgtcttcgtcgatgaacgtctcaccgtgggtcacgtagccgccgcgcatggcaccttcccagaagcgacgcatgagttcttcgccggtcaggttgccccagccccaatagatgttgccttcgtagcccggttcgtcgcatacgaccggcttgccataggccttacgccagtcggcgatgcattcggtggtacgggtcacgtccacacgctggatggagcagtgggtgcaccacggttcgttgtagtcgtaaatcggaatgcagttgtggatggagcgcaggtggccgaacgcatcgttggccatgaccacacgtgcgtactcacgccagtcctcgagcgacttctgaggcatgaggtcgtattcgttggccagcgaccaccacacgttcttgtaggcaccgtagcgacgggccatataggcgaggtacatctcgtcttcgactttggtcatcttggaaaagccccagtccggcttgtcatacgggtgcaacaggatgatgtccgcctcgataccgagctcgtcaagctgggcgatgcggcaatcgaggttcgcgaagaattcctcgtcgaaacaggtgtggtcgaaaccggtttcacgggtgcccggataggcgtaggcccatgggtcggcggtgttgaagtcgtagaacttcgggaatacgcacatgcgaatcttgttgaatggcgccttggcgagcgtggcgacggtgcggtcctgcacgtcggtcggctggctcacccatgcgtagcaggtggtgccgtaaggctggtacggagtgccatcctcataggtgaaacggtatttgagttcgctgccataggcttcgcgggccttgccggaaagcgcttcggttgcggtaagcacacgaccgtggttgtcctgcgtcgccggagtcacggtgaagacgccggtttgaccgtcgagcgctggatcggtgctccgggtcgtgaatgcccaccgccccgccgacgatgccatgaagcgcacggagtagttgccgttgccgcgatagaagccaccgacgacaacgatctggccggtctcggcattggtgaagtcggcggaaagcgtcacatcctgatatgggttgccttccgtagttccggtgagatcgatttcgaacagtcggtactgctcgacctgggtcttgtattctgccatgattgccgccctttggttggtcggtgccgcacgacgacgtgcgacgcgttcgaacgtgttgactggtagcaatcaacagcaaccggataccggaacaacaatccgattgttattgattactaactagtaacttactggttgataacttacttgtcaacccacgacacgcccacagccaccccgaccccgaccggcattcggcttccttgacatgccaggcaaaacacgaatcatcgacgctcgcccacgaatcttccgcggacgtcaccgatacccatcccactgcggcgacgggaacagatacgcctcatatcttttccactcccccagatagtccacgccctcgggatcggccagccaacggccttcaagcccatacatggcggcattggccaactgatatgccagcatgccgtccaccccttcgggaaccgcccagtcaaactgcgcgaaattatcccacatgcctttggtgcgctccacgaaatatcgatgcgccggatgttcggccgacatggcctcggtgttgagcatttggaacagccgcaccatttcaggttgccgcacattctgttcgaccaccgcgcgcaacgcggacgggatatgcggacgctcacccgccctgtcgccgccggcgcggaaatggcccagatattcagtctccgcccccgacatgtcatagtaacgttccaccaccagcaccagcagattgtgcttgcttttcacgcgatggatcacggccgtctgcgtcacgccgatttccgaagcgatgtcctgcaacgacaatccatggtagcccttttgaccgatcaaccgcacggctacgtcgatgatctggttgaggcgctcttcggcgctcatccttttcgacaccgctttcttcttcggcttcggttccgccatcagcgcggtgatggccgatttgtcgagcacatcaagatcgtcggcgtccaccttgtcaaccgccatatcgagcctcctgacacatcagacaatcacttaagttaccaattaataattatgccgcagtcgtatgtgaaaatcgcggaaaatcagtaagacacaccgcaatcacatcaatgatttgacatcgaagttatcggtagctaacttataagttatctggtagtaaccagtaaccggaacaacgaagtcatcccataaccaactgcaataggcaccaaggaaggtgtatacacatggaatcgcagatcatcgccgccgaggagctcgctcccgacaccggcaagccggtaagcaaactcaacctcggccgtttcggcgcaggcttcatcttcttctgcatcgtcttcatgatgtccggcaccatcggatccaccgtactgctaccggcccgcttcaatacgctgggcatcggtcagggcgagacgattctcggcacgatgaactccatcggcatcatcttcgccctgatttccaacgtcatcttcggcgcgctgtccgacgcctcgcatagccgcttcggcaagcgtacgccatggatcatcgtcggaggcccgatcgccggcctcggtttctacctgacctccatctcccccacactgccgaccatcgtcgcctcctggtcgttgctgcagattggcctgaactgcatgatcgcaccgtgtgtggcgattctgtccgatcgcgttccccagaaataccgtggttccatgtccgccttctacggcgccggacagatcgtcggccagtccatgggcaccatcatcggatccgcattcatcgacgcgccgaagaccggcttcatgatcggcaccatctgctggtgcctgtgcggcatcggcaccgtgctgctgcttccgcgtgaactgtccgcagccaccgacacaaccgaaaagttcgacatcaagcaggtcgccatgcagttccgcccgccgaccaagggcgcacgcgacttctacctggcgctcatcggacggctgatgctcatcttcggctacaacatgatcgtcggctaccagctgtacgtgtgcatgaagtacatcggacaggatgccaaggccgccgcggcgaccgtgtctaccatggcagtgatcaccatgatcgtctcgcttgtcgtatccctggtttccggtccaatctccgacaggatcggcaagcgcaagctgccggtgttcgtctcctccgccatcatcgccatcggcatcgccgtgccgtgggtcctgaagtcccagttctccatgttcgcctatgcggcgctcatgggccttggatacggcatctacatggccgtggatcaggcactgaacgtcgacgtgctgccgaatccggacgaagccggcaaggatctcggcatcctgaacctcgccaacaccctcggccaggtcatcgcaccgatcgtcgtctcctccatcgtggtcgccaccggcggttacttcctggtattccccatcgccatcgccgccgtgatggtcggtgcagtggtgatcctgttcatcaaaaaagtgaagtaggttcaccgaccgcaagcggcccgcacaagccgcataaccggcaaagcccgttccctccgagagcctccgctctctccgctttcggaggggacgggctttgccatgccaacaggtccgtccgttcgaaagccatccattacttcatttgcaaaaccatccctcaactgctaaactaccaattggtaattaaaggacatcgcttcaatgaggaaagtgagcaatcccatgaccggcaataccaccgaactgccatacaagaaccccgaacttcccgccgaagaacgcatcgcggacctgctcggccgcatgaccctcgaagagaaggtcggtcagatgatgcagcttgacgcccgcagcggcgatctggacgatctgatcgtcaacaagcacgtcggctccatcctgcacacctctcccgccgacctgccccgcgcggtcgaaaccgtgaacaccaagacccgcctcggcattccgctggtcatcggtgacgactgcatccacggctactccttctggccgggcgccaccatcttcccggagcagctcggcatggccgtcagctgggattccgaaaaggtacaggccgcaggccgcgccaccgccgaggaagtatccaccacgggcgtgcactggaccttctcccccgtgctgtgcatcggccgcgacacccgttggggccgcgtgggagaaaccttcggcgaggatccgtatctgatcggcgagatggcctccagcatcgtcaaagggtatcagggcggagccaaggccggcgaaccgctcgccaaggatgcgatcttggcctgcgccaagcattttgcaggttattccgaaacccagggcggccgcgacgcctccgaagcggacctgagccatcgtaagttggaatcctggttcctgccgccgttcgaacgcgtagccagggaaggctgcggcacgttcatgctcggctacgaatccatcgaaggcgtgccggtcaccttcaacaagtggctgctgtccgacaaactccgcggtgcttggaactatcagggcacgctgatcaccgactgggacaacgtcggccgttccgtctgggagcagaaagtcaagccggattacgtgcatgcggccgccgacgcggtcaaggccggcaacgatctggtcatgaccaccccgcagttctatgaaggtgcgctcgaggcggtacgcaccggcttgctcgacgaatcactgatcgatgccgccgtctcccgcattctcgcactcaagttccgtctgggcctgttcgaggatccgcgcctgccggatcaggaacgtatcgacgcggtcatcggctccgacgagcatcagcggctcaacctcgagttgactcgcgaatccgtggcgctgcttaagaacaacggatccctgccgttcgccgcagacgatgcgaaacgcatcgccgtggtcggcccgctcgccgacgacgcacagacccagctgggtgattgggccggcaattccggacaggtcaattggatgccggacggccatccgcgccacatgatcaccaccgtgctcgatgcgttcaagcagctcgcaccggcaggatgcaacgtggtctactcccgcggtgcgaatatcgtggatcttgtacccgatccggaaggcgagttctatccggatggtcagccgcgaccgaaaatcggcgtctccgccgcagtggaccaggccatgatcgacgaagccatcgagaatgcacgacagtccgatttggttgtcgccgtggtcggcgatgtggtccagctcatcggagaaggctgctccaccggcacgctggaactgctcggcgggcagaacgcactgctcgaggcgctgtccaacgtagctcgcgaaaccggcaagccattggtcgtggtgctcatgagctccaagccgatggtgttgccggcctgtgtgatcggcaccaatggcgtgatcgtcaacgaatccgccgccgaaggtacttccgcactgctgtgggcgccaagcccgggcatgaagggcggccaggccatcgccgaaatcattctcggcatcaccgaaccgagcggacgcctgccgatcaccttcccacgccacgcaggccagctgccggtctactacaaccagattcgcggccagcacggcaaccgctacgccgatctcacgcaggatccggcattcgcattcggcgaaggcttgggctataccacgttcgagtacggcgaaccggccatcaccaacgttccggactccggcgccttcaccgaatccgacaccgtgcatgccgaaatcacgctcaccaataccggcgaacgcaagggtatcgaagtggtgcaggcgtacatcggcgacatcgtcacctcttacagctggaccgatcgcgagcttaagtcgttcaaacgcgtcgagctcgagccgggagaaagcaagacggtcgcattcgacattccggtcgccgactgcaccatcgtcgaccccgatgccaatcgtatcgtcgagccgggtgaattcgagctactcgtcggccattccagccgtcgcgaggatctcaagcgcaccgtcttcacggtcgcctgacgtctttcctcttacatagtgggtgaatgcaccgcgctcacccacatcctgacgaaagcacgacttgccgagaacgccgttttcggcaagtcgtgttttttcttttcccgactgcgaacatatatccgaggttaattctattaggattgcagagcacgattcacgcaaggtgccgcaataccgaatcgtgcacgaccgaccggctccagcagcttcgaccagcccctgcagacccaatcagcccgacagattcaatcagcgatacgcatcccacagcggtgaggggaacagcagattctccatttcggaccattccgtatacagatcgacctccggctcacgcaaccaccacagctgaatgccatccatgatctccatggccttacggacgattggccgcatgctctcatgccacgaacccagctgcggcgggacgagccacggatacctcgaatatttttcccaaatgccgtccatgcgcgacatgaattcgtcatgcagcggatggccaggattgagtgattcggccgccagtaccgtaaacaactgcaccatcatgcgacggcgcgaattatgccggaccagatagcgcaagtaggccggaaacaacggcgcggtcggatcactgccgggcatgcccgatgcaaagaaatcctccggagtgccggtaccgttgtaatactcgctatacaccatcgccaacatatgatccttgttgccgacgtatcgcagcacaccctgtttggaaatgccgaccttatcggccacatcctgcacggagatgccgttgtatccacgttcgctgatcagctgcaccgccgcatccagcacttcctcacggcgctcttccggcgatttgcgcacgcgcctcacaacctcttcttcaaccatgatttcgagtctagcgccgatgctgcttcattcccgttatttcgcgtcaaccatcatcataatgaaccgacgttccgcaaccgacaaggagcggccatgaataaccccatcatcaacgagcaggtcatacggatgtcatttcgggcacaggaaaaattgcgctccgtgatgagcgcatcgagcgcatcattgcccgtgttggccgtcgcatcatagacggtcaacgattcgtgcatctccttgaccagttcgctgtggcgctggggcgtgtatgcgctcgacggcgtggtgacggtcggagcggtcgcattgatcgccattgcgaccttgcagatcctgcgtcgacgcaagagagacgcaacggtagctgcggaaaccggtgagcccgccgccaatgacggcgagtagtcacgagtctgcccatgcataaccaataatcagcgcggatggccctgccccacaaggccatccgcgcttctcatcgatactcgcccgaaattcagtcgaccggcttggtctcgtccgcctcgtaatcgaagaagtcgaagtcggcggtcttctcatgcagcgaagcgtcggtgacggcgataccgaccatcgtgccggtgaattcgccatacttgcagtattcatcggagaaggtggtggtgtcgaaatccgggccgatcgtagtccaggtctcgccgtcatagccccactcgaaccaggtgcggcggccttcgatgcgaagacgcatgtgaatcggcttgtcctcaacggccacgcgggtgtcgagcatctccgtcttctcgccgttctcaaggcgcacgatggagattgcagggccaccaagcgtttcggagtagtacttgcgcaggaagacgttgttcatgttgtcgtagtacacggtcagaccggcggaatgctggtagacttccggctcgaactccatcttcgtggtgacggtggcgtatacgctggtcagcttgcgggcgatcaggctcgtacggttgagcgatgcgagtgattcctcgccacggatgcgcagccagccgggacgttccgtcacgttggcgaaggtcgtcggcatttggcgcggcgagtagtaccagttgccgatctcatcgccgtcgaagtcatcatgctgcgggatttccggcatcggcacatccggcagattcggttcctcgacctccagcttggccagattggagccgtcggccatgcgcagccagccgtcgtcggtccacgtcatcttctgaatggcggtctcacgaccgagcgtgcaacgcagttccggcacaaacggacggctggtcaggtgcaccagatacgtttcgccgttcggcagatccacgtacgatccgtgaccggacttctgcaatacggattccggattgaagtaacgcggcttcagatggtcgtcatcggcacgctcgttggattccttcggctgggaggtgacgagcggaccgttcggatccggctcgtacggaccccacacattgcgggagcggcccatggtcacggcatggttgtagccggtgccgccttcggcgcacatgatgtagtaccagccatcgcgcttggtcagatgcggcgcttcgatgcagccacggtctgtggcgcctcgccagatacgcttcggatagccgaccacgtgttcggtttccggatcgtattccacgcagcagatcacgccgggcttctcatagccttcacgggtttcccattcaaggctgacgatgtactttctgccatcatcgtcatgcaggatggatgcgtcgaatccggatgaggtcagatagaccggctcactccacggaccttcgatgcttttggatttgatgagatagttgttcacgtcgaaatatcgggcattcatggagttcatgacgccatagattacgtagaacatgtcttcggcctcattgtaggtgaggcatggagcccagatacccttggcggagggcagcttggtgaggttcggtgtggcgtcgtcggtaagcacatgggtcagcaattcccagtgcttcatgtccttggaatggtagatcgggatgcccgggaaccattcgaatgtggagacggccacgtagtaatcgtcgcctttacggcagatggccgggtcgggattgaagcccttgaaaatcggattgtgcagcattgcttttcctttgtttttggtgtacgggattacttttggatcgggaaccagtcttgggcgatgcaccggccgagatcccatgcatcccagccaatccagccgggagtgttgacggtgtcggtgagcagcttgtagttccagtagtagaaaccgtggcccttgctccaggcgttgagctgggattcggccacaccctggtatagcgcgcgcttctcttcggcagaaagcgtctcggcctgtgcgccttcctcaccgttgagcacactttggccaccatgggtatccacgccgcaaccgacggagttgaacaggcaccactcgcccacgatcgtcgggaagtattcgctcatctcctcgatcatcggcgcgtacgtattcctcacgaaatcgtcgtagccttcgactgtctgcgggcaacccatcatttcggcggtcatcagatactggtgggtgtcgagaatcacgttctcgaattccggcgccagcttgccgtcatcaccgcgcatgaagtccttccactgcccgatgtcgaaaccgtcgtggaacaccacggccttatcggtcggcagagctcccctgtcggcgtcgcgcaggcgatggtaggcggtgacatagaagtccttcaaccagtcgaacgcaatcggtccggtgcctgcggccagttccggatcgaccgccttgtaccgttcggtcacgttcatcatcggccaggaagtggtggtgttcggttcgttgatgatttcaatgcccatcagcgcttcacggttgccgtaacgcttggcgagacgttcgagcacggacagcacgaattccacctcgtcgggcagttgcgcccacttgcacacgccggagatgccaccattgtcgaagccgttctggctcatcggcgcggtatgcaggtcgatgagaatggtcagaccatacttatcggcccagttgaacgccttgtcgagttcgtcgacgcagccgatgaacggcggccggtcgccgaagatgaaatacggcaccggaatgcgcacggagttcaggccccatgatttgatggtggcgaagtcgcgttcgttgacgtattcggcgcgatgcgttgcgatgcgcgcttcgtaaacggctggatcaagctgggtcggcagatagtattcgtcatccgcggtggtgccgtcgaacaacgtcgggttcatccacttctccagaaccaaccagttgccgaggttcacgcctttgatgtagttcagatccatatgcactcctttgtacggtcccatagtagtttctatgtacttagtaactacttagttaaatcataatataattatccgagacatgcaaccgccagatcgtcacgacgctcacggctcatgaatcgaccgttcgatcgccatcggcgcctttgtcggtcgattgagccatccatccgttgcgccacacacacgtcagatcccatccttccaaaccgttgccgccgcgggaatcccccgtcgcatcattgcccaacaactggtagctccagtagatctgccccgcggacacgttccacgcatccaactcaagccgggccacttcacggtagatcgccttgcgttccaacgcatcgcgctgccgttgcgcgagagtattcatcaggcaccactcgcccaccatgacaggaacatgccgtgcggccagccgaatcatcgccttgccgtatgcgacgaacaaccggtacagccacatcgcaggcaccggtacgaatgtctccatggcgatgatgtagatgtgcgtgtccaacatgacgttcgtcatgccttccttcccgaaccagcctctccaagcgcccaatcggaatccgtcatggaacacgatcacgctttccggtttcaagatggctcgcaaacgccgatacgcgtcgcgatacaggtctttcaagaatctcatgggcacatgcccgctgcccttggcctcctccttgtccttggcatggccggtggacggcgccgtccgatataccagccagctgatcggctcgttcaatacttccatgccatacaatgccggctcattccggtagcgcttggcgagacgttccagcaccgtcagcgcatattccacggcctccgggtccttgcgccatgtgcatacgcctgtgattccgccattgtcgtaaccgttttgcgagcccggcacggtgtgcaggtcaagcagcacctgcaatccgcaccgatcggcccaagcaaaagcgcggtccacatattcgatgcaccccggatgtccctccacatcgccgaagacgaagtacggaacgggaatgcgcaccagattgtatccgtgtgaggcgatggcgatgaaatcccgctcggtcacatatgtttcacgatggcgtcgtagcagcgcttccaacctggacggttccatcgtgcgatgcatccagatttcatcatcctcgccgcattcttcgaacagggccggtttcatccatttttccagcaccaaccagttgccgagattcacgccattgatcttctcgtcgactcccaacgtcatgccggctcctttcgcagcatgttgacgcctgccatgcggaaccagtaaccaattccgtcaggcaggcgccttgcaacacaacaccggcttcgagggcgacggtgggaagagaaaggaaagaccaccgttcggcagaccctccaagccgctgtcagctcagtcaatcgaccgagccaccgtccccgctaatccagcacaaacgtgttgaacgaacgcggggccagcgtcaccttgaatccacggttggcggacgaaggatcggcaaactcaaatggacgctcctcatcgagggcgttctggaccacgaccaccaccgtgccgtccggattgcggaatgcgatggccatcgagttgaagtggccggtggtgccgagcaccttcgcacccggcttgacgtagtgcgagaagtggcgcatcacgtaatattccggattgcggcgcacttcatgcttgtcggcggtgatggtgaacagcgagttctgccaccatccccatgtggaatcctggtcgtcgaggatcatgttccagtaggtgtaggcggtggcgccgttgcgcaggtaatggttgatcaggtggaagatgtactctgcatattcccagctgttgtcgccggtgccgcattcggattccgactggatcagctcgatttccggccacgactcatgcgtacgtgcgatgcagttctgtccggcccactggtaggcgatgcctttgatgtacttgcgcgcatcgtcatcgaagaggatgttatcgacgaaacggttgtagttgttgagcttcatgccgtagccaccgccggtccacgccatgtcttccgggccgttgagcgtgcccagccagatgtcggtgtcgattccggcttcgtcgaacgcgggaccgagatagtcgcggatgaacaccttgagcgcttcggaatcccatagggcgctcgggaatttctggtcggcgaacacctcattctgcacgtgcagctggttcacggtgatgccgtgttcggcgtaggcctgcacatacctgacaaaatacttggcgtaggccttgaggttctccggcgtctgcacaagacggccgtagttgtaggccttcgggcgcttcatccacgtcggcggactccacgggctggagaacagctgcatatccggctgccattcctgtgcacgatgaatgtacggaatcagagtcttttcatcatgctcgacggagaaatgctccatctcgtaatcgccgtcggtctcgtcgtagctgtaccagtggtcggcaaaatcgttggcaccgacgggtgcacgattgaaggtgaagttcatctcgtcgggactgaacagttccttgatgatctggtcgcgctcctcctcggtgaccgtttgcagtggcagccagccgagctcgttgaaacagccaccgaagccacgcagggcctgatactcattgccgtcgagctgcaagtcggaggcggaggcggagttggtggattcgatttcggaagttttgtcgacgagtctgtcgtcttgtgtggttgcggtccaggtggtcattggacactccttgatatcgtcgttgatattggaatctgcggttttcggcctaggtttcgacccattgcattcgtcatggcaatgcaatcgcccaagcgggtacgttttcctgcagaggagctacggcggtccgttccggcacgttcggaccatacaaggccgagtccttgcggtccggaacggaccgccgtagcttccctgttcgcaacgccgtcacgtcacgttgcttgttatgatgttccttccgttcccgttcagggaaggatggcctacttgaccttcttgatggccatgatgaagaagcaaccgatgatggccagggcgatggaggtcgggaacgcgaagttgtagccgaggttcaccacgagggcggacatcacgatcgggccgcacatctggccgagggtggtagccatgttcaggatgcccagatccttgccggcctcttccttgttcggcagcacgtcgacgagcagggcctgatcgaccgcggagtagaccgcatagccaaggccggcgatgcctgcgaacaggtacatgcccatggacgaggggaagacccacggcatggcgatgccgatggcgaacagcacggatgccacgacgaccgggaccttacgacggccgatgatgtcggagaccggacccgaaatgaaggagccgaccagagacatgaccatcatgatcatggaaacgacggacacggtgacggcggattcgtcgacggactgtccgatgtagttctggatgatgtacagctggtagacggcaatcatctgataggaaacgagcatgcagaaacgaccaacgaacgccttgtagaagtcatgcgcgccatggaatgccggcggacggaaggagacgagcacgtccttgagggagccttcatccttcggcaggaagtcggcggactcctccttcggcatgataagcatggagacgacgccaccgaggaacatgagtacgcctgcgacggcgaagcccgggatgagattcttgatgaacagtgcaccgagcatggtgccgatcggggaaccgatggtggcaccggcgccgtagaaggcggacatggtgccgcggatgccggatggcacgcgatcggacaggatggcgaccatcggggcgatcatgcagttcaggccgaacatgcaggcgcagtagaagatggtgagcagcacggcattatgcgtggtgccggtcaggaacagggtgacgccgccaagcaccgcaccgaacaggatccacggagtacgacgtccgaacctcgagcgggaacggtccgagaagttgccgaacatcagattggcgatcagggatgcgaccgcggtgaaggcgttgacgataccgatcaacgcatccggattgacgccttcgatggtcttgtaatgcatcggtaggagcactgcggaaacaatgccaagacccgacatccatagcacgccgaaaatgatgaaaccggcgccgaatcgggcgatagtgaccttatcgagcggcttgcccgttgccggcgagagcgacgggtccttttccgccgccgcgatgttggcgtagtatgccgacagacgctcttctttgcttgcgattgcttcactcatgaaactctctccttcgattcatgcttcagtagtgaaatgtgtgagctgctttgctccgttttgctaactaccatatggtaattaacttgttttttaccataaaccacccgacggaaaaacgcaagtcggcaatgcccgaccatcgattttccttagggatcgtcgttgaccatgccccgcagtacataagttatctattacttagtaactgcttagttaaatcatattacaaagatatctgactgtcattctccggcgtgtcccaatgattttcaacgattccccctccctctgctataacttagtaagtacaaaaaggagaaatcatgcgtcgccgtacggaaaccaccaccaagaaacgaatgagcgccgaggatcgtaggaaaagcatcctcgaaaccaccatctcgttcatttcgcagttcggcttctggggcttcaccattcgcgacgtcgcccaagctcagaacatcaccgaagcgggcctcctttactactacaactccaaggaacagcttctcgaagaaaccctcaagtacgccgatcgcatcaatcagatcgccatcgcgaaacatttgggcgtcgaaggcgtgaccggcgaagtcttgcaggacggcattgcataccattgcgatctggggctgaaagccatttccacaggcaccgtggaaaccaatgccgaccgtctggaaatggtccgcctgtacacgttgcttgaaagcgaagcgctcagcaaggaccatcccgtgcacgagtatttcgaacagcgcgagaccaatctgctcagggaatatgcgttcgccgcaaagcgcgacggggtcgccgatccggagcgcaccgccttgcaggtgctctccgccatggaaggcttgcagctgcgatggctcaacggatctcacgacatcgacttcgtggccgagtggaaggccctcatcgatctgatcatcccctgacgaaagtcattccgccgtcgttccgaccgcccggcgtcggtcgacaaatctcctgcgccgggcggattcggctcaaccgacgataacgaccacgttccagcggccaatcgtcagttcgtcaccgatggcaacggcatcgcccgctttcagcgcaacatcggccgtggccacctcgtcgatctcgccttccgaggcgatcacgaccggcgcgaccaccacctcacccggcaccggactggcgatggtgatgtcggaggcggaatagttgagcagatacgtcaccgtctcgccttgagtgttcgtgccctggcgaaccgcaatccgacctgcgagcgcagtgccggcgcccgcgaccccggcatattccacggcttctcgcatgacggcgcgaatcgattcggcatccagcaaggtggcgatccactcggcgctgcctttgccgaaggtgttgcgggtcacggccgcataatccttccatgcatagtggccgtaggtggcaagtacttcggtgccgtcagccggggccaccagttcgatcagcgaaagcgcttgggtggatggaacaccttcgagcgcgccggcgaattccacggatacgtgaccgttcgggcgggtgaactggttataggtcatgccgaacacgtcggtgaggttgtgcggagcgcggtcagcccacacgctcacctcgtcgtcggagacgaaggaacgcatggtggagaccagatggccgccgttttccacaaacttacgcagacggtcagtggttttctggcctgtgcagtacagggccggggtcacgatcatcccgtacctggcaaggcgttcggcgtcggcgtcggacggtatgaagtcgcattccacattgagttcgaacaacgcgtcatacacattgcgcaccacgtcgttgtacttgaggctgccaccgaacgggaagccggattcgatgaggaaccagtccagcgcggacagcgattcattggagaccatgatggccaccttattgcgcttcttcaggtggacaagacgctcccccacttctggcttggcgatttcgcgaccgaatacgccggcctcacggtaggtcgggttcggttccaggtcgtggctcagcaggcctttccagtaggtttcgaatgaattgtggatggaatgccagtgccagtattccaccatgtcggcgccggaggccagatgggagtatgcctgcaagcgcaactgacccgggaacggaacccagccgtgctggccctgcgcttcggtttcgagcactaggtagttccggccgtccttggtggaacgggtcatatcgccgccgaatgcgatctctttgccggtcagatcgtcttcggtcggatggtagatgtccacaccggtgatgtccacagcggtcgaagccttgaaatggtcgacggccggctgcacgccgaaggaataaccacgccattcgaaatcgaaattgtgggtaatgaactggttgtcgtgcgcatattcgcgcacgatgtcggcctgccactgcaggaaggcgcgcacctggtcgcggcggaacttgtcgaactcaccgccgagggattcgttgatggtcgcggtcacatccgggaagtcctcccaggagtccacacgattggaccagtagtcgaggccaaagtgatggttcatctcatcgaggtcgccatcgaatttctcgtacaggtatttgacgaacagacgctgcatgtcgtcggagaccgaatcgtagtacttggtctcgttatccacctgatagccgatgaccgccggatggtcggccacgtgggagatgagcctgcggatcacgcgctcaccgtagaaacggtaggtggcgttaacgatattcatgatctggcgtgcgccgtatttgccttcgccgttcggggtgacggcgagcacgctcgggtcgagcttgacgagccagccgggcacggcgtaggtcggcgtaccgacgatgacgtcgatgtcggcgcgctgggccgcgtcgagggcgcggtccacataggtgaagtcgaatttgcccggttggggttcgcaggtgctccacgtggattcggcgatgcgaatcacgttgagcccggcgtccttcatcatcctcatatcctcatcgatacgatcgatgcccttcatcatgaggtattcgtcgtagtaggcggcgccgaaaaggatatggtccacgctgttgcgactcatggctcctctttctgttgtcttccttgacatgcacttgcatttatatctaacggttattagatataaagaagatacatctcgacacggcaatttgtcaagaacggtgagaaatcaggcatgtcttatctaacatccattagaaaacaatacctctcgcaagcatgcgagtccgcacgcatgagtgcagacgtcaggcgacgaagcctaccggtagttatcccacactggggaggggaagatgatcctctcgaagagcagccactcatcgtacaggtcgatcggaggcttgcgcatccatcgcaactgaatgccatccatcgcctccagacacatgcgcaccgtcggccgcatattccgccatccaccgacctcaggcggaatattccactgatattcggaataatgctcccacacaaggttcgggcgctcttcgaaatagtcatgcaacggatgctcggggctgaatccttcggactccaacaccatgtaaagctgcaacagactctgtcgcttcgcgttgtaccgcaccagaaaccgcagatatgcgggaaaactcatgccgttcggatcactgccgggcaagcccgattccatgaaatcccgcggcgttccataagcgtcatagttatcggtgacaagcatcgacagcaggttctccttattgccgatatagtgcagcaaccccggctgactcataccgatctcatcggcgatgtccttcaacgacgtgccatagaagcccttctcccctatcagtttgaccgccgccgcaacgatttcggccttacgctcctcaggagatttgcgaacacgttttttccccgcaccagtcatgcatcccagtctaccgaccagcatccaccccacggccaacacggccccgttcgccgacacgcacatcatggtgtatcgttttcctaacgtcggtacaaaggagcgctatgacgcagccatcaatcccatcggtcccaaacatgcaactcaacaattccgtccccattcctcagatcggtttcggcacctatcagattccggcaaccgctacgcagcaggccatcgagcaggctctggaaatcggctaccggcacatcgacaccgagaacgcatgagacagaacctggatgtcttcggattcaagctggatccggatgagatgcaggccatcagagccctgcacaatcctgccatgcgcatttccggcgaccccaacacgttcagtcaatcccagtcccgggccaaccagcgagcgcgcggaaacgtcacggcctagcaaggcaccatcagatcgacggagcctccacgaaggagacgggaagcaccacactcccgtctccttcatatggaatcccgttttccttcgcccgaatctgcaacaacagatcatgcgcggcggcgcgccccatctctctgggatcctgctccagcaaatagatgccatcgtgcacatactggctccagcgccaatcatcaaaactgaccagaccgacgccatccgggaaaccgacgcccaaggcgcgcaacaccgccaacacatcgaacagcaacggccccatcaacgacacgatcgcggtcctaccgctcagatgacccaacgcgatggacagctttcgcccgatccagtcgacgtcattgtccttgacatcaatcgcaatcatcagaataccggattcatctgcggccttccgcaacccctccactcgatgagtctgtgcggaaatctcgcttttcatacgcgaaagcaccaagacattgtcatagccagcatccaccagtcgcttacctagcctcatgcatgaatcctcgttatccgacatcactctcgatacggaatcgggaagattctccggctccctatccacgacgaccaatggcgtgcgcgccgtgataatggaagaatatgcgttgaaatcggaggcattgggctgaatcaccagcccatcaaccctttgagacaacagacggttgatttcggcacgctcctcctcgagagaattatcggaattcatcagcatgacatcgtatccagccggacgcaactcctcatcgatgcctttgaacagcaatgacgaaaacacattcgagatatcagcgaccacgacacccaccacatgcgtattttgctgacgcatccgccttgccgatgcgttcggcctgtagtccagacgatccacagtctcctgaatgcgagatttcgtagccgcgctcatcttcccatagtttccgttaataaaacgcgacacggtcgtcaccgacacctgcgcctcacgtgcgatatccgcaatggtcgcctttgccatagcaactccctttccgtcggaatagtcaatcattgtaccgtcccttcttcatcgagtccgttccgtcaacgacacgcccatccgacatgcttcagtcccttgtgtcccaaggacttgaggccatgtggattgacaatcgtccatatggtgtttatcataggggtatcgatacacctaacacaacaaagaatgttgattaccataagatgtatcgttaaactaaccatcacaaagccaacggaggcatcatggaagagttctcactcaacagcttcaatctgacggataaagtcgtactcatcacgggcggcgcaagtggcttggggcagtattacacccaagccgtaagcaaagtcggcgcggatgtgttcatcgtctcctacgaccgacaagggtgggaggagacccgagcagccgtagaggccaatggacgcaaggcggtattcatgctgcaggacatcacggagccaggtgcggccaaaaagatcgttcaacaggcaatgcaggaatttggacgaatcgatgtgctcatcaacaatgcaggcatgcaacgcagacatgaactcgtggaattccccgacgaggattggaaagccgtcatcgaactcaatctcaacgccctgtactacctttcccacgaagtcgcaaagatcatgattgagcaaaaaagcggcaaaatcgtcaatatcggttccatgcagtcttatcgggcgggcaagttcatcttcccgtacgcggcaagcaagcatgcagtcatgggactgacccgagcctatgccgatgccctggccccctacaatgtgcaggtcaatggtctcgctcccggctacatcaacactcctatgaccaaggccctgcaagaggatccagtacgaagcgttgaaatccgagaacatattccggcgggccactggggagagccgaaggaactgatgggagcgatggtgttcctgtgctccaaggcatccgattacgtgaccggtgtcatgctccccgtcgacggcggatacctgcttcgctgacatatcgccaaatacatgacctcataccaagaaacataaaggtaccgccattgtcgcgggtccgctgttcaacatgctcctgcatcgcgttcgcccggatctatatcgcacaaacatcgacatcgcagtactcggtgatttcaaagaattcaaggaggaagagacccccggcttcgccatctccgtactgaccgccatgatgccggtcattctgatcgccatcgcaacgatctgctctttcattctgccggaaagcaatccggtgaacgaggccatccaagtcgtcggggcacctgatgccgcaatgctgctttccttgcttttcgcaatctggtcgatgggattcgcccgcaaaaagaccgtgtccgaaatcagcacgtcgatgaccgagtccgtcaagcagatagcgatgatgctgctgattatcggcggcggtggcgcattcaagcaggtacttgtcgatggcggcatatctgattacgtatcctcgctgttcgccaatctcaacatgtctccgctgattgccgcctggctggtggccgcagtattacgagtctgccttggctccgcgaccgtggcgtctctcaccgccgccggactggtcgctcccatgctggcgatgtcttcagtcaatccggcattgatggtgctggcagtgggtgcaggatcggtcatcgcagatcatgtcaacgacgccggcttctggatgatcaaagagtatttcggtctttcgctcaaggagacgttcctgtcttggaccaccgccactacggtaatgtccgtaaccggactggtctccgtactgggcttgtcactattcatctgacaagcaacatccaagcctgtggggcagcaacggcatgcccccacaggcttttcttatcagtagccgaccgcaggccgattgaaaccggcactctcggccctatgcctgaaacacgttgggatgcttcggatcgcctggctcgtcggccagtacaccctccagtcccaggaattcctgccagaattccagcgaattgccataaggagcggactggcgtccacgtgcctgcagattcgccttggcctcaagcacatcctcctcgcgaatgccatcaaaatatgattcgagacgttcacgattcgtggagtcgtagaacagcgagccaatgatttcagtaagccgttgcgcacgtgcgatcggcaatgaatcccaatgacggaattcaatgaaattcttcagacgaacatcgttgaaatgcgtggagatcacatgattgatctcatatgcgttaagctcacgatccggatatgcatcgttcgcgttctcgtaaaatgcaggatggtgcaaatcggctccaggtatggccagtgcctccggcgtatgcgtcagatcggcaaacatcagcggtgtggacagcacatccaccgcgtaatcctcccaaccgaaacgcgggtcaaacagtccgggaatcacattggtgcgttggaaatccaaataatcccacatgcgttgacgcagcaacggataaggattttcctgcccttcgaaatacggggtgttacggaaaaaccatgccagaatcggaccgataaccgttcccaaacgcaacttggcaatcgcatccctctcggaaacatagtcgatgctcacctgtgtggaagccgagcatcgcatcatgcacgggccgaactgaccgacgcggccaagataggcggtcatggccttataccggtccttcggattgacgggaatatcggcatagcccgatttcggctggtagccatagttcaccaaacggaaatccaactcatcaagcaccggatcgacttcacgtcggaacgcaccgtacagtctgctcagttcctcgggtttatgcaggatgccgagcgaacattcgagctggccacccggctcgagggaaacggaaatgccctcacgtccaagcccgacaagacgtccgttctcccagtattccttgctttcgtcgtagtatggacgaatacggttcaacaacgcctcgataccgttttcctcgtaatagttcacggcggtatcgtcactgttgtgcaccggcaggtgttcgatctccacaccgaagccaccggttccacggccttggcaaccggattcgaaaaacttgaccaggctttccacatgcttcgggttcggctcggtcagcaggtgcgcatacgtaattcttggtgctgtcatgatggtcatcctaacgaaaatcggcatccgcaacgcaggaaccgctatatggaaaatcgataacgcttatacgccacctcaatctaccgacgctcagaccgtttcagcgtcggcagattgggacgacttccaaactaccgacgctcagaccgtttcagcgtcggcagattgaggaaggcactaggctgcgggctcagactggtgggccctatacgccttcttcgccgccgaaatcatcagcttgatacggttgagctggttggcttcggaagcgcccggatcatagtcgatggatacgatgttggcctccggatgcagacgccgaatcttgccgaacatgcctcggccggtcacatggttcggcagacaggcgaacggctgcgcacaaatcacgttcgggcatcccgattcgatgagttccagaatctcggcggtcagcagccagccttcgccggcctgtacgcccacggaagtgacctcaccggccttcttgaccagttcaggcatcggcaggtcctgggagaacttgccgtttgccagaccgattgccttgcgcaccggattcaaatacaggtccaagcccttacgcatcaaggcatagccaagcttgctgccacccatgccgagatagtgctcgttccagtcggcaatgtacggacgggtggtcatgaactccatgattcccggcaccacggcctcgcaatcctgtgattcaatcacatcgaccacgtgattgttggcatccggctggtacttgaccagaatctcaccgactacgccgacgcgcaccttgcgcggctcgtctttcaacggcaacttgtcgaaggacctgacgatttccttgacaagctcctgatacggcagataccctttgccgatgaacttgcgtgccgtcttggagaaaccgtgatgttcaagcgtttcacgcacgatgacatcccacgtctcatacagcttgtcggcacttcctgcggtcacttcgtacggacgcacccgatacaggcatttcatcagcagatcgccgatgaccagcgccttgacggcacgatgcagcagagatggggtcgccttgaagcccggattgtcttcgataccttgagtggagatggcaatgaccggaatctgtggatagccggcatccaccagcgccttgcggatcaggccgaagtagttggtggcgcggcacatgccgccggtctgcgtgatggcgagcgcagtggtgtccggatcatacttgccttccagaatcgcattcacaagctggccgataaccatgatggccggatagcaggcatcgttgttcacgtacttcaggccgatttcgacatcatcgcggctggcgtgcttgagaatgtcgaatttatagccgccggaacggatcacggattccaccaatgagaagtgaatcgggctcatctgcggagccacgatggtgtagtccttcatatccttgccgaatggaatgcggttcgcatatttcgacatggtggcggaattatgagccgtcttcttgccttcccaactttcgccgatgccattttcagcggcacgcctggatgcggctttcacggcttcggtaagcttcggattggccttcatcaccgtatcgagcatgatctgacggcccggagtcggggcggcggaaccggtcttgcggaatccaccctgtccggcctgcttgatggccgcggtttcggcggccttgagctcagcctcagcggccttgagctgtgccttgacctcgtcaagcttggctttggcgtcggctacggcgtcggcattgccgggttgatcctgcttggtgggcatggatgcggcaacgtcgcgcttgtgattgcgttcgcgctcctcgacggcggccttgagcgaacgcagtcgaatcttggccgcgcccagattggacacctcgtcgattttcagcatggtgtacacgtcggccttgtccgcaaggatttcggacacctgaaccgtggtgatggcgtcaagcccgcagccaaaggagttgagctgcacgagttcgagccccggataggaggccacgaagttggcggccgcatacagtcgggaatggtaggcccactgattggtgacgcgcaatggcatcttagtcaccttgcggtcaccgacatggcggaatccgttggcgttcttcttacgcggatcttcctcgccctcggccaggaattcgctcagggcgagcttctgccccggctgcagttcacaaatcgaatcctcggagagcaccaccatgccgagcgcgcagatagtttccggaataccatgattgacttccggatcgatatgatagggcctgcccgcaagcacgatgccgcggcagttgtgttccttcatgtaggcgagcgccttcaggccctccatctgcacgtcgtgcttgaacacctcgttttcggcgtaggcggccttaaccgcggtctcggcttcctcgcgggtcacgtcagcccaggcgaactcctcgacgatacggtcgatcataagttcgtggttggccatgttgaagtacgggcgcatgtagcgcacgccttcctcacgcagttcgggcatgttcgcaccgatgaccaccggatagttggccacgaccggacagttgtaatggttgtcggtgtccggaaccaggttctcctcatatgacacgcacgggtagaagatggtcttgatgcccttgttgagcagccatttgacatggccgtgcaccagtttggccggatagcagatgttctcggaggcaatcgattcgatgccggtctcgaacagctcgtgcgagctacggccagaaatcattaccttgaagccgagcgaagtgagcagcgtgaaccagaacggatagttctcatacatgttgagcacgcgtggaatgccgatttcgccacgggtggccttcttgtcggtgagcctgcggtaggcgaagcaacgcttgtacttgtagtcgtacaggttcggcctgtcggagcgttgctttttggagtcgccgccgcgttcgcagcggttgccggtcacatagcgcgagccgtcctggaaagtggtgatggtgagcttgcagtggttctggcatagcttgcatacgtcacgttcggaggtcatcgacaggtggtcgaggtcctcgccggagatgatgttcgatgcagtgtgcgtcacgccgtcgatcacgatctgcttgatgccggtgttcgccgcatcgtcaggttcgccatcaagtccgtcggatacatcggaataatgcatgcgcgcggtcagggccgctccatacgcacccatgaggcccgcgatgttcggtcgggtgacctcacgttcggtgagcagttcgaaggcgcgtagcacggcatcattgaggaacgtaccgccctgcaccaccacggtgtcaccgagttcgcccgaatcacgcagcttgatgaccttatacaaggcgttgcgcaccacggagtagcacagaccggccgcgatgtcctccatcgaggcgccttccttctgcgcctgcttgacggatgagttcatgaagacggtgcaacgcgagcccaaatccaccggatgtgtggagttcagggccgcctgcgtgaattcctgaatggtcaggcccatggattgcgcgaaggtttgcaggaacgagccgcagcctgaggaacaggcctcgttcacggcgatggagtcgattacgccgtcggaaatggccagatacttcatatcctggccgccgatgtcgatgacggcggtgacgcccgggctcgccatttcggcaccgcggtaatgggccatggtttcaaccacgccttcgtcaaggtgcaggccggtggtgatcaggccttcgccgtaaccggttgcgcaggagcgcgcgatccacgcgtcttgcggcagttcgttctgaattttcttgacgatgttcacggcggcggtcagcgggctgccttcgttggtcgcgtatgatgaccatacgatttcacggtcatcgttcaccagcgtcgccttgatggtggtcgatccggcgtcgatgccgaggaaatgaggaccgattgcaccttccagcgtaccgatatgcacatgctcgcgatgatgacgttcgttgaacgcctcacgttccgcttcggtcgggaacagcggaggcatggtcggcgtgttcgcaggcagattcttcaaatcctcgagattctcgagaatatcctcgcaggtacgtgcctcgaaatgaacgccgtcttccagctggtcgggctcgcccgccaacaatgccgaaccgaaggccacatacaggtgagcgtcggtcggcacgatgaattcgtcgaccttgccttcaagggcgcggtggaaggcttcgcgtagttcagacatgaagaagagcggcccgccaagaaagatcacggtgccgtgaatcggtcggccggaagccaggcctgcgatggtctgtgtggccacggcggtgaagatggaggcggccagatcgggcttcgccgcgccatcgttgatgagcggctgcaaatcggttttggcgaatacgccgcatcgcgaagcaatcggatagagcgtctcgtaacttttggccatgtcgttgagccccgccgcatcggtgtcgagcagggtggccatctggtcgatgaacgcgccggtaccgccggcgcatgaaccgttcatgcgctgttccggagtcggcttcaagtaggtgatcttggcatcctcgccgccgagttcgatgatcacgtcggcctgcggatattcctgatcgatggcgcgggtctcggcgatgacctcctgcacgaacggtacatggagattgtcggccagagccaggccgccggagccggtaatggccagtcggatcggctcatcgccacgatcccgagccacgagttccttgtgaatgtcttcaagcagtcccgccactgtggcgcgtacgttggcgtgatgacgacgatagtcggagaagagcacgccatcgagcgcgtcggtctggtcgagcaccacggccttcaccgtggtcgaaccgatgtcaagacctacacgcaacggcttcgtatcgcgggattcgaccgcggtatctgctgcttcaaccatgtatacctctatacctattcgtagtgccggtaggcctcccccgtgtccccacaggtgaccatggcccggttatccaaatatgtaatggtagtctgtggccacgcctaagcgaccatcgtgccgcatgattcgcgcgacacaaggcgtaatttagacaattattttagtcagcctgtatagttttcaagatggtcaaggggacacccttcaggaagcgtccccctcccccgcggcacggtccttgccgtagatttccggaatgatgcggagttggtcgtgcagtttcggccaaatgacgatttcgccggattccagtgatttcggcacgtcaatgatgcgttggttggagcttccacggaactgcagcaacgagtcatgcagatccttgatataacgaccatcgacaagaatgtcgaccaactcaagtagctctcgcttgtcgggactttcgccttcacgcatgagctcctcccacgtatagccggtccagcaccagatgtctttggtatgtccgtaccgttcgcggatcttgcgcgccaaaggaatcaggatgccggtgttgagcatcggctcgccgccgaggaaggtaatgccctgaacgaagctttgcccgacatcttcgagaatctgcgcttccagtctgtcgttgtactcatgcccggcctgaaaatcccagatcgaggagttatagcagccttcgcagtagaacgggcaacccgaaacatacaatgagcagcgaatcccttcgccatcggtcatgagaaaacgtttgtagtcggccaccatgttgtgactcatccggttcgtccattggccggctttggggttattggagcgttcggtggggatgaacggcccacgatcatgttcgttcggcgcgaaatcatgtcgtttgatcgccgtgctgacgctgctgatcacatctgcctcctcgataacacatacccctctcgcgagggaggtggcatgcgaagtatggcgaagggagggacagtgaagtctgggctccctgatccctccctaccaagcttcgtcggatgcccctcgtcatgaggggcattacatgactttacttagcctcttcgaaccattcgcgttcggagccgtcctgcagcatgacatgaccggtctcaccgctcatgtgcttgacgcgatgggcgatctcctcatggcgaccgtgcaccatcgggcgttgcaccgggttacccaaatagccgcaggtgcgcttggtcacattgcacttgtccgggtcggagttgccgcactccgggcacttgaagccttcttcggtcggttcgaagtcgccctggaaaccacacatgaagcagtggtcgatcggagtgttcgtaccaaggtagccgatgccgatgttgtaggcgtaatcccatacggccccgagagccttcggattggcctgcaggcacgggaactcgcagtagttgatgaagccgccggaagcgagataggggaagtccttctcgtaattgagcttttccatcggggtgggctgcagccacaccggataatggaaggaattggtgtagaagtcgtggtcggtcacgccttccacctcgccgaacttctcgcggtccatgcggttgaagcggtcggtcagggattcggccggcgtggagtacacggaatagtggtacccctcggccttgcaccattccttgcacaattcgttcatgcggcgcacgatcgacagggcgaattccttaccctgcgggtcccagccgtggtcgcgcatccaattcttgccatagaacacgctggtcgcctcatacaagccgatgtatccgagggatacggtggcgcgttcattgcggaagagctggtcgacgctgtcgctggcaccaagacgaccgaatgcaccgaagcggaacaaggtcggggcgttgaccggcgcggcctgcttgcatcgcatgatgcggtactgcaatgcctgatgggcgacggccatgcgctcgtcgaagatcttccagaaacgttccttgtcgccgtgggattccaacgcgatgcgcggaacgttcacggtcacgacgccgaggttcatacggccgtcttcgacgtcctcgccggtcttcgggtcgatccatccctgcaggaaggaacggcagcccatcggagccttgaaggatccggtgatcttcacgatgttctcgtagaagatgacatccgggtacatgcgcttggtggcgcattcgagcgcgagctgcttcatgtcgtagttcggatcgccctcgtcggcgttgatgccatgcttgacggagaacaccagcttcgggaagatggcggtgtggtgttcggaaccgaggccgcggatgcggttgaggaagatggcacgctgtacctcacgagagaaccagtcggtgcccaaaccgaaaccgacggtcacgaacggggtctgcccgttggacacacggttggagttgatctggtattccatggtctgcatggcgtcatagatggccttgcgggtctggatcttcgcccagacctcgcgcaactgttccaggcgtccggcttccttgtggaacggctcgtccatcggcagcggagcacgatcggcctcgaagtgcaggcgcttcggctcgacgttcttggacaatgtgacctgacgctcggcgatttcgatcggcaggtcgtcgggcatgatctcgtgggcctgctccaggaacttggcgtaatccttcttggcgtattcggccagatgctcgtcggcacggttggcggtctgccctccgtactggctggaggccacgtccttcatgatctgggtgatctgcgtggccgcaatgctgatgctgttcggcgaacccatcggggcgttgcccaaggtgaagccgttggcgagcatatcccaatagttcggcagcgagcagttggattgtgcggtgaacggcgagtaatcggcatcatggaagtggatgtcgcccttcatatgcgcgttcgacacggcatccggcagcatggagaaggcggatgccttggagacggctccggccagcaggtcacgctgggtggagtacacgttggaatccttgttggcgttctcacgcaccaaggattcgtcacgattcaccagtcggcttacggcctcgttgatatcggtggccttggcgcgttcgatatccttgttcagacgatagttggtgtaggtgcgggccacgtcgtacaggtgatcctcgatcaggccatgctccacaagattctggatgtcctcgattttggccggaccgttgtagcgttccttgatctcagcctcgacctggttggcgataccacggatcatctgctcttcctgcgggccgatcttcttgtcgagatcggcgaaggcggacttcaccgcgctgatgatgttgatcggatcgaaatcgaccacacgaccatcgcgcttctcgacgagcactttctccgcagtggttgcggaggtcgcgttcatcgcgcccagaacctgagtttccatttctcgtcctttccgagtcgggccttccgactggtctccatgcttcgcatcgcatgtcctgtttatatcggcttcaagtactctacgtcatccccagcactatatctagtagaggcacgccgccataggaactagatatggcacttttcggcgccattccgccattatctgatttgtgtgacaaaggtaacgataccggttccggagtgtcgtttggcatttgctccacagaggactatatacgcgggggtaggcgtgcgcaaccgcgtgcgatccatacatggcgaacgccgttttccgagccgtcattgtccgcaagatggaggaatcttgacaacatgacttggactccgggatacaaccccatggcaacgcagtcgcagccacagctgggcctcaaacagcctgaacagcttccccgccttgccagcgaaaccacagcggataatccttggccggtaagtatgctcagcgagaaattccatatggccgtcgagcgttggccttccgtatgggtggccgggcagatcacacagatcaacacccgccgtgcgggcagcgcctatctcaccctgcgcgacgattatcaggacatcgcgatggaagtcaatggcttcggccaattcgcggcggccgccacgccgtttgtgcagggcgatcgtgtgatcatccacggcaagccgaatctgtggatgaaacgcacgtcgctttcgctcagaggtgacgcaatcatcgcagccggtgcaggcggcagtctgaaggcgatgatcgacgagctgcgcaaaaagctcaaaggcgaaggcctgtttgatatcgaccgcaaaatgccgcttccggaattcccgcattgcatcggcctgatctgcgccccccaggcacgtgcggaaggcgatgtgatcaccaacgtacgcctgcgctggccggtagcgaatttcaaggtgatgcacgtacacgtgcaaggcgagcaatgcccgtccgacgtggtcgccgccatccgtgcgatggatgccgacccggatgtcgacgtaatcatcgtcgccaggggcggcggcgccttcgaagatctcatcggattctccgacgaaggtgtggtgcgagccgccgcggcggcacagacccctttgatctcggccatcggacatgaggatgactggaccctgctcgacttggtagccgacctgcgcgcctccacccctaccgacgccgccaagaaagtggtgcctgacgtcaatgagcagacacaactgatcaacgtgcatctgcaacgcatgcgcatgcgcatcgacgcgacgatcgccaacgagatgcgactggtcgaaggctacgcgaacaggccaagcctgacacagccgctgaccatgctggaaccgcatcaacggttcctcgatgacgcccggagccgtatgcgcatcggactgacccgcattctcgacgacgccagcctgaccatcgaacgctcacgcgcatccctgacggccctcagcccgcaatccaccctcaaccgcggctatgcggtgatccaaagcgccgacgggcatgtgatcgacgacgcgaacaacgtcaaacccggggacgagctcaccatgaccctgaagcacggcatggtcgtctccgaagtcaaaaccgcgactacagcaaggagtcaacatgaccagtgaaaccagcaccccggcctccagcctcaccgacaaggaacgcgaggccatcgagcagatgccttatgaagaggcacgcgacaaactcatccaagccgtccaggcgctggaagccggcggccttaacctcgatcagtccatgcgccaatgggaaatcggcgaggcccttgccaagcgggcgcagagcctgctgggcgaggttcgagccaagcttgacgcagcccaggccgaacaggccacggccgcgaataccgcaggaactcaggacaacctgtcctgaactagctgatctgcaccgtcgccagcagggccttgtggtcggagccgtcaatcttctccgacttcacctgccccgccaacatgccggagtcgagcacgatgtgatcgattccggcgaaggtcggcacataatcaatatccgcaggccatgagaacacgaacccgcctgccgcctgcctggacgcatcgatgaaacgattcccaagaaaatccctgaacggcgtatggtcgtaggtggcattgaaatcacccatgaaaatgtaccgggtatcggtattgaatttcatacgggccagttcatccagggatcgcctccactgctgccagcggcttcgggtcggcgaagtggtgtgcacggaaacgaaacggacgggcgtggtgccgccgttgaagctcaccgtgccacccggcatgaacgaagcgctggaatccacatcatcatccgcagggtcgccaagcggggtcgccgaccacaaaccgttgccgtagacgccatccgaactggaaacctgcgaatatggcagatagtcggcgatgccggccctgttcaacgcatccacgaaatcatccgtggtctcctgcagggcaagcacttccacatgctcgcttttcaccaagtcgactatctcctgcgcatcggcacgtcctttatatacgttgcatgtcatcagacgggcatacccgtcatccgtgttcatggaagcgccggaaaccgcggcaatcgcggcgcgaggcagtttcgtctgattgtagaagaacggatactgccaccatatctgcaatccgattgctgcgatcgccatgattgcggcaaagccacgtctcgaaatcacggcaagaaccaaagcgacgatggcaagaagggcgaaccacggtaccaatgacacgacgaccggcatataaggccacgcctgaatcgattccggaagaatgtgcgtagccgtgccgagcagggacgcaagtgcgaacacccaggccagcatgccgaaaatacagttgcgcacatggtgcgacctacgaccattcaccagccgaatcggttggaccggtccggctgatcgggtcgtacgtgatttcgctgcctgagccatagttcctccttgcgcgcggcatgatgtcatggatgccagccgatgacggcgcgaacacaagccgcgcaacgcccctaccctaccgcatcgcgaaagaaatctcgcccgtattcaccgcctttgcacatgccacgtccgtaaggtgtgtagaatatatcttcgttgcctcagtagctcagtggatagagcacttctctcctaaagaaggtgtcgtaggttcgattcctatctggggcactgtgttttgttcgtaaagcgatgccatgccatccgctatggtcggacggcatggcatcgctttcaagccaagtcagtcagctattcccaattcagcatgcattctcctttcaacatgattgcaccatcttccttgtgatcatcaattaggcaagaaccggcagcacaatcgccgaaggcatttctgaacccatatatatggtctggacggccttgtctgcaccggtctgctcactccatagtccggcacgattggtatgcaccgaatattgtggaaaatccgatgatgcgatatcgcaacgaattcgcgatccggcaggcaccttccagcatatgtcccacatctctacgctcaccttgcgtatatcactaggcgtgtagggttccgcatccggcgtatcgagcgcaatggtggtgatggaaccgcggtagttgcgtgccgtaccatccgggtcgacgcacatcagtttggcagtgaacgccgtatcggaagcagtggaggatatgtaaagttccactctgatagctccctgaatatgcacatcctgttcaaatggtgctgtgagaaaactgagcacatcggcacggtaacccggtttcggctgaatgcgagcgccaatttcctgcatcgtggtcaacaaggcctcgccaccacgagttgcgacaggattggccggatcatagttgtactgcaatgcttccatcttcgctttcggccgatcgacaagggcgtgtgcgttctgatcggattcgtcaccggacaaggcgaagaacaatcggcgctcttcgacgtcatcggctgatagcggccattgcgttacggtgtgccaggaatcatcaccgacctcgtagtattcaaccttacgttccggaatccgatgctgtttgagggtcagatcgaaccattccagtgctgcaggcacctcggtggcattgaggtttgcgggctcgagcccttcaagaggattattgaaataatggttccaacagccgatacgcaaccaagagtgtttcttgatatcggggtcgagagaggcatagccggtaagcgcactgccgagatgatgatcaaaccatccctcattgatgaacattggaaccttcacgttggaaggaatctttttgagcagcccccaaaaaccttcatcccagtaggaatcagtcccttttggatgactgatccagtcgcgataccagtcgagacggcctccccacatatcctcatccacggtcatttgcggcagatgcaacgaggacttgagatagtcggcgttaacgggatgcccggcgttctgcatggcccatgcagtaagcacgtcgcaacggaatgagcctttctgataggcggaagagaatcggtcggtgccataatggttcgcacagatggatgccaccttggatgtggcgatgtcggccacgacccagcaggtcagggataggtatgaagtaccccacaggccaatggtctcgacccaatcctgcgtttccaaccaggcaagcaaatcagcaccgtcattgcgttcattgatattcggctcccatgttccgccggatgtataggtgccacgacaccattcgcataccatggcataaccgcgtttagtaagctcttcaccatgcaacctccataaatcgacttgctgcgggtaggggcaacgcaccacgatggtcggatatggtcctttcatgacaggcgtgtagatatcagtggtcagttccacgccatcgcggcaggagaccgtgacggtccgcatggttccggacgcatatttcggcgggaaccctgagctgttatattggttgcgaatattttccagatacttcttgagaaactcatctgcgtcactcattgtttggctccttgtgtctgtgttattgttcggaattgttcttggccgccttcatcgggcgcagtttgtacgcagctattgcgcagacagcagctaccatgtagaagacgacattggagatgagcgacggcatatacgaaccagcagtatcgaacaccgtcccgtggatggtgttggcgactgctgatgcaatgccgcctccgacggagataacgcttagaatcatggggtaatccttcagcccaaagaactgacggatcatccaaggaagggataccaacaccactccctggccgatacccgcaaggaagccggcaaccgtggctaccactggcacactggtaatcgccatgagaccccagccgcacagtccaagtgacgcatacaaggcgatgaccacctctgttttcacacggtcgagcaggatgccgatagtcgccttgccgacggccgcaccgagcatgattccggaaacgaccagagacccttgttccaaagtcaggccgcgtgcaacttccataccggaaacgtgctgcacaagcgccgcaacggactgcagcagcacggcaagaataaccaacaacgcgaaggaacgggtcttcgctgcctgtttgagcgacagacccggcagctcgccgtcctgttcggtcttggcagcatcggcattgacggtatgtccataggcgcattcgcctttatcttggtcgggatggaatttgaaagcgaacatcgcaaagggcagaatgcatatggccagaacaagtgcggtaacacggtatgaagtgcgccaaccgaaattcgtaatccaggaagaaacgaccggattaaataccatgccgccgatgccgctgacgcccagcgcaatgcccatagccagtcccagcttatcctcgaaccagttggcgagtagcacactcggcgccagagtgatcggaataacgtaggcgacacccatcaacgcgaaagagatgtagaactgccacagctgggtgaagaatgactgtgcgagaaacaaaagagaacacaccaccacgcatacggaaattaggacacgtgagtcgatacgtttcatgatgttgcctgcaagtagcgtggtcggcatggcggcgatggccataattgatgcggccagcgcgatctgggtgcgggaaatccccaattcgtcgcatagcggtgtgtaatacaggcccatcgtgttcacgatgaagccaaaacccacgaaggagagcacgcagcatccggcgaagaccaaccatggtctccagttagctcgttgttgggttgacattcgaacctccatgttcgttgtaattccgacactggaatacatgcttctttctcagggaaaggcaccgtttcacattagtaagtaagtagttacttacctatgtagaatcaatatatcaccaaagacggaggtgtcaacagcgcgtgtcccatggttttctctatcggatatgctgaaatgtgcgaaacgtaacctgcggcgtcgcaacgaaagggattgcattgaggaaacagagcagcgagcggattgacgagatcgtgcgggtcgcaaccgaagtcatcggtgaacgaggttttttcggcatgaccatccaggaagttgccgatcgtacgggactcagccaggcaggcgtactcaagcatgtaaagaacaaacggaacctattggatctggtattgcggcaatatgacttcagcgaggatgagaacagctcaaacaactatctcatccgcaagcttaacctctcaaaggaagaactttccaagcatccagcactgatgccggaatggtatcgggaaatcgcgcggttcaacgaggagaacccttatcagacccgcgcatatctggtgttgcgggcagaagcattggacgagtcgcatccggcacatgaatatttcgcgcatcgaggccaacgtctgcgcaagcaggtcgaacaagtcccttggaagctacctccggagtattcgaagcctgagcaggtaggccttctctccatggcgatcggatcggcaatggaaggcctcgagtcacgctggctgggcgagcctgacattgattttctgcagacatggacagcatatgaggatattcttttcccgctcccccactgggaaggataccgctgacggtatcacaaagcctcggatgccgggagacgaataatacaaacgatgcaagccgattcgtcctgtttctcataagtcctgcttatagtcttgccgctggaatccgtatagcagagaggcatttcgcccaaaagtttccgatagcatggccatcgtcgtaaaaagccagtatccgccttgagagaaaagagaacgaatgtctcagaccaccatcgccaaacgtgctgttgccatgttcgccgtcgctaccgcagtattctcgctggccgcctgcggtgccaactcatccgataaaaacacctcgtcttccaacgatgttcaaattatcaacattgcaggagtgaccggcaagaaaccgtacacctatgttgatggcgataattacactggatacgatttcgagttgctgaaaaaaattgatgagaagctccctcaatacgagttcaaatacacggcccttgcacaggacgctcttctcactggcctgcaaagcggtaagtatgacgcagccacctgctccttctacggtacggccgagcgcttcaaaactttcgactattctgagaatccgaccggtctgagcgacgctcgtctgatcatccgatccgacgagaaggatatcaactcgctggaagacttagcgaagtccggcaagaagcttgcccccatcccaaccgatgatgcccgctatacactgattagccagtacaacgaagaacatccgaacaacaagatcgagttcgaaggtgcgacggagaaatccgccaccgtcgccgatgttctcaaggcggtcggtgctggcaaatatgatgcggccatctatccgtacacctcattccagagtatcaaggatgagctggacctcgacctgaccaccactgattccatcggcttgttcccaaccgtgttcctgtatcacaagggcgacagcaccgccaagctccgcaaagatatcgataaggtgctggacgatttccgtcaggatggcacgctatccaagctttccgaaaaatggtatggcgaagatgtgtttagccttcccggcgcagacaaggtggacagcgtcatctactgggagtgacgttctcacccacggagaaacagctcgccgtagaccgttaggctttgcggcgggcattgacttttatgactcatttacgttaacaaacgattggcgggaaccatgaaggtggccattctttcggcgggtaataccggtctcgccgcggctctgcatttacagtcccttggatacgatccgatggtatatacgcgtgacgaagctaagctggctgcgttgcgcgacgggtccatagtgtcggctggctcgatggaaggtatctggaacatcgacgccagcaacgaattggatgaagttctatctaatgccgacttcatcgttatatgcacatgggcaaatgcccacaatgacatatttgagaggatccgtgattgggcccgtacgcacgttgaccctattcgaatcatcatattcaacggcaattggggggcatatgaggcattccagacgttctcggatggtcaggtgattcagccgagtcgcctgaccatcgccgaaaccgccggcatgccttatgtggccgagctgtctttcgatggcaaaagctcggacaacggtatctcgctggaaatcaaaggaatcaaaacatccatcgaagtgtcctatgcaatagaccatgatgacgccaacatattaaggaaattcctgcaccgcgcttacagggaggtacaccattgtgatactgtgttcacctcatcgctgatggctccgaatcccatcattcatgcccccctgtgtcttttgaacatgacgaaaatcgagatgggatctgactaccgtatattgtctgaggggttcaccgagcgcatggaaaatcttgtacgtcatatcgatgacgaacgtcatgcactagccgacgccttgggcagctcatacacacctatagtgaagcagctcaacagcttctggggaagcgactatggcacactcttgcagttgttccagtcgaattccgtctattcgacgctccacggtccgaaagatgtacgacaccgtttcattcaagaagatcttccctacggaattaagccaatcgtggatttgggacgtctgctcaacgtaccggtaacggcatgcagtgcattgctgaccctttacgaagactatctcggtagaccattcaatggccccatcttcaacaaatccatagtggacaagttgcgccagccttcagccaatctttcatagacagcctcaatgtggtcaaccatgggaagggatatgatgtcaattaacgtcagcgacgtcgtcaaaagttttaacgggaacaccatcctaaaatctgtttcatttactcaagaaaaagggaaggtgttttccatcattggaccgagcggatccggaaagacaacactgttgcgttgcttgaatttccttgagcgggctgattccggcacgatcaatctgaatggaaagaccgtagacctcgccacgaaggaccatagagacatagcctacgtgcgtggcgcaaccgctatggtgtttcagtcatacaatctattcgccaatctgaccgcgttgcagaatgtcaccgaagcgctgatttacgcaaagaagatgccgaaaaaggaagccaagcaatatggtcttgaacttcttggcaaggtaggccttgccaagaaatctaactcataccccaaggaactgtccggcggacagagacaacgcgtaggtatcgcgcgcgcaatcgcagtgaatcctgacctgcttttgctggacgaacccaccagcgccttggaccctgaacttgtaggcgaagtggaacgggttatcgaacaactggcggcggaggggcgcaccatgctggtcgtcacccatgaaatggcactagcacgccggatctcatccaaaatcatcttcatggaggacggttctattgtcgaacaagggtcccctgaacaactgttcgaccatcccgagcaacaacgcaccaaggaattcctcagacgctaccgtggtgaggactgaataatgaatacgtactttaatctatccgcattctttaatgcctttcccattctgctggcacgattgccatacaccttaggcatcgttctagcgtcggtcttgattggcatgttcatcggtacattactcacgtgtctaggccggatccacaatcgcatggccaaaacgttgattacggcatatgtgtggctgatgcgcggtacaccattactgttgcttctgttcatttcctattacggcttgccgatgttgctttccgcctctggtgtcgacatcaattcaagtgacccgctaatcttcgcattgatcgccttttctctaagcctatccgctttcttcgaagagacgctgcgtgctggattcgatgccatcgacaacggccagctgcaggcggcccagtccctttcgctaccgaaactgacatactatcgacgaatcatcatcccccaggcattgattaacagcctccctaatttcgccagtcttctaatcaccgccatcaaacagtcctcaattttgttcaccatcggcatcatggacatatatgagaaagccatcactttgtccgcagaagattttggcctgtggcagttagagatattcctcgcactcatgctgatttattggattctcgctgtgatcattgacaaagcgaccacactgatttactccgtctctctgaaaaaggtggcctgacatgacatttgatatgcagtacgccctcgaacattttaccgatatccttcaggccgcacccgttgcaatctgggtcaccgttttttcagcattcctgggattgctcggtggcgccatcttctgcacaatccggctcaatagcattcccctgctaagtacaatcatcggcctgcttgtatcactgattcgctctacgcccattcttgtacagctctatgtagtttgttatggaatgccccgcatcacggccttgttccatcacgatcccaaactggctgcaaatgtaaacatctacccgaataccgttgcaatcgtaacgttctcgctttacgccagcgtgtatttctgtgaaattttcaggggagcatattacacggtagatgaaggccagcgcgaggcaatcaggtcactgaatctaccaccactacatgcgttactgcgaattgtcgcgccccaagcagctatcaacgcagtacctaatctgtccaattcgatgatagatatgctgaagaatacctctttgctgtataccatctcggtgatggatatcatggcacgagccacgataatcggttcggagagcttcagatttatcgaaatatacacggatgcattcatcgtgtatgtaggaatagcgattgtgctattcgcattgtttgctctacttgaacacacgttgaagaaaatggtccccattgcggcatagccagcgcgcaatgatccgaagtagcaggttgcaaagccgtcttccatccgaggtcacttgccatcccacgaaaaaccactcgaaccacacaccctgcagtatgagaattccttaactaccgctgacgcctcctcgacagctactctcccaagggatagccaccacacatagcaccttgtcgtccaacccaccttgcgtagcttgcaatcgacggatgacgtttttttgtggttctctcagtcatccagcactttgatgggatagccagcacattagaatcagccaattgcggtccgtccttcgcatcgcaggcatcggcacgattcacgatcggcaggacctaactcatcacagactgcattatcatccgaatagcaaaaatcccgaggagccatgctcaactcgggattataaagagtaaacgcggcgacgcgctactctcccacactcttccgagtgcagtaccatcgccgtactaggccttagcttccgggttcggaatgggaccgggcgtttcacctaggctctgatcgccgcaagaagaaagaatacgcgaatcaagtctgattgccaaatcacggcgtgtcgcgcaccacgagacactccacaggcaacaagccgtggcagaataaaatccttcaagacgacttcaatcactcacgtcaatcctttgacacgccgaaatcagaaaacgttttccgttgaaaggaaaaacgtgctatcgttctagtcagttcaacaacagcccgttgaaccgaaaaaatagtcaggcaatggaggcttgcatatgagcgttcgcgaacacatcaccggagtcggtcacgtcggtattcccaccaatgatctcgaaggcaccatcgcgtactacgagaagctcggcttcgaatgtgaaggcatttacccgaacggcgaagaccgctgcacgttcctgcatctgaacaatctcacactggaggtgtggaccatggatcagccggcgaacgcgaccggcgcgatcaatcatttcgcacttgacgtcaccgacatcgacaaggcgttcgaggaagccgagaagctggggctgaacttcgtggaaggttcggtgcaacatatcgatacattccacgagaacggcatccgctacttcaacgtgctcggcccgaaccacgagaccatcgaattctgccaagtgctataagacattccggccgccacggcggccggaacacataccacccataaaccgaccgatcaatacataaccatcatcgaaatccttcgatgcgcgtcaaacgcaatgcgcatcgatctcgttggcctaagcaaacgcgaattgcgggttacggcgacaaatccaccgacatgtggcacgcacggtaccacacgcaaggcggaacaagcgtatgcaacaacgtagccgtaacgttcagggccaacccaagctttaccaccgttacggttgcacatcacagaagaagaaggcaaccatgacacggccaatcgatgcacaaacgatcgacgccaccagccccaccagccccaacgcctccgcagaacctgcttccgacggcgcacagccgaaaaaacaacgttggattgaattccccgacggctatctcaaccgtacgccggtgctgcagttcgccatgacctcggtactgttcgccatctgggcgatcgcttcgagcctgaacgacattctcatcacccagttcaaagccgtgttctccttgagcgatctcgccaccgccttcgtgcaaagcgcgttttacggcggctacttcctcatcgccattccggcgtcgctgttcatcaagaaattcagctacaaacttggcatcatcgcgggcctgagcttcttcgcgataggttgcttcatcttcttccccgcctcacgcctggtcacttacgaagtgttcctattcgccatcttcgtggaggcaatcggcctgagcttcctcgaaacctccgccgacacgtatgccacgctgatgggcccgaaacgactcggcaccgtgcgtctgaacatcgcacagaccatgaacgcacttggcctgatcaccggcatcctgctcggcaaatacctcgtgttccaagactccaacctgcatgcggcgatggcgaagatggctccggacgaggccaaggcgtatggcgccgaacaactcgcccgcacactggagccctacaagtatctgctgatcgtgctggctgtgctgatcgtgctgttcgccctcaccaagttcccgaagtgccgtccggccgccaaccctcacgccccagccaccgagaacaaggtcaagctgagcgaaaccctgcgttatctgttccacaaccatcgcttccttaagggcatcggcgtgcagttcatctacatcggcgcacagaccggcatctggtccttcaccatccgccttgcgctcaatcagggcggcagctcgatgaccgaccgcaaggccgccgatttcatgatcttcagctacgtggtcttcttcgtaggccgtctgcttgccagctatctgctctcccgctcccgtgagacccgcgtactcgctacgttcatggcgcttggctgcgtgtcactgctatgcgtcgcgttcctgccgggcatgggcgccgtgtgggccgccgtggccgtaagcctgttcctgggaccgggatggccgaccatctacgcccgcaccctgtccaccgtcgaggaccgccgccacaccgaaaccgccggcgcgatcatcgtgatggcactggtcggcggcgccgtgctgccgaccctgcaaggcgccctgtccgatgcggtcaccatgcagttctccttcatcttgccggccatcgagttgctgatcgtcgccctctacttcgtctccgaattcaagcgcgacaagtacacgccacaacaactcgccgtcatggccgccactgcgcagcaaggggccaagtaagtcccacgaccgcaggcacattgcggcatttgagcggcgcgttcaggatatcgtcccgaacgcgccgccgccatcattcggcgacgttcatgagatagagttactggcaacgaacgcccatatgtcccgaacgccattcgaacgcaagaaggccggcaatgatgatcgcttcctgcggctcggttaccgcactcactctcggcttgccgaatgccaccgccattcccgccgaaaaagcgaatcttccgaaaggactgttcgccgcgaaagtgccgatttccgccaagacgaagcaacgcttggtcaacgacatcgaagcgattacgatgattgcgctgttgcgcacctcgaacacctcgcttgcacagggctcacgcattccggaaatactggtaatcggtctgcgactgcacggcagaaacgccacgattccgtcggaaatcgtcgaactgattgcagcgcaacgcaagtcgggcatcgtattcgtctgcgtgcacgacgccgatttcgagggtacgacgcggcaggaatgcgcatttgccatccgtcgcgcactgccaggtcgcgccgggcatacgccgacattcaatgtgttttcttcggcatgggctccggccggagaggcaatgctattaatcgacgacccgtcagtcgattcggtggatgcgctgtgggagtcgttgtgttcgcaggtgatcttcgaatcctccgaccctacgaatctggacgcacgcattgtgcgccacactcaggtcgtgcagttgcaggccgatatcgacaagctcacgcgcgaccatcagcgcgccaaaaaccccgagcaacgcaatgagatcttcgccaagcttcataaggccaagaagcagctcgaggcactgaacgcaccactggtgctctgaggtcagaatcccaatctcgtgcgtccgaactggtcgagccagcgcagaatcgcaccttcacgcagggcccatgggcagatttcgatctcctcgacgtcaagcgcgcgcatgatctcatcaatcaccaggccaccgccgacaatctgatatgtgcgctccggcgtgacgcccggcaatgccacacgctgatcaggtgaaatcgaggcaaggcgaggcagccaatcctcaagctgagcccgggtcatcaccgatgtgtccacacgaccaggctgacgtagcacggcaccagccaagcgagccaatgagcgaatcgtcttggacgtgccgaccgcgtgcatcggatgcttcgatttagggaacgcctcgaccatcggatcgaggatcctgcgaatctgcttgcgggccttttcaagctcctacgcatcggcgacgccgttttccggcaggaattcgcgggtaacgcggccggcgccagcaggtacgctcagtgccacggtcgggtcttcatcggaacccatggccacttcgagcgatccgccaccgatgtccagaacgagcaggcgtccggcatcccatccataccagcgacgagcggcaaggaaggtaagccgtgcctcatcgacgccggacagcacggtgaccggctggccgatagtctcctcgatgcggcgcagaatcttgccgccgttaggcgcttcgcgcaatgcggaggtggcaagcacgagcagctgggtgatttcatactcttcggcaagcttcatcgccttttgcacggcctcgagcacggcttcgacgccggcctttctgatagtgccatcttccttgaggtattgcatcaggcggacagtgctcttcacactcgcctccggctcgggccgggctcccggggccgcatcaacgataagcatgtgcaccgtattcgaaccgatatcgagcacgccgagtcgtgtagcgtgcgagcgtaaattcaccatgcctccatagcatagcaacttaagcgattaagttcatgtgcgacatgccctcgcgattcttccactgcgcaacggcctctcatatgccaaacggaaagccgtttgccctccagcattcaatccgaagcaccgggcacatacacgacggaaacctcatcaatcagacaagtacgctaccggcacgcagcccggccacaaaatcgccgagacgcttcaagccctcgcgcaaagcctcgcgggaggccgcatacgacagacgcacatgcgtatcggccgtagcctcaccgaagtcacgtcccggagtcaacgcgatatgcgcctccttcagagcacgttcgcagaacgtccacgcatccagacccgtatcggaaatgttgaaatacgcatagaacgcaccattcggctcgacctccaacggcaaaccgatttcagccagaccgtcaaccacgatgcgccgacgctccagcagctcctgacggcgttcctcacacacagccaacgtttccggcgtaaagcacgcgagcgccgcatgctgggtgggcgtatgcgcgcataggaaaaaattggtggcaaggtcatccatggcttcaagcgcatattcaggcacaaccatccatcccaaacgccagccggtcatgccgaagaacttggagaagctcgagcagacaatggcatccggatcgcatgccagcacggatttcacatcggaaccgtcaggttcacgatcggccagatccaagtaggtttcgtcgacgatacgccatgcaccacgttcacgagccagctcgcacacggccttcaacgtgtcgaaggcgatggtggtaccggtcggattcgatggtgaggtgatcatcacggctttggtgcgttccgaccagtattccctgcatgattccggcgtcagatggaatcgagtggccgcactggtcggcacatccacgactttgccgccgaacgcgcgcaccagttcgcgattgcacggataggacgggtccgcaatcaacacctcgtcaccctcattcaccgtcagcgcagcggacagcagcagtgccgtggatccgcctgcggtgatcgcaatacgtttcggatcgacgtcgacgtggtgacgctccctgtagaagtcggaaatcgcctgacgcagttccggcagacccatcgcggcggtgtatggcagcgggcggccatcgtactgttcacgcatcgcatcgcgcaccgcaggtggggcgccgaaatccggttcgcccagactcagcttgaccacgtcggtgccggccgcgatcatctcatcggccattgcgccgaaaaccatggcgcggaacggattggctatttgcgcacggtgcgatatccgcggtaacgaggcagcggtaacaacggttcgtgcgatatcttcagcgtttcccatatcttggttctaacggcgagacgcgacaagccgaccctttttcgcggtagtcgcccacataatgcgcaggaattcctcaaacatcggggctgcctggcctaccgttcccgacggtatcatcccctacggcatcatccccgacggcatcgttaacgtcgccggcatcggccatgatctcgcgatatagccgttcgagtcgctcctcacgcaccttcttgccgagctcgcattcccatacgacaatcacccgccaacccatcgcctcaagttcggcatgctgcttggcgtcgcgatcacggttgcgcagcagtttcgcgctccagaactccacgttcgacttcggcatggcatgcttcgtacaattttcatgcatatgccagaagcatccgttgacgaacacgacggtatggtacttcggcaacaccacgtcagggtgccctggatagcgcttgtcgttcttgcggaatcgcaggcccttggcgaacaggaaactacgcacgagcgtttcgatcgacgtgtccttgccccgaatatgcgacatgatgtagcttcgggtgccacgttcgtacttttcgactctttttcccgccacggccccattatggcaaaagacccaggatcattcggcgtaatctggtgcatagcaacgcaatctggcaaatcagacgggttcaaggaggactcttatggcacaagtgaacgtggctattctcggcgcaggccgaattgcgcagagcatggccgatacgttggtgaagatggcggctgatccgcgttatacggatctggtctcgccgtatgcggtcgcggcacgcgacggcgagcgtgcagccacctttgccgcacagtacggcttccctgtttcgtatggctcgtatgaggagcttgccgccgatccgaatgtgaatctggtctatatcgcgaccccgcataacctgcatgccgaacaggccatattgtgcatgagggcgggtaagggagtactggtcgagaaggcgtttggcgcgaatgcagcccagacccgcgcaatgctcgatgcatcgcgtgagaccggcatgctgtgcgccgaggcaatctggacgcgctatatgccctcacgtacaatgatcgacgacattctcgcctccggcaccatcggcgaagtgacggccatcaacgccaatctgtgctaccccaccacggcgaagacgcgcatcaccgatccggccttggccggcggcgcattattggatgttggcgtatatccgatcaacttcatcgacatgatcatgcacaatgcgccgattgcgcgcgtggagtcgtcgatgcgaccgtatgagaccggcgtggatgcccataattccatgacattctattacgagaatggcgtaatggccacggcgcaaagctccattctgtgccattcggaccgtatgggtgccatctggggcacggacggctatctgacctgcgagaacatcaacaacgtcgcctcaatcgacgtgcatgacggcaatcatcagatcaaggcccactatgatgttccgccacagctaacgggctacgagtacgaggttgcagcctccgcacaggccatgcttgatggtcgccgcgaatgcgaggccatgccccacgccgacaccctacgcatcatggaactcatggattcactacgtgccgactggggcctgacgtatccattcgaagcttagcaataccccctaaaacactatctcgccgccgcgtgagcactttgcctcatatgagaagcaacccgtaagcaggcattgacgaaaagtgccgattttccgcgcttttcatttttcccaaaacgcaggcatcgcaactcttgctcacacagcggcgagatagtattttagggggtatgtggtcatcacgacaacaggcggctaccgtttgccgttaccttcaatagcggccatgacagccagaatgcatgtcaccgaatacgcccgggcatgccccgaatgattcggaagacgcggcctctcctggtttttgcactgaatatgatgagccgccgcacatgtcggtacgcatattctttcctccccgttgtatcctggtcctgatttcctctgacgaagatgagagagagcatgaccgaagcaacaccagccaagcaacaaccacgcaacatcatcaacgttgtaggcgcagccatcgtccgcaacggtaaggtgctgtgcgctcaacgtggcgaaggcaagtcgctggccggtttctgggaattccccggaggcaagatcgaaccgcacgaaaccgcgcgcgaggcattgcatcgtgagatcgaagaggagttgctgtgcgaggtcgaggttgcagatgaagtgtgcacatcctcctacgattacgacttcggcaccgttgtgcttacctcgttcgtctgctatctgctgaacggcacccctcgactgacggaacaccatgaaatccgttggctttcgccagatgagatgctcacgttggattgggcgcccgccgaccgcgaagcggtgcaactgatctgtgcgatggatttcacaagaaagtgacggcagacgatgacggacgatggctggcagcagaattcttctctgatcgaatcgcttctttcgggtttcgtggaaaagaaagacgatgtcgatccacaatacgagccgatgctgatcgcgaaccatgatggcaggaccatggaatatgcgatcaaggatgaacttggccgcagtcagaatttcgacatgtccgttgccttcgtcagtcagggcgccttgcagacgctgaagcagaatttccttgattttgccgacagcaacgaccatcggtccggcagaatcatcacgtctaccttcaactactttaactccccgaaggctttcgccgaactactgaagctacagcaggaaacaggcatccaagtacggatctggcagcccggtcagaccgacgagaccgaaaacaccgccgatttcccatatcatccaaagggttatgtctttcaccattcggatgatgacgaaccgctctactccacatacatcggcagctccaatctcaccatcaacgcgctgaattccaatcgtgaatggaatctgagagtcgcaaccaccgataccagcggcctggccgaacagctcactgctgaaatcaactcccagatcagcgaatcgaagccactcaccgacgcatggctcaaactgtatgaggaggatttcaaaaggtacgcgccaccgcgccgaccaaatcgcaggcagacacaggatgcaggaaccatcacgccgaatgccatgcaagtcgaagcgttgatgaatcttgcgcaactgcgcaaacagggcgaaagccgagcaatcatcatttccgcgaccggcaccggcaaaacatacctatccgcatttgacgtccgtcaattcaagccaaaacgcatgttgtacattgcacagcaggaacaaatcctgaaaaaggccaaggaatcatatcagaaagtactcggttgccccgctaaggaactcggcctgttttccggcatcagcaaggaacacgatcgcaaatacctgttcgcgaccgtacagacgatgtcccgcccggaagtgcttgtgcagttcggcaaagacgatttcgattacattctgatcgatgaagtacaccatgcggcagctgactcgtacaaacgaatcatcgactacttcaccccggatttcatgctcggtatgaccgcaacgccggaacgtaccgacggagccaatatcttcgagctattcggcaacaacgtggcgtatgagatccgtttgcagcgggcgcttgaagagaacatgctctgcccgtttcattattacggggttcacgagtacattcaggaagccccgaacggcagattgctcggcaagcagatcaaggcgagcgactggactgagcaggaacgcaacgatctgtctcattggctcgaggagctcaccagcccaagccgcgtgcgctatatcatcgacaaaatccagttgtacggcgaagccggcaccgacgtgcaaggtctggtcttctgcagtcggcgcgaagaggcgaagcgcctgtccgctttgttcaatcagcagatcaaccaacaggcggaacgtccgtatcgcacaaaggcgattaccggcgaacatccccaagcggagcgtgatcttgccgttgaacaactggagaatggcgagctggattacattttcacggtcgacctgttcaatgaaggtgtggatattccgcatatcaaccagattgtgatgctccggcagacccagtcgagcatcatcttcacgcaacagcttggacgcggactgcgtaaggcaagcggcaaggattcggttgtcgtcattgatttcatcggcaattatgcgaataactatctgattccgatcgcactgtatggcaataccggcgatcgcgacgtcgcccgtaagaacctgcagcgcgagacgatcggcatttcttcgatcagtttcgacaagatcgcccgcgagcgcgtgctggcttcgctcgataccgccgacttgtcgaatatgcagttgctcagccgtcaataccagcagatgcggtatgagctgggtcgcattccgatgctcatggatatcgcacgacgtgacgcttcgctggtatacaccatggctgcaaagaatgatgattacctatcgtttgtacgttctcgcgaaaagagcctttctcgcggcaggcatgcgactgcttcgtatctggaacaacttgagccgacttccgaggtgcacaatggcatgttgaagatgctgaccgccacgcaacttcgtggattgcgacctcacgagctgctgattttggcggtactgtgcggattggattggaatgcgattgatcccgaatgcagcgagcggtcgtctacagcgtttcattccgccaagactttggattcgttgggcattgccgatctccagaagctactgcccgagctttttcctggcgccgataatagcgaactgcagtggcggtccgcattggcaacacttgactactcatatttcattgccgcgaacagccagcgttttgggaagactccgttcattaccgtcgacaatggcgagcgttgcagactctctgatgtatttgttgaacaactggacaatccgacattcaacctgttctttgaggacaccgtcaaagccggtctgtgtaacgcactgactctggaacggaacgcggtgaagcatcgaatcgtgcaaaatcatggatttatctatggcgagaaatacagcgtcttcgatgtgatgcggctgtgtggctggcaagccgagcaggtgccgcagaacgtcggcggctacaagcttgactctctcaccaatacgttgccgatcttcatcaagtacgaggcgagtcaatatggtgatcgttttcttgactccggtgaaatcgaatggttcagcaaaaacaaccggtcgttgaaatccaacgaattccggtggctgcttgatggaaccgaacgccctctgacatggcaggatcgccactttgtgccgatcttcatccggcgcaaggcagaggaaaaagagacttcatactactttgtcggcaatgcggcgtcattgcatgatgtacgcgaatccgtcaatgtcggtgaggatggcaaggaatccaaggtagtcatctccacgctcaaactcatgaagcccgtcgacccggagctttaccgccaccttaccggcaaatccgcactgtgactgttgggctcacgagcatggacgggccgcaacaccatggacacgcggcccaaacttttactcattcatgtgtttcgagaagatgctcccgcaggaatggcaccgcagagtcgacctcgccgcgtctggtcccctgagtcacatagcgtcgaacaagacgttcgcgaattcacctgatatgagccttcattcacgaggccagcgatacgccgtatcatctcagccagacctgaaatgttcgtttgaacagaaatataacacatcatcgcagaagaaaaagaacacgctcaatgttaacttttctcatattattttatctgctatcaatcattggaatcacaacgtttttccacttatacaaaccacaaaagggtgaattacagcgttttcttacttactggagcatgctatggttgttctcggaagcattgagcaaccactatcaccacacacgcaaaccgagtttcaatgttcattttgcatacgaaaagaacattaaaacgcacatatcatatgtacacaaaagtacaaatccacgaaaggaacatcatcatggcagacgagaaaaccatcatcaatgtggatctcagcatgttcggacaggatgccgacgccaaaaccgccgcagccaacaaggtcgccaaggagctcggcatcagcgacgaggccctcgctcaggtcgaggatttcaagcgcgccctcaccgcccataatgcttgggatctaccgttcatgggctatgtgaacgaagatggttacggctatgcctacgtgccggatgcggccatcaccatgaatccgtattgggacgctcacaaggaattcatgaacctgccgtatgacgtacagaccgcattcgctatccgcatgctgttcacgcatcgtcctgtcgaccgttacggcgccgacatgttcctgcactatcatcgcggctttgaagtcaatttcgtcggatcaggcgccaacaagtactgagattcgtcgctcgttgcgccaacgcaacgtaacggcggaagaatctcatcacggaacggctgagattgttttcacacggtgtttcacgcttgacctcccgtgtatttccctagtgttgcaccgtctcatgatgtagcctgtacagtgcattgcctggtctattacgggaaaggcgggcgcatgagcaacgcacacggcagaatcaaccgtcggcaggaggtcgatgatctcatcgattacgtcaacaatggttggttgcgaacaggggaattcgatggtccgacgttcctgtggaatcatctgatccgtgaagcgtcccaaaaggacgccgaaaatcgcaacaatgtacctgtggcgcagctttccgatgccgataacgtaatcagcatgcccatgcaatggtatttcgattccatcgccgccatcgtgcccaccgccgaacgcaccgacaccggcgtagagatgcctcgcatggacatgccgacctttcacctcgattcacaggccctttccggcgtggatgccgtagtcggtaacgccgtggtgagtacgcgctggcttgacgcgatcggtaacctcgccaaggccgtagagatgacggcccgttttgtaggcaacgtcgccgaccgtgacaacgaaggattcgattatctgaaagatctcatccaaaacgtgcgcgtatatatggatgccgtggcctgcaacgccgatcctatgaccggagagcagtcgctacgtatgattacgcaggtcgcatgcaatgatgacttccgactcaacgccatgcaaatggtggagctgctctcctgcggcctgtcgttcgcgcaatgggacgatacacgcatgttcgcctacgatgcattgaacaaggcgatggccacgatgagtgaattcgctgcttccgcagcagacaccaccacggacgcggagtctcacaaaaccagcgattccaatgaatccacgcctttggcggaacttaagaccgacatagaccttttccaaatggattcctcgctttccgaggaggagttgaaggatcttgccatgcttgatccggcgctgctgacggagaaggaaatcgccgagactgcgcagaaccagtttgagcatgccgtgcaattcctccgtcatgatctgatgcgcatcagcggcgatgctgacgaggccgatcgcttcctgcgggacaaccacacttccgagccactcgccgatgcttatgcggctcgcctgattgccgcggaacgttggcaggatctgctgaatttcgcggatctggtacagcgagataagccgaaccagtgcacggtcatgttccctgaagaggttgtgccctatgagtgggagacgattcgcgaagcagcatatgaagcacttggacgccgcgatgaattgatcgccatgtatcaggaacgtctggatgacacgtatgacccgaacacggccctaaaccacatgaaactcgaagcttggaagaacacgcccggtaggaatcagtgattccgaatagtttccagaaaatgcttaccctgctgaaagaaaagcagctttctctggccggtgctgttcaggacttcaccgatcccggcacaggcaaaagctacatgctattccccatccgcaggttgtgacagggaaagaatgaaagcacaacggttagattacaagaattatcagatgtaatgcgccttctagagaacaaaagaaagcatatacaaaaaaggcggggtcccaatgggtaccccgcctgaacgaatgtttgcggcggcgtgttactctcccacaccctgccgggtgcagtaccatcaccgtgccaggccttagcttccgggttcggaaagggaccgggcgtcacacctgggccatggccaccgcaaaaaccaccatcaacggcccggacccccaaaaaaacaggggaccccgaccggccaaaaggaaaaccacccacgcgccgccaccggcgcgtgccgtgacggtccgggaaccggacagcggacgcgaacaccgtttcgtgaccacaggaacaacgctccttgtcgccaacaatcccgcagcagcaaagacgcggacccacccccacacacaagggggaatgggctgctatgtcgccgtcgcccgttagtaccggtcggctccacccctcgcggggcttccacctccggcctatcaaacacgtgttccacatgcgggcttcaggaccccgaagggcccaaggaatcctaatctcggagcaggcttcccgcttagatgctttcagcggttatccctcccgaacgtagccaaccggccgtgccgctggcgcgacaaccggcataccagaggttcgtccacccaggtcctctcgtactatgggcaggcctccccaggattccaacgagcgcagaggatagagaccaaactgtctcacgacgttctgaacccagctcgcgtgccgctttaatcggcgaacagccgaacccttgggacctgctccagccccaggatgcgacgagccgacatcgaggtgccaaaccatcccgtcgatatggactcttgggaatgatcagcctgttatccccggggtaccttttatccgttgagcgatgccgcgcccgtgcgccggcaccggatcactatctccgactttcgtccctgctcggaccgccgtcctcgcagtcaagcccgcttgtgcgattgcactcgacacccgattgccaaccgggctgagcggacctttgagcgcctccgttactctttgggaggcaaccgccccagttaaactacccgccaggcactgtccctgaacgggatgaccgttcgaggtgagacgtcaaacgagaacagagcggtatttcaccttgcggctccgcgcgggctggcgcccgcgcctcgaagcctcccgcctatgctacacaatccgcgactgacgccaataccaaggtatagtaaaggtcccggggtcttttcgtccttctgcgcttaacgagcatctttactcgtactgcaatttcgccgagctcctggtcgagacagcggggaagtcgttacgccattcgtgcaggtcggaacttacccgacaaggaatttcgctaccttaggatggttatagttaccaccgccgtttaccggggcttgaattcaccgcttcacccccaagggggctgacggatcctcttaaccttccggcaccgggcaggcgtcagtgcatatacagcggcttacgccttcgcatgcacctgtgtttttggtaaacagtcgctaccccctggtctgtgccacccccacacgctcccggagcatgtccgttcacccgcgggggtctcccttatgccgaaggcacgggagcggtttgccgagttccttgaccaggattcgctcgatcgccttggtattctctacctgaccaccagtgtcggtttggggtacgggcggcaacgcgcctgacgccggggcttttctcgacggcctggaccaccggatatcgagccgaaacggctcccatcatcgcacctcgccatacacgccgcacggatttgcctatgcgactggctgcgtgcttgaccacggaaaaccacctccgcggccggctcccattccgtgtcacccctgcgctcacctaccacggctacgctcccaacgccacgcgccggaccccacccgaaggaggggaacggcccgcgacggaggttagtactcaccgcctcggtcctgtcggttcgctgccggtacgggaatatccacccgttcatccattcgactacgcctgtcggcctcgccttaggacccgactcacccggggacgacgaacgtggccccggaacccttggtcatccggcggacgggatcctcacccgtctctcgctactcatgtctgcattctcactcccgcaaagtccacggcacggtcacccggccgcttcgccccttgcaggacgctctcctacccggcgcgcatacacgcgccgccgcgtcttcggtggtgtgcttgagccccgctacattgtcggcgcgggaccactagaccagtgagctgttacgcactctttcaaggatggctgcttctgagccaacctcctggctgtctatgcggccccacatcctttcccacttagcacacgcttggggaccttggacgacggtctgggctgtctccctctcgacgacggagcttatcccccgccgactcactgccggcatacacatcaacggtattcggagttcggctgctgttggtaccccacaagggcccgcaagcatccggtagctctacccccgcgatgcaataagccgacgctgcacctaaatgcatttcggagagaaccagctatcacggaatttgattggcctttcacccctagccccaggtcatccccccggttttcaacccaggtgggttcggtcctccacgcggtcttacccgcgcttcaacctgcccagggctagatcatcccgcttcgggtccaggacacgcgactataaaaacgccctgttcggactcgccttcgctacggctgccccacgacgggttagcctcgccacgcatcactgactcgcagactcatttttcgataggcacgccgtcaccccgcaaggaggctccgacggatcgtaggcgcacggtttcaggaactctttcactcccctcccggggtgcttttcacctttccctcacggtactggtacgctatcggtcagacaggtatgcttagacttacaccacggtcggtgcggattcacgcgggattccacgaggcccgcgctacttgggacacgcgatcggaagacggcaagcgtccaggtacggggctggcaccctctgcggccaggccttcaagcctgttcccctggcaagccgttttatgactcccgcccggtccgtcggaaccgggacacgcgctccctcaacaccgcgcacgcaacccccgacgggtatcacgcgcacgcggtttggtctgatccgctttcgctcgccactactcacggagtatcccttcctgcaggtactgagatgtttcacttccctgcgtaccccccgcagaagcctgcggtgccggcccatgacggccggcgggttgccccattcggaaatcctcggatcgaagccatgctggaggctccccgaggcttatcgcatcctcaaacgtccttcgtcggtactgtctgccaaggcatccaccatgcgcccttgcgggcgacacagccaacggccgtgccatcccgcggctttcctgatagcaagattgccagacgacaaatcatcgcactgttcaaatgatcacaaaacgatcgatctcgaaaccaaactcaaaaagaagagtttggcgaaatcgcgataagcaaagggaaaacgaaaccgttctccctcgctcgcgtccactatccagttctcaaaccgccacgcgccacacgttccgccacgcgcccaacggacgccggccaccccgcatgggcatcgaaccgcaccacaatccaagactgtggggtggcggtccgggaacccaaaagcacacccataccacccccggacgggacaggcccatccaagccaacgatctcttccacaccagcatccccacacgggccgtggaaccgttccacgcgcatggggcacacaccggacacgaaccgcgtcctgaactctccgtagaaaggaggtgatccagccgcaccttccggtacggctaccttgttacgacttagtcccaatcacgagcctcaccttagacggctccatcccacagaagggttaggccaccggcttcgggtgctgcccactttcatgacttgacgggcggtgtgtacaaggcccgggaacgcattcaccgcggcgttgctgatccgcgattactagcgactccgccttcatggagtcgggttgcagactccaatccgaactgagaccggttttcagggatccgctccatgtcgccatgtcgcatcccgctgtaccggccattgtagcatgcgtgaagccctggacgtaaggggcatgatgatctgacgtcatccccaccttcctccgagttgaccccggcggtcccccgtgagttcccaccatgacgtgctggcaacacagggcgagggttgcgctcgttgcgggacttaacccaacatctcacgacacgagctgacgacgaccatgcaccacctgtgaacccgccccgaagggaggccgcatctctacggccgtcgggaacatgtcaagcccaggtaaggttcttcgcgttgcatcgaattaatccgcatgctccgccgcttgtgcgggcccccgtcaatttctttgagttttagccttgcggccgtactccccaggcgggatgcttaacgcgttagctccgacacggaacccgtggaacgggccccacatccagcatccaccgtttacggcgtggactaccagggtatctaatcctgttcgctccccacgctttcgctcctcagcgtcagtgacggcccagagacctgccttcgccattggtgttcttcccgatatctacacattccaccgttacaccgggaattccagtctcccctaccgcactccagcccgcccgtacccggcgcagacccaccgttaagcgatgggctttcacaccggacgcgacgaaccgcctacgagccctttacgcccaataattccggataacgcttgcaccctacgtattaccgcggctgctggcacgtagttagccggtgcttattcgaagggtacactcaccccgaagggcttgctcccgatcaaaagcggtttacaacccgaaggcctccatcccgcacgcggcgtcgctgcatcaggcttgcgcccattgtgcaatattccccactgctgcctcccgtaggagtctgggccgtatctcagtcccaatgtggccggtcgccctctcaggccggctacccgtcgaagccatggtgggccgttaccccgccatcaagctgataggacgcgaccccatcccataccgatggaacctttcccggaaggacatgcatccaaccggagcatccggcattaccacccgtttccaggagctattccggtgtatggggcaggtcggtcacgcattactcacccgttcgccactctcacccggaggcgaacccccgggatcccgttcgacttgcatgtgttaagcacgccgccagcgttcatcctgagccagaatcgaaccctccacaaaaaaccatgaagagaaccgaaaacgactctcacaagaaaattgacgatcgccttataaggaaaggcgcatcgcacgaaaaccccaccgtccttcaaggcctcccggccactcgccgaaacacggcgagccgacgatggactggcaatcattgactataaagaagtagtacagatacgctcttgagttctcaaaccaccaccgcaccagcagaccgccccgaaccatgggagccgggccgccgtgctgagcagcaagagataaacatacacgggaacccgcgcccgcgcaaccccgcaggcacggaaggacccggaaccgttgcaaacacacgcctcccccggcgtgtcgaaaaccaccttacatggccgatatcatcgtcgtagtcctatgaaacagcaatcgcattacacgaaatcgaatgttcatcggcgtgtcgtcactgcggtcgggcgctgcctacgaggaaagccacgcaggtgggcgcccgctctaccagcgacgtccgcaatgcttgccgccgaggcctgatctgccgtccgctccccaaggaccacgcccttcggcgcggagcatcgcgagatgacgcttcatcgcaaccagcatgatatgggcgtcttccagaccaaggtgacgttccgacttcgaggaatccaaggcgccctgacgtttagcgtaagattccaacgtattgtcgccatacggatgctcatcgtcgggaatcgagccgtcatcccaacggcggctcatcggcaacgtatcgatgatcgtaatgttgccggcacgatagctttccgcatatccggcgatattcagcatgaagaacccatgctcgaaacgggcgttgtgagccacatacggttgctgttccaaacgctggagcaatccaatctgagccgccggccactcgtcgaacaagcgaggccctccggcaaggtcacgaacgtcgatgcctgtaaggctgagaatcaggtcgttgccgacagcggcgttctcgggtgtgacgccgaaggaaaggcgggcctggccataggcgtccccggtcacataggaactttgctcataccggtattcggccggagcatccgagggacgtggcgacatcatgttcatgaattcgaacccgacgtcgatgatgtatgtacgggccggatcggtgcccgtggtttcgatgtcgacacccatcacgttgtcgacatcacaaccgggaaggtaggcgtcacgccagtcaggcttgcgataatcggcaagacgacggccctcctccgaccggcttgcctgaccggcggcgaacaccgaatcgtcatcgaacaatgtggaaccgccgggactggtcacaccgctcagattcgcacgcgacatggcatagcggccggaacgttcctgctcacgtgcagccttgcggcgagacgcacggccgttgacgatttcggcggtccgatcctggatatcgtccaaccggatgatggatgccgaagtttcgtcagatgccaatcgatcaccgttcgcggtatcggcgacggatacggcatccgcggcatccgcaggtcgtgcatacgggtgcaggaccggtacggtgactcgttcacggcgttcttgcgtaatggtccacaaacgcatctgcgcaccgatctcacgcaggatggcaatctcgtcacataggcgacgattcgcatacgcgagcgcgcgcggcaaacgataggaggcgatcaaacgatcgaaatccgtcatgaacgtcgtattgcattgcgcgaggatcgattcaagccggtcacgaatcgcaagatcgagtttcagcagatcatgcagttggcgtgcggacagcgatggagcgggccgtccggtcacggcagtcgtcgcggaggatcccgtctcggaggaacgccagtaccgcaacgccgcaatcgcatcaatatgctgcgtcgcggccgcaccgataccgcgctccatatcaagtgaagcgacccactgccagtcaatcaactgattgtcggcgttcttcggcatcatcgccgcccactgatcgatgtctttcttggcttcggacagccaggaaccgtccgtctgcactgcttcgttcatatctcgaatcgtagccgaatggcagacgatttttcccacccgccacaatacgaccaagatgccaagcacgaatggatcccccgcacctatcacccccgaattcggcggatggactcgtcatccagagcataaattttgatttccctatagcgaataatggcaaaaaccacaggaaacagagggcctgacagtttatttttacattatcggaacgcaaggaacgttccagatgatgaaaggaagtcgcaatgtcgataatgcattccaacatcaataccatcgcggcaggttatggttattctggtggcgccgattccgacagcgtggaagtcaacccactgttcgcccgtccgaaggaagccaaggccttctctaagttcaagattccgcaggaaggaagcctaccggagaccgcctatcaggtggtgcacgacgacgccatgcttgacggcaacgcacgcctgaacctcgcgaccttcgtaagcacctggatggacgattatgcgaaccgcctgtacatggaggcggccgacaagaacatgatcgacaaggacgagtacccgaagaccgccgaagtcgaatcccgctgctggcatatgctcgccgacctctggcatgcgccggacccgatgaataccatcggaacctccaccatcggctcctccgaggcatgcatgctgggcggcctggccttgaagcgccgctggaaggaagcacgagaaaaggccggcctgccgaccgatcgaccgaatctggtgatgagcagcgccgtgcaggtgtgctgggagaagttctgcaactacttcgacgtggaaccgcgttacgtgccgatctccgaagagcacaaggtgcttgacggctacgacctcgacaagtacgtcgacgagaacaccatcggcgtggtggccatcatgggcgtgacctacacgggcatgtacgagccggtcaagaagatctccgacgcgttggaccgcatcgaggaacgcaccggactcgatgtgcgcatccacgtggatgccgcttcgggcggtatgatcgcaccgttcatccagcccgaccttcagtgggacttccgcgtcaagcgcgtgtactccatcagtacctccggacacaagtacggtctggtctacccgggcctgggctgggtggtatggcgtgagaccgccgacctgccggaaagcctgatcttcaaggtgagctatctgggcggcgaaatgccgaccttcgcgctgaacttctcccgccccggcgctcaggtgctgttgcagtactacatgttcctgcgtttgggattcgaaggctaccgccgcgtgcagcaggccgcgcacgatgtggcgaagtacctgtcgggcgaaatcgccaagatggacgacttcactctatggaacgacggttccgatattccggtgttcgcttggatgctcaaagacaagccggatcgcaagtggaacctgtacgatctgcaggatcgtctgcgcatgaagggctggctggtgccggcctatccgatgccggtggatctgacgcaggtgaccgtgcagcgcatcgtggtgcgcaacggattcagccatgatatggccgaatcgttcctgaaggatctgaaggcctgtgtgaagtatctggatggcttgaaggcgccgatgccgagcgaggcacgggtctccggcttccatcactgagtctctaccaatcgccatcctccgtcgcgcccgcacgcgacaccgcgaagcctcatccgtgggaggtgaggcttcgcccaccttggcgaatgccctcggctggcgaaggatggagaggaaaccatgtttgttcctacaacgattatgtttatgaaagctggctgcaatgacagttcatgcaaagaaaccgcttgccgtgatagcgcacaatgcgagcacggcggcacattcaggattcgcgcgttccggagcgggcacggccgtgaggccggtcgagaaaccgtccaaatcgcctgccggtgcagacaatcatgcacatacgggcacacatgcacatgccggggcgagtagcaaagccctgatgtcggtcggtcagctggccatgctgaccgtggtggcagtggcctctctacgttctttgccggccatggccgattatggtctggcatccatactgctgtatctgattccggccgtgttcttcctggtgccggccgcactggtcgccgccgaactggctaccggatggaaaggcggtgtgtatgtgtgggtgcgcgaggcgttcggtaaccgtttcggctttcttgccatctggctgcagtggattcagaacgtggtgtggtatccaattcagatcgccttcatcgcggtgagcctttcgtatgtgttcggtgccggcaatctgggcaataacggcgtgtacattgccgcagtgatcatcgtgctgtattggatcagcacgatggtggctttgcgtggcggcaatctcttcgccaaggtcggctcgatctccggactgatcggcaccctgttcccggcgctgctgttgatcgtgttcggcgcgatctggctgggcatcggcgagccgatgcacacttccatgcacgcctccgctttgctgccgccatggaccggcatcgcatcgatcgtgctcatcgtctccaacgtgctggcttatgcgggcatggaagtcaacgccgtgcatgccaatgacatgaagaatccgggccatcagttcccgcgcgccatcgcactggccaccgcgttgattctgctcgtgttcattctgccgactctggccatcgccttcgccgtgccgcatcgtgagctcggtctgatcgatggcatcaatctggcgttcaaggagttcttcgaccacttcggcatgagctggggcaccccgatcatttcgctgctgatcgcattcggcgcgttcgcttccgtcgtgacatggatcgcaggaccctctcgcggccttctggccgccgcccgcaccggtttgatgccgccgatgctgcagaagcgcaacgcccatggtgttcaggaaggcattctgattccgcagggtgtgatcgtgactgtgctggcgttgctgttcgtgctgattccgaatggcaataccgccttcgcgacactggtcgatatggccaccgcactgtatctggtgatgtacatgctgatgttcgcctccgcgattcggctgcgcaagatccatcctgaagtcaggcgcacgtaccgtgtgccggctattcgtctgattgcgggcgtcggcttcatcgcctccgccgcggccttcgtgctgacgttcgtgcgtccggccggatttaccggtctgagcaccacggcctacgcgattctggtggctgtggttgtggtggtgcttggcatgccgccgctgattctgtatgcgatgcgcaagtcgaattgggatatgcgttcggacgcggagaagaacgcggacgcgaagggaatgctggtgaatccggaaggatagtccccgtaccaccttcttcttccaagaggaagaaactgaaccatgacaggcggctgctcccgttagaggcgcaaccgcctgttcgcataccgtttaaagatcgaagccgagttcggcggcggcttcggtcggcaccggatcctcacaccagaaatcctcaagattctcattggtggtcaggctccgaatctccgccttgtcgatgtacagctcgccgctgagatgatcggtctcatgctggaagatgcgtgccggccaaccatgcagatgctcctcatgcctgttgccatcctcatcctgccaccgtgcggtgatgtcaagccagcgcttgcgcacagcctgatacccgtcgaagctcaggcagccctcatagaagctgcgggtctgcgtaccaataggctcatagctgggattgatgatcacgtggaacgggaattccgccgcctcgcgcggatcgccgtcatcgccatcacgtacatgatcctccactacggccagggccaggcccaggccaatttgcgtggcggccaatccgacgcccggggcttcaagcatggtgacgtgcatggtgtcgataagcttgtcgagcgtcttgcgactcagctgcccctcataggctgcggtctgctggcgcagcaccggttcgccggcctgcacgatcggcaacagtttgtccttgccgccggatttgatgagtttctcgacctcgcggttgagctcgagattcacttttgcattacgtccaaacatgttttctccgttgttcttgttcccggcacgctccccccatctccctgtgccatgatgccatgccgcagcatggcatttccttcgtcagagatcgtcagagggtgaaacggggattgctacaatgcgagctcgtcagccacgaccttggcaaggcgttcgcacacctcgtcggcctgctgctgggtttcggcctcggccatgacgcgcacgagcggctcggtgccggacggacgcaacagcacgcgaccggtatctcccagcatcttctcttcgcgttcgacggctgcctgcaccttggcattggtatcggcggccagcttgtcgacattcggtacattgatcagctgttgcggcagttgcgggaagtctgcggcgagctccttgagactcttgccggactgcaccacctcattgcacagggtcagtgcggtcaaggtgccgtcgccggtggtggcgaattcgcgattgatgacatggccggactgctcgccaccaagcgaatagtcaccgcgcagcatctcttcaagcacgtaacggtcgccgacgttggtctgtacggtcttgatgcccatggaacgcagggcgagcttaagccccagattgctcatcacggtcaccaccaaggtgtcgtgattgagtttgccggcgttcttcttggcgcgggccagaatacccatgatctgatcgccgttgaccatgttgccatcctcatccacggccaggcaacggtcggcatcgccatcgaaggccacacccatggccgcatcggaagccttgaccatggcctgcagctgctccggatgggtggaaccggcgttcttgttgatgttatagccatccggtgaggcattgatcacaatcacatcggcacctgcgcgacgcagggcttcgggagcgaccacggacgtggcgccattggcgcagtcagccacgatcttcaggcccttaagcggcttcggctgggacttgtcaggaccgatcggggcgatggtggaaaccagatggtcgatgtacaggttggttgcggtggcggtgtcatggctcacacggcccacagcggcaccggtcggacgctcccaatcctgaccaagcacggcttcgatctcgtcttccttggtgtcgggcagcttgaaaccgccacgggcaaagaatttgatgccgttgtcgggcatcggattgtgtgaggcggagatcacggcacccatttcgacgttcagcacggaagtcagataggcgacgcccggagtcggaatgatgccggcgtcgatcacatcgaaaccgcccgcagacatgcccgccgacagtgctgcggcaagaaaatcgccggaaactcgcgtatcacggccaaccagcgcacggcgacggccttcgaactcgcctctgttgccgttatttcccagcacacgcactgcggcatcgcccaaatcgagcgccagttgtgcggtcaggtccctgtttgccaatcctcgaacgccgtcggttccgaacatacgtggcatgagtctcaagtcctcgctatctgaagttgcttttccttgcactatcgtactcacctcacgccaccacagcgcagatcgtgatgaaacgttacggagcacatacgaaagaaggtggattcccaaaggaaatccaccttctgtctcggctctcgtcagagggcggcgttgaagtcgcgcaccttcagtgtgcgatgggaggcctccacgttgccacgcacaatgcgcttgagcgcattgtcggcgtgctcatgggcgtcaagccacgcgtcaccgagttcgaccagcttggcggggtcggcataccccggatacaaaccttcgagcagggcctcggccatgtggaaggtcttgttctgccagatccagtcagccacctcaaaatacttctcggcatacggctcggccaagtcggcacgtggagtggcggcgaaaccgcccgccacggcctcgagctgcatgttggtcagcccattgttgttcagcgcttcgttccaagcccatgccttggcctctgcggtaccggccaccgctcgggcaccaagggcgaattcacggttctcggtggtttcgcgcttggcaagttccgcatcgatttcggcctggccgatttcgttcacggtgctcagagcgttgatgatggtccaacggaagttattgtcgatttcaaggccctcgagtaccacggaaccgtcaagcaaacccttggcattggccgcgaaagcctcatctgccggctcgccatagccaagataggcggtgatgagctggaactgctcgtcggaaccggcttcggccgcattggccagcttgaacagttcggctgccacatgttccacgaccgctgcacgatcggccggagcggtgtaatgccatgcggtggtgctgatctgggccagcgcatagcggaaggtggtggattcgtgctcggtggcgagcgcggccagcgaggtgtcgatgaactgcttggccggcagttcgccgtcacgcgtcatatcccagaaggccagccagatcacggaacgggccagcgcatcgtcgaaacgatacaggttctcggcggcgaatttcagggattggtcgtcgaagcgcagcttggtgtaggtcagatcgtcgtcgttcacgagaatcagcgccgggcgagtcttgcctgcagccgcctcgaccacggtggtctcgccgtcgacgtcgagctcgaactgatcggtgcgcacgatcttgccggttgccggatcctcattgtagaaaccgacggccagacggtgggcgcgcagcaccggatgttcggcgggagcggactgcctgagtacaagctgcctgatggtgccgtcctcattctcctgcacttcggtggcgatggtgttgatgccggattgttccagccactgggcgctccacgccttcagatcacggccggaagtgagctccagttcggcgagcaggtccgccagggttgcgttggcgtaggcatgcttgttcagatagttattgatgccctggaagaacttgtcgcggcctacatagaacacgagctgcttcaggacggaagcgcccttggcgtaggtgatgccgtcgaagttcacataggtatcgttgaggtcgttgatcggggcgacgatcggatgcgtggtgctcagctgatcttgacgcagcgcccagcttttctcaccggagctgaacgtggcccaggcatccttccattcggtggcttcggcggtggcgagcgtggaggtgaactcggcgaaggattcgttgagccacaggtcattccaccacttcatggtcacatagtcgccaaaccacatatgggcaagctcgtgcagcacggtcaccacgcgacgttcggcgtaagcatcggtcaccttggattcgaacacatactggtcacggatggtgaccatgccgatgttctccatggcgccggcattgtattccggcacgtagatctggtcgtacttggcgtacgggtatggcacgccccaggtcttggcatagaacgcgaagcccttcttggtgatgtcgaacagatagtcgacgtccttggcgaaggcatcggcaagggcctggcggcagtacatggccatcggcacggtgcgaccgtcttcgttggcgtattcggtgtgccattcggcgtacgggccggcgcagatggcggtcagataggaactcatggtcggggtcggctcgaacacccatcggcgggtggtttcggcctcatgatcgccgagcgtaccttcctccgtcacgatttcggtatcggtcacggaggccgccggcatattggaggtgacgatccaggacttggctgcaagcacggagaagtcgaacacggccttgaggtcaggctggtcgaatacggcgtagacacgacgggcgtccggcacttcgaactgggaataaagatagatgttgccatcggagggatcaacgctacgatgcaggccttcgccggtattggagtactggcacagagccttgacggtgacctcgttatgcgcttcaagattcttgagctcaatgcggtcgtcggcgaaggcggtcgtcggatcgagggtctcaccgttcagcacgatttcactcacttcgttggcgatgaggtcgaggaagctgttcgatcccggctttgcgtcgaaggtgatggtggtttcggatccgaaatccttggctccgtgggtcagatcaaggttgaccgtgtaatggatcggtgccgaaatggtatccttgcgttcttcggcttcgatacgggtgaggtttgctcctggcatgtcactccttgttgcttggttgtctgtacaacgtaggcggcgtaaccagttgttccggttacgccgccctaatcgttccaatggtcgttcaggctggtttcagcttacgcagacgttacgcctttggtgtcacttggccgcagttacgcccgcagcgtcatcgacgtcctgcgcgatgtcggccacgaccggcacgatcatcggcttgcgatgcagctgacgggccacccaactgccaagcgtgcggcgcatgagctgctgcagcttgtacgtatcgtgggtaccggtcatcatggcatcccgcaactgctcgacgatctggtgacgcaccttgtcgaattcgctttcatcctcggcaacggcgttgagatagatcttcggccccgcaatcacatcggcggtttcggtgtcgacgaccacgaagctggacacgaatccttcggtgccgagaatacgacgcttctcaagctcctcatccgtaagctcgccgacggaatcgccatccacatacacgtagccgcacggcacggaaccgacgaccgcggcctggccatggtacaggtcgacgacgtcgccatcttcagccagcacgacgttctgcggatcgacgccggtcttgacggcgatcatgccgttggccaccaagtgacggttctcaccgtgaatcggcatggcgcacttcggcttgacgatgttgtacatgtacagcagctcgccctcgttgcaatggccggagacgtgcacggccgcattatcgcggttgaccacacgcgcacccaattgcacgagcttgttgatgaccttgtagacctcgtgctcgttgcccgggatcagggagctggccagaatcaccgtgtcgaattcgttgatggtgatatcgcggtggttgccgtcggcgatacggcccagggcggccatcggctcgccttgggagccggtgcacatgtagacgagcttgtcgtcctgcacatcatgggactgcttcaggtcgatgacggtgtcttccggcagacgcaagtagcccaaatcggctgcgatggacatgttgcgcaccatggaacggccgacgaacacaaccttgcggccgtacttgtgagcggcgtcgacgacctgctgcacgcgatgcacgtggctggagaagctggccacgatgatcttgcgggtcgcctgcgcgaacgcctggtcaagggccggaccgatggaggtctccggcttgacgaagcccggcacctcggcgttggtggagtccatcatcagaaggtccacgcccttctcgccgagcttgccgaattccaccagatcggtgatgcgatggtcaagcggcagctggtcgagtttgatatcgccggtgtcgatcagggaaccggccggagtctgcacgaatacggccagagcgtccgggatggagtgggtcacgttcacgaattcaaggttgtatgggcccaccttgagcttgtcgcggcccttgacctcgacaagcgtcggattgatgtggtgctccttgcacttggcctccgcgaaggccagtgtgagcttggaaccgatcagtggaatgtccgggcgcagtttcagcaggtacggtacgccaccgatgtggtcctcatgaccgtgggtgagcaccagagcctcgaccttgtcgagacgatccttgatgtagtggaagtcaggcaggatcaggtccacgcccggctgctcctcttccggaaacagcacaccgcagtcgatgagcagcaggtggccattgtattcgaccacgttcatattgcggccgatctcacccaaaccgcccagcggcacgatgcgcatggagcccttgcggtactttggcggggcgatcagcacggaatcctgctgaggtgcggtggcctgcggtgccggacgggtggaacggcgattgcccgcggaacgggtgccagtgcctttgccgcggccggcgccgttggcattacgagtgcggccggaagacttgcgcgtggttgcgctctccttcttcgccgcggaatcagtgcgcttgacagccttgctgccgcgcttgtgcgttgtctttttcttggtttcttctgtagccatttcctagttggatttctgttactaattgttcccgcctatgcgggaacgaggaatgaaggggcccgcatctactgcggattggagcggaggtagcaggccgtaatcgcaatcatcgtcgttttacagcagaccggaggcgcgcatgcctgcctcggcacgtttgatttcagcctcacccggaccgacattcggcagacgcatggtggtgtcgtcaagaatgccgcgtaccttcagggaggccttggccatgacggcctggaagccgttgccgttcatggattcgaccagcggcgcgagttgcacggcaagacgctgcgcctcgtggatgtcaccacggtcgaaggcgttggcgaggtcacgcatcgggccggccgccgcgtgcgcgatcacggagatgatgccgaccgcacctacggaaaggaacggcaggaacaggccatcatcgccggaataccaggtcaggccggtttccatacgcttgcgcacggctcccgcgatgtcgccggtggcgtccttcaccgccttgacatggtcgagttcggccagtcgacggtaggtttccagctggatgtgcagaccggtgcggcctggcacatcgtagacgataatcggcttgtccgccgaatcgttgaccgccttgtaatgacggaacacgccctcctgagaaggacgggagtagtatggcgcgaccacgagcaccgcatcggcgcccgcctcctgcgtctgctccaccatgcgcacggtgtgtgcggtgtcgttggagccggcaccggagatgaccggcacgtccacgacgtccttgacggcctgaaccagctcgaccttctcctccatgtgagtggtcggtgattcgccggtggtgccgttgaccacaagaccatcggcaccgtcggccacgagctgcgtcgcaagcttgcgcgcggcctcgaaatcaacggagccatcggccttcatgggggtcaccatggccgggagaattcgcccgaaaggagcgggatcgagaagatgcatcgtaccgtcagtcatacgttccacggtacttcgcgccacggactcgaagggaagccgtacgcaaaaagcgtcacattccggaaaagacgtattcggatccatcgtaggcagcggcaacgttgacgcccgcaacacccctcttggtatcgcacgtgccaacatccccgacatccttcccggatcgaggccttccagcttgtgttgcagaccctatgagcgcttaagacccgatcgaacgcgaaacgccatctttggaagattgtccggcaatgacggcaacaacgcattggaggaacgccatgcacgcgaacaatccaagcgaaacctgacgaccgccggtaagctgcatcaatacgccgaataccagtggtcccagcgaagctatcagataaccgaatgattgcgcgatgcccgaaagcaccacggtttcggcaccgccctgtccacgcatggcgatcaacgcgagcgccacgaccagcgctgatccctgtgcgcagccgccgatgagcgaccagacaatcatggcttgcgggaacaccagcatgccgagacccgccaccagcatgggaatgctggaggtgagcgccgcacaaatctggttaccgcgcacattcatcagcttgggtatcagcagaccggaaagaataccaacgccttggaatatgaacaggtgcacgccggccgtggaggcgtcgaagccagcggatgcggaaacgctcggtatccaattggacatggtgtagaaagtggatgattgcagtcccatgaacacagtgacgtaccatgtcatcggacgtcgcagtacacaacggaatgtatcgtatcccgattcatgggaggtggttgctgcattggttcgcgtcacgttgggcacagtggtttgcatgatctggcgattatgcagtatgcgcaacgcccacaatgccgcgaccactagcggcggcacgctccaaacggcaagtgaggcacgccaatcgcaccacacctgcgcaagtggagcggaaatcaatcccgcagtggcggcacctacggtgatacagccggagtaaacgcctgtagccatcgcaatatgaccggcatagtcgcgttttacgatcaccggcaccagcacgttgcccacggcgattgaggaagcgaaaatcaccgttcccaaccagattccgacattgccacagtacgagcgaatgaaattgccgaccgcaatgcacagcagggccgacagaatcgccatatccacaccgacacggcgttcgatgaacgtaaccaacggactgaccgcggcaaaggcaagcagcggtatcgccgtcaggacgccctgcacgccttcgccccaggaaaggtcggcaccaatttgcgtaagcaacggaccgactgcggcgatggccggccgtagattcaacgacaccacgaagaccagtgccgcccacagtccagtggatggcacatcgtattccgcaatggcattctttgcattcatgaattctccgctccgttcttcgctttccggcttagcctatcaggagtggattccttttgtcggaatgtcatcggtgatgctcaagttcgccgcgatgcttgcaatgtccgttgtattctcatgcggattgtacttgccgatttcatgtgtttggccgttccgaacgttgcgatggcgcagctcggaacggccaaacacatgattgttgaaaaccgcggaatagatccttcgtgagcctgctcgaccgggcaagccgttaatccggatcgttaggcaatgtagcgggcggtatcctgatcaaacttgtcggcgcagcccggattgcagaaatagtaggtgatgccctcatgctcgcgggtcgcggcggcggtggccgggtcgatggtcatgccgcacaccggatccttcacggtggtcgcagtatcgccggaaccagcgttgccgtggccgcagtggcaggaatggccgccgcaggagccttcgttcttggccttatgatcactgaacagtcccatgatgtttcctttctgactgtgtttgctattgctcagattcggcttgcgaacctgataggtcttgggtttgcccgggtcgaacaagcgcaggcggctggcattcgacaccacgcatagcgaggagaacgccatggccgcgcccgcaatcatcgggctgagcatccggcctgtaaacggatacagtacgcccgcggccatggcgatgccaatgctgttataaccaagggcgaacccgagattctgtgcgatgttgcgcatagtggcgtgcgtcaggtcgatggcatgcacgaggcctataagcgaaccgttcatcaacgtcacgtcggcggattgaatggccacatcggtaccggtgccgatggcgaagcccacgtcggcacgggccagcgccggagcgtcgttgatgccgtcccccaccatcgcgaccgtatagccctgcccttgcagtcgggccacctcgtcggccttgttctccggatgcacgccggcaatcacacgggtcacgccaacctgaccagccacggcctgcgcagtggtctcgttgtcgccggtcagcatgacgacttcgatgccatgtgacttcagccgtgcgattgcctcggcggaatccggtttgacggtgtcggcaacggccacgattcccgcaagttcgccgtcgatggcagtcaataccggcgtcttgccgtggctcgacagacgttgcatatcagcgatgatgtcgtcaagattctcatcaccgacgcttggcataccgatctcaagtcggtcgatcaaatcggtattgcctaccgcgacggcgtgcgtttcgcgcacgtccgcattcggcaggaccacggaatcatcacgcttcgtcgaggccgcaagccagcgcgagctcaccgtgatgtcggcggtgacgccctgaccggcaatcgcatggaatgccgtgacttcaccgattggaatgccgcgtttttgcgctcccgcgacgatggccgcagcaagcggatgctccgaatcatgctcggcggcggcggtcagcgacagcagcccttccggatcgtcacgccatttgccgagcggcagcacatcagtgagtgatggcttgcccgcagtgatggtgccggtcttgtcaagcaccacggcattgatcttaccggtcgtttccaacgcttcggcggaacggatgagcacacccatctgcgcggcccgaccagtggaaaccgttacggaaagcggggtcgccaatcccaatgcgcacgggcatgcgacgagcagcacggaaacggcggcgaccaatgcatgcgtgacgcgcggttccgggccgaacgcgaaccacagcgcgcacgaccagatggcgatcagcacgacaatcggcacgaaaacacctgcgatgctgtcggccatgcgttgcaccggagccttcgaactctgcgcggatctgacgaacgccataatctgcgcaagcaccgtatccttaccgattttcgtggcacgataccgcaatgcgccggactcattgatggtggcgccgattacattgtcaccgatttttttggtgaccggcatggattcgccggtaatcatggattcgtcgacgcttgaggtgccagcggtgacgatgccatccaccggtagcttttcgccgggacgaatggcgatgatatcgccgacctgcacatcgtcaacgtcaatctgctcttccttgccgtcgcgtatcacccgagcggttttcggctgcagtccggccaaggcgcgcatcgcctcaccggtgccgacacgggccctcgcttcaagcaactggcctacaagcatcagggtgattaccacgccgaccgcttcgaaatacggttcgcgtgcgttttcgggcagaatctgcggcgcgaacgtgaccacgcaggaatacaggaacgcgaataccgtgccgagactgacgagtgcgttcatttccggcgaacgatgcgcaattgccgcgaatccgctgcggaaaatcggcagggccgcgtacccgacgatcggtagcatgaacatcaattgcaaccatgctggcatgcggtacagcatgagcatggtggagcagaataccggaatcgtgcagacggccgctacgacaagacggacgatcagcatcctgatttcgtgcgaccgcggcgaccgcggcgactgcgcaaggcggcatgagcctgattccctcacggcattggaaacggcatcggaagatgacggggcacgtgacgaggaaggtgccgacgtgaccggcggacggaaagattccgcggcgtcttcctgcgtggattccgcacgatgatgcctgccaggcagtaccttcaacgtgccatgcagcatgttcatgccacacgcgaaagggtactcccccggggtttgcggatgcaatgtcagcgcggtcgtacggaaggccggcaacgccagatccactccgaagtcggagaacacgacatgtgacgaacactcgccgtcctctttacggtcgaacaccaatttcagcggcatcccggcttcggcttcgatgatggcgggactgtagccgcccttgacctcgattacggcctcctgaacatcaccgtcgattttcgcacgatacgccttgcgcggcgcgaaaaagaaccatagcacaaccgcactcacgagcaatgccacaatgatggcgattacagcttgcatagtttctcaccgatttcctgttttttgacttttcgcttcaacgaataccaccaccatatacccctatagggtatatttgcaagagtgtagacttgagttttagctttgaggtcaagatttcagcgtcaagaggagtacggcaatgaacgttacgcaacacggctatgcggatgaccagaagaacatcatcgcccgcctcaatcgcatcgaaggtcaggtgcgcggcatcaaacaaatgacggaggacggcgagtactgcattgacatcctcacccagatctccgccgccaacagtgcattgaaatcagtggcactgctgctgctcgacgaccatctcaatcattgcgtcaagcaggccacgcaggaaggcggcgccgtttccgacgaaaagctcaccgaagtcagcgcggccatcaccagattggtcaaatcgtaatccttcacgtcctactcaatccaccgacggtgagaggccgctcaccgtcggcaggttgaggaacgttccaaactaccgacgctcacaaacactcaccgtcggcagtttgaggatatcgtcggtagattgggaccctgcttaatctaccgacgttgacgggcactcaccgtcggcaggttgaggaacgttccaaactgccgacggtgagcgggcgtcaccgtcggtggattgaggaagaggattggggaatgcccgcccgcagcagcttgttcacaagcggcactcgctcaatcacatcgtcataggtgaaccgtactatcagcgagactccggcgcgacgcaacgcttcctcacgttcacgctccatctgcaccacggtttggacgctcctacggcctgtcatctgcggatcgacatacttctgcgtaccgtcatactcgcctacggcaatccgaccgtccggcagtcgccatgcaaaatcggcacggtatcgacgccctgtttcaggatcgacgaaaatcgtctgcacaagcggaatggcaaaaccctcatcaatcatcactgcacggcacatcgattcgccgccgttctcgctcgcaccatcggcatatcgcagtacgcgcgccgcctgcgcatagccgatgcgcatagccgaacagccggcggacaaatcgcgacgtccgattccttgtctcagcgcggaatccgcaatgggaagcccatatggaaaatcgtattgcaccgagcaattcagcactgtacgtattttgtcaagaacaggcagcccgtcaaccacctccactgacatgcattgctccggaatatacacacggcgaaccttcgcgattctgcagaagccgttgtgataggcgctcgcgatggaaacggtgccgtcgtgcagtttccaggaatgttcgaaaccatgagccgccgcggcgatgtttccaacgaacacccacttcgggtgttgccttgccatcgcccgcgccatgtgcatggaacgttcgaacggatcaaggccgttccaatagtcggagggaacatacagaccgcgggcgggacgcaacagccctccgtcttcagagatccgcctgcgtaaggcggcattctctgactcaataggcgaaaacgcgcatcgtcgctccgccatagcctcttcgatgagacgattaactcgtgcatgattcttcatgaatcgactgtaaccggaatcggctttcaagcgaggcgttttcgggaaatgtggataagggtgcggaaaacccgcgtgtcagtagggattcatgcttgtagataaccgtcaccacatcaaccggccatgtcgtaaaccgcttagcgtcggcagattggaagaaatcgcaatctaccgacgctgactgcctctcagcatcggtagattgggttgagatacaatctgccgacgctgaaggactgtcagtgtcggcagattgaggaaggacccaaactaccgacacctacgagcgctcagtgtcggtagtttgggggatggactgtggcttggacttccgttggtgcatgggccgaaccgtatggactacaggtcgaaccgtgcggactacacatgggctacaggtcgagctgcgcgggctacaggccgaaccgtgcggactacacatgggctacagccgaaccacatggactacaccgtatggactacaggtcgaggaagtggtccaggcccacggtaaggccggaatagtcgccggtggcgattttacggacggcaagcagtacgcccggcatgaaggagatgcgatcgaagctgtctgcacggatggtcaactgctcaccggcattaccgaaaagcacctcctcatgggcgttgaggccgcgcagccgcacggcatgcacgtgaatgccgtcgacgacctgaccgcgagaaccaccatcggtttcggtattgtccggaacctcgccaagaccggccgcattacgggcatcggcgatggcatgagccgtgtggatggcggtaccggaaggggcatcaaccttgttcggatgatgcagttcgatgacttcggcggattcgaagtacggtgcggccaccttggcgaagtagtcggccagcactgcggaaatggcgaaattcggggcgatgaacacactctggttgtcgcgtggcgcctcggcaagcgcggcgcgcacctgatcaagtttctcgtcggtccagccggtggtgccgaccaccacatcgacgccctgcctgacaagtgcgagcacgttgttcagggatacgctcggtacggtgaattcaaccaccacatcggtgttctccggagtgattccgctcagatcgtcgccggcatcgaacgcgagggcgagctcggtgtcagctgcgccgttcacggcatcgaccacgtgagagcccatgcggcccttggccccgactacggaaaccttgatcatgtttgctccttactgttacaaagctgctgcggattccaaataatcccaagtatggattctacgtatgaatctaaagaaacgcttcgacccgaaccacgatatccggttcggacaggcgcaaggaccagtcatttcggcgcagatatggaaagggaacgggccgaaaccggtccgttcccaagagacaatccgcccgtcaaagagcctacgatcacccacgtttgcggacgatgaaccagccgagcagggcgaacggaatcgaacacagcacgaagatccacggcatcatcagactggtattcggcgtggcatggtcaagcacgatgccggtgatcatcgaaccgaacgaagcgcccacggtaccggcggtactcacccaggacaatccttcggtcagcgactcttcaggcacggtctccttcaccaccagattgccggaagcgaacaccggcgaaatcgtaaggcccgtcagcacctcgacgaatcccatcagcaccagattgccgagacaggcgtgaatcaccacgaatccgatggtcatcaacgcaaggaacatgatcatgtgacgccaacgtgaacctttgagttcgcgcgacccgaagaacagcgcaccgatgcaggagccgagcgccagcatggcgagctgcacgccgagcaccgaatcgagatgcagggccttcatcacggccgtcatggacgtatcgaatgcggtgaagctcatattgaacaccacgaacaccatcagcagcggaatcacgcccgcataggtgagcacattgcgcttcctgcgattatcggaggtcttgagctgcctcatgctcagcttgtcggaagcagttccggcaacagccacatcagcatcggtcgtattggcgaaacgcacgtcggcatcgtccgcatcggcggcggtcacattcaccatgcggatgaccggcggctgcgtatcgcgcaatgcgaagaacatcgtgccgccgattgcgctggcggcagtcggtacgaacagttgcgagaccggattcacggaagccgccaggaatgcggcgagaatcgggccgaaaatgaacacgatctcatcgatggcggattccagcgcatatgcggtgttgagcatctcgctgttatcggtgcgctccagcacgtacgcccagcgggtacgcacgagtgcaccgaaggcgaactgcgtcagacccatcacgacggccagtacgaacagcaacggaatcggtacgcgcaccaaagcggcgaatgcgaaggacaacatggccacaacctgcaccgcgagcacgaatttgccaactttgcgttggccgaagcggtcaaacaggcgcgcatagaacggcgtcacggccgcggtggcgaatacgtaggccgcgctcatcacgccagcgatggtccaattgtcgtacagatgattaagcgccagaatgatgcccaatcccatcatcgacatcggcagtcgagccaatgcgccggaggcgcagaacgccttggtcccgggaatggagaacagtaccgcatacggagacttcgcggatttcgcggattccatggctttgctcatagacccgccacctccccgcggtagatgaacatgtcgtcaaacagcggctccgctccgtcaacgctcgagactccggcattacgttcagcgatgcgttccagacctttatgatcgtagaaactcacatcgcagtcggaatcggtgtgcaggtaaaacgcgtccacgttccatgcggcgaaatgctcctgcatacggcgccacaggccgccgcccacgccttggccacgcacgtcgggattgacgacgaacaactccaactcgcctaacgtggtttcattggcgcgactgttcctctccaaagccagttccaatgaaaacgcgttgttcagcctctcaagacgtttcgcggcctcttcgtgagcaatgatgccgcgttcgatgcccgccatctcgtcggcgacgtcgatttcgtcaagctgcggctgttcgccggcgacacggatgaaggtgacgcccgccagcgtgccgtcgacggtaaaggcggcgttcgcgaacgtggtcggctgcagataatgcagtacgaaataccgggaaatcagcagggacgtttcagtaccggcaagttcgccgtcctgcggccatgtgcggtcgaacagttcgaccacggcatccatatcattccagccgatcggacgatagataatcgaattcgggttgtttccggccgatgtgccggtggtgttggttgcgtcgatcgcagccatgatgcaattgctccttaactttcgttgcgtccggcacgtgtgcccgcccacacatgctgcacgagggtagcggcgttcctccacaacgttgcctgcagtgcgttaccctgcaggcaggccatcacagcgcgccgcttcaacgttcggcgcatcggcactagtcgttgtcggattgctgcggaattccgtagctcaactcggcaaggatctctcgttctgttttgtcgagagccttaagctcccgatcgccctctttgggctcactcagatagtagaggcaggcgtcgatagaatccaacggcacgccttccatcgctgacagcagaacgcgatacatgtcgagctgtgcgagtttttcgtcgatttcgttacgtttgcgcggcctgtgtcctgttttccagtcgacgatggtgtaggtcttcgattggtcgttcggatcgatgccaccgaagaacaccgcgtcgagtttgccattgacgatggtgccgagttgcggtacgtcgacgacgagctgccgttccgcccatgcggggtttcgttcggcccacaccgattgcacaagacgatgccgccagtcgagcagcttgcgttcctgcgacgcattgccagattcgccggattgttcgatacgtacgattttcgcttcatcctgcgcaagaccgttgatgagatccgcacgggagacggcattgccgacgcctgcatcggattcggcatcggccatgacgaaccgttccgcccatgcgtgcaaacgcgtgccgagttgtgcggacggcgaagcgacgcgcggaatcggacggaccagaccacgccagtactcactggaggagcggtcatccatcacaccggcgcgagcctgcagggaggtgacgttctggcggccgcctgcgagaatcctctcgccgcggacacggacggccgcatcgaaatcagttgcgctatcgccggtgtcgggcatgagatgttcgtcaccgaccagcaggcgtgcgcgcaacagcagcgactcgtcgacaggcatcgtcatgtcatcggccgattggtcgccgtcatgtccgtcatacgcaccggatagggcctgcatggccgaacggacctgatcggccgatgcggcgaacgttgtggccagccgatcgctcagaccgcacggccacggcagattccgctgctcggcagccggctcaagcggcgcattccaagcgtcgccgaccaccgcatcctcatagtcgcgggcatgctcgcccacgaagtagccgtccggcaggggcgcaccgattgaggcgagcgtctccatgccgtcgatcatgtccgttgcaacagcggaatcggcaagattgccgggctcccgcgccaccgaaacgatgccgttcatcgaatcgcgtacttcgctccagaagttcgaagggcccctaactccctgcttcttgccttcgactaaacgggagtcacggctctcttcgctatgcacgctgaaggtaagcagcgcctcgtgccgggcgcgggtcaacgccacataggcgagccgccgttcgtcggcgtgcaatcggcggccgtattcctcgctttgcgtcagatacaggccggtcgggtccatgccttccatatcgtcgatctgcagagaacgtagggttccgaacacctcatcgtcaatggtctccgcatcgtccaggctggcgagcgcctcgatcgggtcgccgccgacgagtgcatcatgcgggaatcgaggcaggatgccggcgtccacacgcacgggaacgggcacggcggcgggattctgcagccaggtcttggcggtttcggcatattccggcggcgtccattcgccgttgttcagtccattgaggtgttcctcgtcgaccgtgacgttcagcgaatcgccttggctggacgggaatgtgccgtcggacatgcctaccacggctaccgcatcccattcgaggcctttcgactgatgcacggtcataagcatcacgtcaacgggcgtatcgggtgcggtggcattgtcatcggatgcgtcgcgcaaagaatccacccatgacacgaatgcgcgcagactgggcgtgccttgggccgcgatctcctgcatgtatgtgtcggcgaggctcatcacggcgtcaagcggcgacttggcaagcgtcacattggaggtgtcgttcgggtgttgcatgtgttcggcgagcagcatgtcgatgtcgaggttcagcgcgccgatggccgcgcgcaccacttccggcagcggatgaccgtacacgtgctgcacccggcgcagcatgtcggcggcgcgaagcacggctgccgctcccccggcgctgagtttgccgtcgatgagtttcgacaggtcgtcgcgcagcatgaggtcgatcagaaagacggcgttgggcacttggtcacgatattcgcgcacgatggcgcggatttcggtttcggatggcatcttggcctgcgctgcgccggtagcgctcgaatcgtccggttcgtccgtcttgccgggaatgatgccggccgcgataagcgcacgataccgatgtgccgtgttcacgttttccgcgatggcggcgagcgcttgcaaatccgccgctccgacgccgaatcgcggggtggcgagcagtcgcatcagcgatccgctgtcggtgtgatcgcagattacgtgcaacagggcgaagatatcctgtacttccggacgttccagcaacgccgcctggccgactaccagcgtggtcagtccggcctgtttcaatgcatcctcgtatttcggcatcgactgtttggagcggaacagcacggccacatgcgggcgattgtctttcacgccgccggccagtgcggcgtcggatggcgtgtgtagcgcgatcgcatgtttggcgaagcgcacgacggcgtcgatctcctgcccgaaagtggcgaagccgagcacgccaagcgtaccttcgggcgcggtatcgatgttggatagggccggtacgtccacttcgcgcatcaacgaactgcttaggcgccggacgggcaaccgtaacggtttggtgaggttattggccgcttcgagcaccatgcgggagttgcgtcgggtcacgctcaaggcaaacggcttgtcggtctcgctcatgccgaaatcgcgttgcagcatgcggaatgcgcccgggctggcgcctcgccatgcatagatcgattggaatgggtcgccgacggcgttgactgccgatcgacgtgccgaatcgacgtggaacagggatgccaatagcgcggcctgcgtggtggatgtgtcttggtattcgtcgagcagcacatgcgaataccgtttgcgataggtggcgccgattgacgggaatcgagtgaccagctggaacgcggcgatggtgaaatcgctgaattccgccatgttgcgagcccgtttctcggcattgtagtcggctacgaggtgcagcagcaggtcacgttgacgcgccgcatcggataactggctgaccttgtagacgcatagggcgtggcattgttcgcggtactggcgtttgcgcgcttcgaaatcctcgccggattcctttttctttctcttcagaggtttgggggccttaatatcagcgggaatctcttcgccctcaagtgccttggccacttgtgcgacgaatgcttcatcccaggcgcgcacacgctccacggcctcgtcgaagctggtacagtcgccgccgatcatggcgccggaaatggcattggacagtgcgaacaccctgccggcgatggtaccgaacgatgcgaggtcgccgtcgaatcgcatgatttcgtccatatgcttgtcgagcacggcataaatcagctgcatggcccccgcttcgctcagcggctgcgtattctggtcgaagccgacgagcaaaccgtattggcgcacgatggtctggaagaatgcgtcgtatgtggagatttccggcttgaggaacgcggcgccggccgatccagtccggccaccctgattgctcaccacggccgcagacacgcgggacagcagttcggaggcggccttgcgcgtgaaggtgagacccaggatcctttccggcgaaacgccctgttcgatcaggttgatgatgcgcctggtcatggtgtaggttttgccggatcccgcgcctgcgaccaccaccacatcggcgtatgagggggcctgaacgacggccgcctgttcaggactgtcggtgaatttcggcgtgccgctcatgccactctcctttcgaaaacggtgttctgttcgccggcacaggccgggcagactgatttgtttctgcatgacttcacgtgttccgacgccggccgtgcggtgattcttacggctcgacaggcggccgccgcatagaagacgcgagcgatcatggtcaacgaccacaccgccatcgtggagcgcagttccaggaactgccgccaatgctcgtcgctgaccgcttcggggcgttcagcaccgtcgagatcgtcgacgaacagtttgtcgaacgtggggaggcagaacctgggcacatacttgcccgcattcaggcttccgttggcgaacagcgcctgctgatgatatgcctcctcgccctgcgagatgccgcgtggggccggcgcggtggaacacatgacgtgaaacagggcgctctgcccgatattcggcatgagtgcaatggcctgtgcgccgcgcggtccttcttccggaaacgccaaccccaattggtagcatgcaagttgcagatcgctgaacatgtcttggccgctgagctgtttaccggtcttgtagtcgatcaggcgcacctgttcgccgccgccgctcagcacacgtcgttccagccggtcgatccgccccgacagacgtatcgtaagccgttcgctcatgccggtttccggccatcctccgacaagcagccccatcagagatatgagctctccgcgcccgatcggatcgacgccctcgatcgcgttgtacgcttcgagaacgtcatcgaatccgaagcgtgcggcgaactgcagttccggctccgcctccgtaagcttgccgacttcgaacttatcggcatttttggcggggtatccgctgcggttcgagttgacgaaatacgtggcgatgttacgtagcgcgtcgacggcccgctcgtccttaccgagtgcctcataacgttccttggggtcgggtatggcgttcagatcgccacgcaaccgttcgtattcggccatcatccactgcgtgatattctcgatgttctcctcgtcgttcaatgcagtgtggttttgcggcagatcaagtcccgcttcggtggccttctgcgccaccttgtggatgagcgagccgaaattcgtggccacgctacccatgcgcgggcccgcgaagcggttctcgagcatccagcacaccgggcaggcccacaggcggtccaccgcggacggcgacaacgtcaccacatcggaacgatgggaatcccggggttccgaatcatcagtctccggctgcttcgcgaacggccaatatgctggatcggcggccgcaatgccgcgcgaagccagcaacgccaacgcagcggccgcatccttcgccttggacgagccggccggttcgtccgccagcacgctgcgcgcagccgcgaccaagccacgcggatcggcatcgagcccattgaactcgccggtaccgccgaccaacgcataatcgcgatgttccggatcggcgtcgcgttcgcggtcaaagcgttccggcagatagccgtacagaaaatcggacggcacattgtcgtcattcaatacggcgctcagcaccgcgcgttcgtcggcgcgggtcaacgccacaagaaagctcttctgctcggaggcgagcaccgcggccaactgcgcatcctggcggcccgccgaagtgacgatgtcgtcgcgcagttcgccatgcagcatcacatccgccaggctctctccgccgaacaaggtgttgcggggagccagattcggccattggccctgttgcaaggccggcaggaacacaaggttccaatgccttccggccgcacccgccggcgtggtgagcgtcacggcctggtcgatcggtgcggtgtgcgccaacgaatcggcttcgatggtgagcgcacgcacctgttcgatgaacgcgccgatggtatgtgcggccaacacgccacccgattcgtcgcccgatgcgtagctgaacaggcgcatcgccgcgtccaaacggtcgttcgccgcacggcctgccgcggaattttccaacgatacgcgctgccagatccgtgccttgtcgcaggcagtccacgcgcaatcaagcacgtattgcggttcacgggagatgagcttacgttccgcttcgatggtcttgtcgagcactttccacaggctcgcaaatgctttggattgcgggtcggcgcccaatacggaggcgattgcgtcgagcacgcggtccgtattgccttccaatagcagcacatacagcgcatccacaccaaacggaagatcggacggatcgaccaagtccgcggaatcaagccgttcctccgacatcagactgtcgtctaccgcaatcgtcggtgtggccgaatccgccgaatcggacatccgtgtcaactgacgcgagttgcgcaaatcgacgacgtaatccttccaatcggcaatcaaacgcggcaacaacgcctgcttcgctacgtcggccctgtccgaatcgtccaattcaccggaatcatccgattccaataccgcggcaagcgagccgagcgcattcatcgccgattcgacggtcgccaatcgtgtggggcgcccctcatgctgtgcgtcgccgccgaccgtgatcagcggcgaattcatgatcagcgctacgcgagaacgaatatacgcgccggccgtacgaagccccatcttcgacgccgcaatcgtctgcttcttcagtccggccagttcgatcagtgcgaacaggccctgcacgaatggctcgtccttcagcgggcgggtcacgctcgaatagcgcacaggcacgccgtcggcccgcagtcgttcgccgaacgtacgcacagtgtcgttgtcgtgcgcgatcacagccatgtcgttccagtcgcgggaatgttgcagatgctcggttttgatcctccagaccacgtcatccagctcctcgacggcggagcggtacatggcggttccgatgctgccgtcatctggcgaaataccgtctacggagacacccgtcggcaccgtttcgataggtagtgagcctggcagcgccggcatcttgcccggacgactcggcagcgcctcatccgtcggttcggtactggcgatcgacaaactcacgcggcttgcggccagcgtacgatacgcgggcttacgttgttccgtttccgtgacgtcgatgcgttccagccgagcccccaatcgcgattgcgccgcgttgaacaggtattccggatacgatccgcggaacgtctgtacggattcgtccggattgccgacgagcagcagccacacgccgcgcccgcgcaaagctgcgagcatgtcgaatccggcaagcgtggcatcttggaaatcgtcgacgatcagtaacttcggcagatcttcgatctcggcctgcgtcacggtggcggctgcatcgaccatgagctgcgatgcgtcgagacggtattcgcccggataggccgcgcgaatcgcctcatcgtattcggcacgcaacgcaaaggcgagacgccattgggtacgcatgcgttcatgccgctcgttgagcgtgccatccttactggcggcacgtgcaatcagcccatcctcgagttcgggttttgcgccgatctcattcatgcgggcgagcatgtcacgcaactggttggcaaaggcgtcggtggaatcgtcgaccaccatgcccgaccagtcggccaccgcgaaatacgtgcgcagcaggtcgcagacggcacattcgtcaccacgattcgtatggtccacatgcgaggcgagcacgcgacggatgatcatgtcctgttcggcgccgttgagcagcttcggcaaaggcagacccgcacgcgagcgcacggccgtcacgatgcggaaggccacagccggcaatgtggtgaccggtcgggcctgcgaaatcgcggacagctcacgaatcacccggtcgcccaagtcatcggcgatctgccggcccgacaccgtcatcacggcctgcgtatcgccataccgcctcatcgcggcgatcagcgcacgtaacgcaaattcggttttgccgctgcggggcgctcccgcgaccaacgtcacatccgcaaggtcatccaaatccatcatgcctcccaagactactcgaccgattgcgtcctcactgtgcacccaccggacaaatcgtcagcatcacaacgcacgattcgcaatcactgcctttcaatcgaatcgtgcgttgataagcacctccatgacacccctagagctcatctgcattcggatttcatgaagtttattaagttaaggggtattgtctcaagcaaccacaatgcacgacccgaaaatagccgcccgattcggaatcgtgcgtcatatcaagtccccaatagccgcagcgcacttcaaataaccataatcgccaacatgcgaatcgtgcacatcgcattattgctaccagaccaaaccaagttcatcacaaatgtttttccataatacttttcattctaaaaagcaacaatgatatgattttgagcaccttcactccatcatgcatgatgacggataaggcaagcattgtcgctcaatcaaagtggagtcaaaccatgaacgaagaagttaatttttccacattagaaaatagccccaatcaaaacacagagaaacctttttctagaaatctattcgattacgctacctcagaactctctcaagatgcatttatctgctggatttgcgcacaattcgacagtaacgacgcagccgtacgcacggcctcccaaaacctgttgcatgcttttcttgaaagcaaggacaatgaccccgtcgaagtcaaggaaatttatcgacaaaaagaaaatattgatatactcctgctcctgcagcacgaggggcaagaattccctatcgtcgtggaagataagactagttcgcaatatcatgatgaccagctcaataagtatagaaccagcgccgcaggtatatatgatcgagaggaaaatgatattagagtcgtctatttcaaaactgagactgtccatgaagaacaagacattcgcgataaatgcgatatcgtgttaaatcgcaaggacattctcgaatgtcttaatacgacatccaaaaatccaatccttatggattacgttgatcgcctcaagcgtatctgtgcaagatatgaccaataccgctccttacctgtgaaggattggtcatatgatgggtggtgtggatttttcgaacatctgcaaaaaaggctcatcactaggggctattggacaggatacggatataacaacaatctcaagggcggacattggacactatggctcggtaattcaaaaaaaataggtgtaggcgcgtggcagtttatggtcaatatagaaaccccgaattcacatgttttcgatcaagacgaatgcctgctcaaagtcaccgtaaggctttgtaataacaaaggaaaacactcaaggaaagaattcgatctgcctgaaatcaacagacgaaaatatcgtcatgtctgtggagtgaacacaatcatgggagagttgatgcggatagaccgttctagcaaggagagctcttggaagtatgagggagtcgagaaagcaatatttgacgctatcgaccaatacgaaaaatggtgcgacgagaacctatacacaggaacggactgacacgttgaacaagttgtcttaccgtctagtgttctgctgttcccaagtgagttgcaatcagtttttccacatattatttgtcggcaatagatagcgaataagaagaaccatccgacggcgaccgaaatcatcacgatgagactcatctctcatgaagacttcgactaccgcaatgaggatgcaaggtaaaagtcgtcatcggatggaaatctttttttctcgtgaccggaacgatactcgaaattaaagactcatcgagtcaaccaaacattgccacggacgcgcagaccgttgaacatggcccggattccgatgaacaggagcgtgacggcggcccagagagcggccatgcggacggtatccggcacggcggaaccgttgcacagcacaccgatgccggcaagacacggcagatagatgcatgcggtaatgatgcaggtgacggcgaggtaacgataatcgcccgcaccgatcagaatgccgtcaatcgcccacatccaaccggaaagcggcagcgtcgcaccgacgacgaccatgccgaccgtaatcagcatccgcaccggctccgacgcggagaacagcggaggcgcgatcattcccagaacaatcaggcctacgccgatcacgattcccgcaacaagccctgcccggccggccgccttggtcatacgcaaggcctgttgcggccgtttcgcaccgatctccaccgccacaaggctctgcccggcaatgcctatggcatccagcatgttcaatacgaaattccacgtcgaattcacgacctgataggcggcaagcaccagcacacccatgcgtgccgccagcatcaccgtagccatcagacacgcacgtagggcaagcgtgcggacgaacaacatcaggccgtcgcccatactcgccttcatgcttcgcacgcgcggccgcagtgaagcgccctcctgatgagcccacagcagtgccggtccgatcagcacgaccgccatgaaccattgcgcgatcaacgtgccgacaccggagccgaatacgccccagccgcatccaaggatgagcgtcacatccagaatcgtattcaagacggcaccggcaatggccgccaccaaggtaatcgtcaccttcgccagaccgcggaagatgccgttcgccgcatataccagcagcatgcccggcaagccgaacaccaccgcacgcagataggcgaccgcatcatccaatgcgccgccattcgcacccatccacatgcatatcgggcgcgcaaacacgaacagcgccacggaaacaacgatgccgatggccagcgccaaccataatccgctgatgccggcctccaatccctcgcgccgtttgcccgcacccatcagtctcgccacgcgggatgtggtgccataggccagaaagacgcacagcccggccacggtaagcactatcgtcgagccgaccgataggcccgccaatgcgctatcgccgacatgtccgacgacggcggtgtcgataagcgcgaacgccggttcggcgatcagctgtccgaacgtaggaatcgccaatgcaagaatccgtcggttgaccgaccgttccggcggcgtaccggttatcttcacggcatccgaggccatgccgcccgcccgttcatcattggccatgccagactccccgcatcattgtgggctcgaccatttcagtcctctatggcatcgacgtagggacgcagtctcgacagtagatgccgggcgcttgtcgtggcggattcatacagcgcatacgattcgatctcgtcatattgatgcacgatgacgttgcgcaacgcacgcagctcactccatggcagttcgggagtctcattgcggaattcgtccgacagtttccgtgccgactcctgcgcctgcaccatatccatggccacggagttgaaccgcatatagtcgccctcaagctcctgcgccgaagcgacggcggaagcgtcgcgatgcgcacgttcgagatgctccacaagacggatcagatttgtctcgtcccggaatcgctgatctccatacttacgccgaatcatcatgccaccctgatcatatccggttggatatgcgtgtagaaacgcctgcttgcacggctgatcttcgcattcctacgcaacgcgtccaacgacgtcaacgacacctccctgccaaacgcccgttccagatcgcccttcaatcccgccatccgcatcatgtcgagacggactcccggtgcggtcacatacagcaggtcgacatcggagtcggcgtccgcctcacctcgggccacggaaccatacagatatacctccgccagcccgtattccctggcgatccgctcgatgatgaacttcaccgtggtgacatccaccacactgtcggaccgcatcagcttgcgcagcgcctcatcatagcgttgcagaaaatcctgcgtcggattgccgacatgctccgcccgggacaacgccgactgcgtcgtacccatcgcctccgctaccgcctgttggcttagcccgcaatccatgcgtcgcgccttaagtgaatcaatcatcgccacaccatcaatatagcatacatgctatactgtgatgatgaagacaaaaacactgcggccagctctcggtcatgacggagacaatcttcccctttccacccttctttgcgagtggcggaggagtgaaaacggggactgcgccgccacccggcacagatgccggcggcatcacgaaatcgtcggcagtcgcatcgagcaccgtcgcatcgggcattgccgacgccaacggatgaccgcaatgcatgcggcatccggaatcgccttcatgcttcgcaccacagtcgaagcaaggcacgcaatccgccctcttatccatcacgccgtgcagccaaccctattattccccttcgtgacggcaaagcgccgccgcatggagcatacatacggccgaatcggtatcgacaggggtcagttggtgaggcgcacatcctagagtatcgagcagagtggccgcacgacggcctagagcagaaggacaaggcatggaggttccacaaccggttccgccgcggatacccggctacgatttcgtgcgacagttgggtgcaggctccgaggcaacggtgtatctgtaccaacagcgctcccctgcccgcccggtcgccatcaaggtgagcaacaagtccttggatccgcgagcggccgcgcgctttcgcgccgaggccgatttcatggcgcagatctcctcacacccctacatcctttcgattttcgaatccggcgtgaccggcaacgggctcggctacaccgtattcgaattcgcacccggcggcagctatcgggacgctttgcgcaaggccacgctcaatgccgaccagatgctcgatctcggcatcaatctggcgagcgccctgtttaccgcacatcgcaagggcatcatccatcgagacatcaagaccagcaacgtgctcatcaatgcgcaaggcatgccggtactgtcggatttcggcatctccgcctcgatttatgaccatcgcacgaccggcttctcgctgccgtgggccccgccggaggtgatttccggagtcggcggaggcaatgaggcttccgatatctattcgctgggcgccacgctgttcgccacgatcaccggccgctcgccgtacgaatacgcctatcgtgtatccaacaagcaggagctggccatgacggtcgtcagcaagcctctgccaaagctcaaccgccccgaggtgccgccgcaggtggagcaggtgctgcgcaaggcgctcgacaagaatcccgatcagcggtattattccgcactcgatttcgcccgcgccatgcagcgggtgcaatacgcgctgtacggacatgccacgccgaccacggtggaaggtgtgccacagtatccgaaggacctcccctcacgccaggacacgcacggcacggatgacgcatccgactccggccgcaccaagacatgggtgaaacccgtcgtcatcggtacgctcgcagtggccgcaatcaccgtggtcgcactggtattcgccttcattgtggcccctcgcatggattccgtctccgataacggccatgcgcggatcagccccaccacaaaggggtacggcaatggcggcaccggtaccgatgacgatgaggatgacgacatcgccacgacggtcgtgccttccgtggagaacctcgccggccaatacaacggcgacaaggtgaatttcacttgggtgaatcccgatccgaagaagggcgattcctacgcgtggtccattgtcggcgattccgggacgagtacgaacgcgcaggcggccaccacggaagatacgcaggtcgaagtcccggcgggagacggcacacagacctgcattcaggtgagcctgatccgagccgatcggcggatgtcgcagaatccgacgatcgcctgcgcggccaagccgtaacgcaccaccgtcacaccgcattcgccacgagagaaccggagaagactcatggacagatcagcgcatccgagacggaccgcaacctcgcagtcatacgagaggtcccgcaagatcggcgcgatgctgcgcaggctgatgccgtccggcaatcgacagtggatcacaccgatcatcatgctgatgcttctgttgggcatcgtggccggcgcgctgatcatcagttcggtgacccagcagcacgtgcagcttgacgacggcaccgtgtggatcacttcactgaaggaccgcaaggccgcgcggttcaacgtaaaggtcaaagacaccgacgcgggcatctcctcatccgcggcacggttcgacgtagcccagcacaacggcgacaccgtgattctggagggaacgaaggccagctatatcgcggcctccaccgtcagcgaggacggcgacaccaccatcaaggcggatatgcagacgttgatcggcggggataccatcgccttcatcaacatgaagaccggcaacgtgtgggcgggtgcctcatccgatgtgaaatccgtgaacccgaccaccgcgtcgccgaagatgaagctcgggacgggcggcagaatcgccgtgacccacgacggtgcgatctacggctaccggcagtccgacggcgcgattctgaaaatggacggaccgcaggcgacgcccggcaaagtggcggaaatcggcgcgaaccaacgattgcgggcagactccttcaccgtggtggcaaatacccccgtactcacttccggcaatgcgattcactggccgaacggcagtgcggaagtttcgatgagtggcacgctcgtcctccaggcaccgcccacggacgacaggcagagcggctgggtggccgccgcgggtcagcgcggtctggtcacggtcgatctgcagtccaggaagccgacgcccgtggaaatctccaattccggcaagggcgacgcggcacagcccgtgtccaccaacggttgcgtatccgccgcatggagccagaaggcgaacaattatctgcgcgtgtgctcggcgcatgacggccatccgcaattcacatccctgcagaacgtgaatgccacctccgaactcgtgttccgcgccaaccatcgtctgacggtgctcaacgacgtggtcaacggcaacgtgtggaatccacaggaatccgtaaaggtcatcaagatccagtggaacaaggtgcagacgcagcagacgaaacaacaggatcagagcaccgacagcgccaacaatcagcataatttcagcaagacctgttcgtcgcaatccggtcagatcaaggcgcaggacgatgcgttcggcgcacgagccggctcgtcgcagattctcgacgtgctacgcaacgatgaacagaccgactgttcggtgttgcgcatcacctcggcgagcgcaccggacggcggtgacgtcaccgtctcgcccgtatacgacggtcggtacctgcaactgaacgccacttccgcaggagcgggcacggtgacgttcagttacgagatcggcgacggtcggggccagacgtcgagcgccaccgtgaccttgaacatcaccgacggaatcgaccatgcgcctgcccagaccgatacgccaccggaaatcgacgtggagcagggcgccacatatacggcaaacgcgctgggcagcttctccgacccggatggcgatccgctgacactggtcgccgcggtaccgaccaacaccgatcaggtgacggtctccacgcgcgcggacggccagctggtgttcaacgccggcgcgatgacatccggcagggcgagcgtcgaggtaaccgtgtccgacggcgagcagaccggcaccggcacgctgtatttctcggtgaaaccggccaatacgctgggggctgcgatcgatccggtggtcaagcagaccacgcccgatgcacgcaccacggtatcgcttcaacaatacgtgcatggcacttccgccgaaccggcgcagctgaccgcggtggagacgccgaacggagcttcgaccaccatgaacgcgacggatatgtcgttcacgttcaccgccgcgaatccaggtacctactatgtgccatacaccattacgcaggggtcgattcccgcaaccggtctggctcgtgtggaagtgcaggccgtgacaggcgattccgccaaaccggtggcagccaatgacgtggcgctgctcggagcggacaacaccgccatcgtggagccgctggccaacgatatcgatccgatgggcggcgtgctgtcggtcacctccgtgaaggccgatgcggccagcggcattaaaaccggcgtggtgagcaacaagcgcgtgtacatcaccgcccgccaggtgccgaccaaaccggtgcagctcacctacagcgtggcgaacgcggccggaacgtcgaccggcaccatcgtgctgcagccgccggcgctgaccaccgcgaattccgtgccgaaggccgacaacatcgacgcacaggtacgtaccgacggcatcgtatccgtcgatgtgctcgaccacgtcacctattccgacggcaccacggtaagcctgcaggacaatctgcagtatgacaggggcacgttcaagggactggtgttcgtttccggcgacaccgtacgctatcaggcctccgaccaggccggcacattccccgtgacgtacaccgtcaaggacaacctcggcaacgccgcctccggaacgatcaccttcaccgtgcatcagaaggatgcttccaacaagagcgcgccgacgccgtccgacgtggatgcgcaggtggccgccggacggaaagtgcggattccgatcacactgaccggcattgacgccgatggcgacgacgaccagctactgggtctgggcaacaaggcgccgcagctgggccgcattaccgaggtcggtgcgacctatctggtgtatgaggcgtatgcggattcctccggcaccgacaccttctcgtatgcggtcgaggattggaccggtcagcgcgcacaggcgcagatccgtgtcggcgtcttcaagtcgggcaccgattcgggcgtgtacgcgcgtgacgacgagatcacgctacgaccgaacaccgcggccaccgtgccggttgcgcagaacgacatctccggcgacaacacgaacctcaccgtcgaacgcaatgtggaatctcagggcatcgacggcgtgaaggtgaacgacaacatgcttgcgttcaccactcccaagcaggcgggaacgtattacgtcatctacacggtgaaagacaaggcgggccttgccgacacggccacgctgacggtgaacgtcgatgagaacgcggccatcgcaccgccatcggcctacgattaccgagtgccgtcctccgcaacgatcgataagaagtcggtcgacgtggatgtgtcgcaatggatcgcaaacccgtccggcaccgccgacgagctgcaggtcggcgtggacgattccgccgccgaccatgcgcggacgaagggcggcagaacgtccaccgtaatcacggtggatctgaccgatgaggcgcgtgcggtgccctacacggtgacgaacaccacatacaacatcacctccaccgcattcatccaagtaccggcatacggcgtctttccgccgacgttgcgtccgaaggcaccggcattgaaggtgaacgcacgtgagacgatcaccatcaacatcgccgattacgtacgtgtcggcgccggcaagaccgcctacgtggacggcgccgattcggtgagcgccaccaaggccgacaatgacgacctgtatgtgaacgatcagacgctcaagttcaccgcgccgaaggattatgcaggccccgcttcgatcacgttcaccgcggtcgacggcaagcatgccggaaacggcaaagtgaagatcgtcaattcggcggtgttgaccctgccgatcaccgtgatcggccgcgacgtgcccgcacccaccttctcatcctccacggtggacgtggtggccggtgagggctccaccaccatcgatctgaccgccttgacgcattcgccgtcgggattgtatgacgacgaaaaggaatacacgtatgccggtggagtctcctccgaccaggtgaccacgaacgtgagcgccgacggcaaactgacggtgagcgccgacaagacggccacgccaggaaccacggtgagcgtgccgatcaccatctcgtattcgaaaggcaccgtgcaggccggtgtgaccgtgcgcgtggtggcctccaccaggccgatggcgcgcatcggcgcgaaggccttgaaggtcaaggctgggtcaagcgaacaggtgaacgtgcttggcgacgcctacaatccgttccccgacaccgcgcttaccgtgacgggatgtcaggccgacggttccgccaagctggcggtggactgccccgccaacggaatgataacgattgcggcggcctccgatatcggcgcgagcacgaaccatgtgatcgtgaccgtgcgcgacgccactatgaccaaggaacgtgaagtcactggaaccatcagcgtttcggtgacggacaagccggacgccccgctgctctcccctatcgccggcgatgcccaggatggcgcggtgaatctgagctggacggcgggttcttcgaacggcagcccgatcaccgaatacaaggtctcgtggacgggcgactcctccggagagaaatcgtgcggcacggtgaccacatgccaggtgacggggctcaccaacggcaggaagtactcgttcaccgtcatggcgcagaacgaagtcggatggtccagtccatcgaatgccgtggacgggcaacccgataagataccttccgcgccgcaagacgtgagggccgaagccaacggcaacatcgtggccgtgacatggtcggtgccgaaaggcaacttctcggaagtcaccgaatatgaggtgaccctgaccggcggtggcgtatccaagaaggagaccacctccgcaaacgccatcaacttcaatctcgagaacaacgccatcacggacggcatgtccgtcagtgcgaccgtgcgggccaggaacagggtgaactggagccagccgtcccaggcctcgaacgccaccgcaccgcggggagttcccgacaagccgaccgtctccgcaacgcagcaaggcgatcagatcatcgtctccggcaagcttggcaacatgcgcaatgccggctgtgaagccgtgacgctgagtttcgcaggcagggacgccggcatggcatgcggatcgtcggacgtttccgcgaccttcgacatcgccgaagactggtactaccaaagcctcgcgccgaaaatcacgttgaccaccaaatacgccggaaccgtcaccgcgcagggtaacgccatcacccctgacgtcaagcccgacaagccggccgatgtcagggtcgtgcccgatggcgaccattgcgtggcttcgtggaacgccgccggcaagcatcatgacggcttcatcgtaaacgtgccgaagcagaacaacatgccgaccgcaagcctcagcgtcacctatcctcttgaacattggggcagctgtggcaccgtaaccgtgtggcagaccttcaaaggccataccagcgatccggtgaaggccagcaacggcgaaatcggcaacaaggtccaggctgtgatcgccctgccgtcactgcgttgggacgatacagacgccaatgtcatccatgtcgagggcggtgccgtgaacgcctacaaccagtccgtgaccgtgaccatcgtcctgtcggatgaatccaagaagcagtatccgttcgaatggcatccgggccttacgaccacgctggacgcctcggcgctgccacagggattctcgtactcgtggctcgtcaaggtggaaggcaccaccgacaaggcggtcaacagcacgaagcagagtcccgccccgcttaaggacagcgacaggtatcacgctccgccaaccccttcgcccggcaccagtccatccacatcgacgtccttcgacgacggcaccgacgaatcgcggggcgggtccaaaggacattcggcattgacgacgttgccgaggcaggcaaatcacgaccatccctggatcagggaaatccgactgttccacggccgcccgccgatcaatccatcattcgcaggcaataagcagtagaggagattccatgagcaacgcattcgacgatgccacccagctgagcgagcgcagcaacgaaccgcacgggaagcaaggcttcaccatgccgaagctgccggaacgcctcgggatcgaacatcatgagtccaccgacgtggacggtacggtattgggcacgcatggcacgacggccccggtgacgacgaacgctccgaccgtcacaccgaccgccgccgccccaaccatcacggtcacaccggataccgccgccccgaccgagcggatggcatcgtggcaggcaacaaccgaacggcagccggccgcctccgagcaggttcgtcggcagccggcggccggcatcatgccggaaaccctgaataccggcatgatgccggccgccggcgccgatatcgtcgaattccatgacaagttcaacgccttggtgaagaacgtttccaaggtggtggtcggcaaggacggcccgattcgccaatgcatcaccgccatggtggtgggcggccatgtgctgctcgaagacaatccgggtaccggcaagacccagttggcgcgaggtctggccaattccatcgacatgtcgttcaagcgtatccagttcacgccggatctgctaccgtccgacgtggtcggcgtaacctactacgaccagaagcgaagcgaattcgaataccgtgagggcccggtcttcgcctccgtcgtgctcgccgacgagatcaaccgcgcttcaccgaaaacgcagtccgcactgctcgaggtcatggaggagcagaaggtcaccgtcgatggcgtgacccatgccgtaccgcagccgttcatggtgatcgccacgcagaatccgatcgaacaactcggcacctataagctgcccgaagcgcagatggaccgattcctcatcaagaccaccgtcggctacccaagccatgaggtgagcgtcgacattctgcgtcaggtcaacgtcaccgaccgcgctgccaccgtgcatcacgtgctttccggcgacgacgtgctgcgcatgcgcgccatcagcgagaccgtacgcctcgatgacgccatcatcgaatacatcgttcgcctggtcgaagcgacccgacataacgaaaggatccaagtgggctcctccatgcgaggcgcactggcgctcacccgttgcgcccgcgtgtgggccgccgccgacaatcgcggctatgtagtgcccgacgacgtgaaggatctggcggtctccgtgctcgcacaccgcatcacgctcaccgccgaagccacattcgccggtgccacggcggagcagatgatctcgcagattctcgaggaagtgccggccccgaccctgggcgcctgaggagacggttccgatgcgaaattcccgaacaacgctacgcagacgaaccatgatgcggttcctgcgccgtaccggacaccggttgaagcgtctgttcacctcatacgtttcaccggtgggatggatggtggcagtattggccgtagccacgtctgccgcgttcgcgatgctcggttggcatgaactgcttgccatggcaacggcatacgcgctgatgctgcttgccgcggtagtgatgtcgttgggcaacacgtcattctccgcatccatcgatgtgtccaacaggcgtgtgaccgtaggcgacacggtgcaggtgagggtggccgtcgacaatcccggcaacacaccgaccgcctcggcacgcggcgatctgccgatcggcgacaaccacgaacggttcaccatcccgatgctcgcggccggacagtcgcgccagaccgacgtggaattcaccgccatggcgcgtgcggtgctgccggtcggcccgctgtcgatccgcaaaggcgacccattcggtctggtacgccacgaaaaacggctcgtcgaccagatccaggtattcattcacccgccgaccgtcatgctcaatacgttgaatgccggcatccaacgtgacttggaaggacagccaagcggcgaaatcgtggatgacgatctcgacttctacggtttgcgggaatacgagccgggcgacgatgtgcggaacgtacactggctgagttccgcgaaaaccggctcgctgatgatccgccaatacgaggccacacgacgcaccgacaccgccgtaggcatcagcgtgaatcccgatgactacaccgacgcccaggaattcgaactggccgtgtcaatccacgcctccatcggcgtgcagtgcctgctgcaggaccgcccgctgaccgcacacgccggcgacgatcacaccacgccccgcaatgccacgacgttcctggactcctgcagcgccatcgaaccggatctcgacgacaatccgaaccttgcgcaaggcacactcgactacgccgccgatgcctcgttctactacttcaccgtcggccgactcaaagacgtagacgaaatcaagcatatggcgctcgcattgccacgctcagcgacctgcgtagtactgcaggcagccgtcagccaacaacgcgccatacgaagattcccgaacttcaccctggccacggtcggcgatctgaacgatctgccgatgatcatgggagtactgtcatgaccttcccaccgattcccgaccaaagccataccttcaccggatcgtgggccgattccacgcattcggtggtctggatgacccgcagcggcaaacagcggccgctgatcagcgcacaccgcccggcaagccggcagttcgccagtcttctgacgacagcactgctcacgctcgccaccgccagcaacctcatcgacgtgtatggctcaccagccgcatgggccgtcgccgccgtgccagccaccgccatcggctgtctggtggcgctcgccggcaccgtcgaggcgttgcgactatggtggcaggccctgttcatggcactggcgcaactcgtcatcggacccgttctcctgctgaacgagaccaccatcgcacacgtcatacccaccttgcgtacgttgacgcaaggatggacgtccatgctcggatcgttcaagtacgtactgtcgatcgacccgcctaccggcaccgccaacggcagtctgctggccgtatggacgatctgcctgtggttcgcactgctgaccggcatattcgccgtcgcgcaggacggccgtctcaccatgatcgccatcattccggtgattgcgaacatggcgatctgcgcattgctcggcaccgccagtggctactatcgtttcgccatcggcaccgccgttgccatcgtgttgatgatttgggtgagcgctcgctggggattgctggagttgggccgttggatcagctccgcgatcatcgtggcgctttcggctgcactggcgataggcgcatgtctgacgatcccgcaggaccgaatcattctgcgagactattacgacccgccgctgagcccgtacgattacacaagcccgttgagcggcatgcgatcctatatcaagaatcataaggacgatacgttgctgaccgtcaccgacctgccggccggctccaccgtccgtctggccgtgatggaccgtttcgacggcaatgtgtggaatctttcggattccacgatggccgccgattcatcgaactaccatcgtgtcggcaccactatcaggaacaacgtcaagggcaggaagttcgcggccacgttcacggtgaacaggggcctgagcgactactggctgccgatgaccggcaccgcctccggcgtaacgttcgagcatgaggatgatgccgactcgttctactacaacaccgccacgcattcggccatctatgcgtccaagacgaccgccggcctgacctacacggaaaccggcatcatgcccgccgtgcccaccgacagccagatcagcaaggccaaggcctcctcggtaagccagccgcaggcgcagcacgtgcccgacagcgtggacaggctcgccaccgcagtggctggcggccggtccaagggcggtgaggcggccctcgccctggcgaacgagctcaaggaatccggctggttctcgcatggtctggccggagactatccatcctcccccggccacggcaactatcgcatcgatcagctccttgccggcaccgccatggtgggcgacagcgaacagtatgcctccacgatggcgctgatggcccgcagtctgggtctgtccagccgtgtggtgctcggattcctgccgaagaacgaggaaggcgacatcagcgaggaacgcaccgaacggcacggcaagtccaccaccaccgaattcaccggcaatgacgtgaccgcatgggtggagatcaagctcgacggctacggatgggtgtcgttctatcccacaccgaaggagacgaaggttcccgacgaaaaccagaatctcactccgccgaacccgcagacgctggtacgccagcctccggtgccgcttaccgacccgcttcgtgacgacaatcaggccaagggcaagtcatcgatcggcggcagcgaggccgacgaatcccctaccaacctgttctggcaacgtttcgagcgcatcgccaaaaaggtggccatctatggaagcccgctctgggcgctactcaccatctgtgcgctgctgctcggcatcaaggcgatcgccttggcacgggcccgcagacatggcgacgcacgtcagcgtgtagccgcgggatggcaatccgtcgccgccctggccaggcaaagcggactcgatgtcgacggcacccgtcgcgatcaggcgcaggccatcggccgacagcttaacgtcgatgccgtctcactgctcgcattgggcaaggaagccgattacgcggcgttttcgggcgatacggtgcaggaagagcatgtgcaacggtattggcggaacatcgatgtggtgcgccggtccatactcggatccctgcctcctgcacggaggtggagagccaggctgtcgctcgcggacgtattccacatccgacggcacgggaaagggcggagttcatgaacgcgaaccgtatcgtgaccggcctgaacagcgatatcggactgcgtcgcgccagcaatcaggacaatgccctggccgggcatggcatattcgtcgtatgcgatggcatgggcggcggcatgggcggcgagcgggcaagcgaggcagtggtgcgccattgtgcgcagcttggcgccaaggccgcgcgcaaccggcatgatatcgaagagacgctgaatgccgcgcaacgtgaggtgctggcattgggcgaatcgttgggcggcatcgccggcaccacgatttccggtgtgatcatgcctgccgatatcgatgacatgacggcccatgcagccgatgccaacagtaccgccgacggcaacgattcctgctatatcgtcaacatcggcgattcacgcacctaccatatgtgcgctgccgaagacggcggttgggatgcgagcacgtttacccgcatcacccgcgatcattcggagcgccagaacgccatcgattccggggagatgctgcccgaggaggcgttgcgaaacatcccgcgcaacatcatcacgcagtgcatcggagcgccgaacggcatcgcacccgattactacgcggcggatgccttcggacgtttcatcatctgctcggacggcctgcatgccgaagtggacaaggaacgtttcgcagccatcgcggccgccgacaacgatcctcagaccgccgccgacgcgttggtcaaagcggcgctgcgggccggtggcaacgacaacgtgaccgtggtggtagtcgacatgatcacaccttcgcccatcgggcgggagtggacggtcggcaaactcgccgagcatgaagacatcggcgatctacaagacggcacattacaaacattacgaaccattgatgttgtaaggagatcatgatggttgattacgataccgcggtcgcggcggtgcaggatccaaacgccgatcccgcattcctggcgaagatcgcctatgagaacccggaattcggggcgaatgtcgcagcgcatcagcgcgcataccccgggttgattcgctggctggcccagttcggcgacgaccgtgcacgccagattgtgatccagcgcggctatgccgtacctgagaccgcagtggcgccacacgaacagccggcacaggattcgccggcacaggattcgccgatgcaggattcgccggtgcaggagcggcagtttgcgcaggagcgacagccgattcaggaacagctcgtacggtccgcgcaagagcaacctgcagtgcaggacaatcaggctcagccagtccatcaggctcagccgatccatcaaaaccagccgatcaccgacacttcgaccgaatatcttgacccctacaccaatcctgccgatctgtccgaggtggcggattatgccgaacctgtgcaggagcagccgcagccacagccgcaacagccgattgcacggaatccgtatggcttcaccgcgcaaatggcactgaccaccgccgatcagatgcagatcgcacagatcgcacagtacgcgccggagctgcgtgcctgcatcgcacgcaatcccaacacctatccggcattgctggaatggttggcgcagttgaacgatccggccatcaacgccgccttgcgcactaggcagtgaggccgaccatcattcatgcgcactcatgcatacgtatcgccttggtcggtaccggcgggagcaaccatcatgccttgcagtggttgttcgtccggtgccacccaaggcgatacgtttcgaatgatgtaggctagcgttcttcgaaggagaagaactgatcgccgatacgtagcgtggccggcgcctcgagctgcatgggcctgccttccaccttgatctcttcgtcgtcttggatgaggtacgtaccgttcagcgaaccataatcctcaatccacagacttccgtcccgatcgaagctgatggccgcatgattgcgggaaatggtacgtgtcggatcctccagcctgaccgacttggcgccttccggcacatcggcggacggcttgcgccccagcaatgtgctgatgtccacggtcacgtcctggccggtcatgtcattgtgcagcagatacacgtgatccggctgcttcatggtgaacgcggacgacagcaccgtgctgtcccaatcttcgatgctctggtcttccgaatcgtcctgcgacggttcggtctgcatcgttgcgacctgcacatccgccacgggctgcatgctcagcgccgacccgtcctgcatcggctgccttcgttcgaaagattcggattggattgcaccggacagtgcggtaacgtcatcgtcataccagccaggttccggcggcggtgggtaaggtagaaagctcatgtgctccattgtatgtgcaagagacccataacgatagcgcaattcatgtatcgacatgttcttcggaacgacttcgttcagcatgttacctgattttgcggcgctgaagggctatgctggaacaatgctagtcattacggaaatatttttgaatattcggaaatatgtgactttgcatacgaagaagcagaggatacacagtaaggatttctcttatggatgaccaacttcctaccgatggcacgcaaccgaacagcgctcggacgccatcccatgcacagcctcaaccgcaaacgtcaagcacggcggatcggcagccccagcagccggcacagcctcaggccaaccagcaaccgatgccgccatatcaacagacgcctccgcagtaccagcaaacggctccgcagtatcagcagccgatgccgggtcggccgggcgtgccgggtcagccgggaacccctctcatgcaggggcaaccgtacgggcagcccatgccgcagagcgccgcgaagaagccggcgaccggcctgatcgtaggcatcgtaacggcggtgatcgccgtcatcgtcgttcttgccgtagtggtgacgatgattatgtcgaaacgcatcaccgccgccgactacacggccggagagaatcaggtgctcaccatgcagaagcattatgcgagcgtgaatgagaagctgcgcgacgcctatctgtccgcatacggcagcagttccttccaggacacagacaagaagcgtctcaaggaccgtctcaagaccctccagaatgacaacgcgaagttcgaatccctgaaggtcatgaacgatgagaccgtcaataaggaatatcaggcgtataagaagaagaccgcgacatacatcaagttcgtcgacgagatgatcgaatccggcgaatcgctctccaaagcggcgaaggcctgcaacagcagccccagcgtcagctcttacgacaacagcttctacaccaagtacggtgagtatgtgtccgcctgtaaggccgcactcgacgatgtctccaagtcaccgaacaaggacatcgcacagtatggcaaggatcttggcgattacgtcgataagctcggcgatatcatctccagcatgcaggccatcggcgatatcagctcgctgcagtatggcaccacgcagtaccagcagttccgtgacctgctcgacgagttcaacaatctggaggcgccgtacagcagcgtgagcacgttgagccaagcgttgcaggattccgcggaggaagccgacctgagcgattccttgcgctccctgtatgacgctttgacggatggcgccgatcatgcccactgattgagcggccgctgccgcgagcatcctcccctatgattaaggctgggccccgaccatctgcatggtcggggcccagccttaatcagttatcgccgtcggcgccacggatcagagggtgtctcccagatccatctgaccgccgttatcgtcgaggaagtcatccgggttgaagtcgtcgccgagcttcaaatcaccgaagtcgatgttggagaagtccacatcggacagatcggcgtcgccgaagtcggcacccgtttcgtcgccacccaggccgaagttcggatagatggtgtcacggatggccttgtcgggctcgaccacggcattgcgatagcgggcgagacccgtaccggccgggatgagcttaccgatgatgacgttctccttgaggcccttgaggtcatcgaccttctggctcagggcggcttcggtgagtacgcgggtggtctcctggaaggaggccgcggacagccaggagtcggtggccagcgaagccttggtgatgcccatcagctccggacggccggcggccggcttgccaccgttcttcacggcctccatgttggcggccttgaagcgtgcctggtccacgagttcgcccggcagcaggtcggtgtcgccggagtcgatcacggtgatacgacgcaacatctggtgcacgatgacctcgatgtgcttgtcgtggatatccacgccctgggagcggtacacggtgtgcacttcctccacgatgttgacctgagcggcgcgcggaccgaggatgcgcaggatcttcttcggatccacggaaccctcgatgagctgggtgccggcttcgacatgatcgccgtccttgaccagcatcggagcgcgacgggtcaccgggtagacgatcggctcgacggagtcgtcgtccggcttcagggtgacctgacgaccgcgatcggtgtcttcgaccttcaccacgcccgggaactcggcgatcggagcctcgcccttcggggtacgggcttcgaaaagctcggtaacacgcgggagaccctgggtgatatcggaagcggatgcgacgccgccggagtggaaggaacgcagcgtcagctgggtaccaggctcgccgatggactgtgcagccacgatgccgacggcttcgccgacgtccaccagcttgttggtggccagggaccagccgtagcacttggcgcacacgccacgcttggattcgcaggtcagcacggaacgggccttgacctcttccacaccgtgggcgacaaggtcgttgagcacatccatggacagcgcatcgcccgccttgtacagcacggtttcgccgtcggcaggatcgatcacatcggaagcgagcaggcgggagtacgggccgccatcagcggccttgacgagcacgaggttgccgttctcgtcacgctcgccgaccttcatgggcaggccgcgcttggtgccgcagtcctcttcgcgcacgatcacatcctgggagacgtccaccagacgacgggtcaggtagcccgattcagcggtacgcagtgcggtatcggccaggcccttacgcgcaccgtgctgggagatgaagtactccagcacggacagaccgtcgcggtagttggacttcaccggtcgaggaatgatctcgcccttcgggttcgccacgaggcctcgcatacctgcgatctggttgatctgcatcatgtttcctcgtgcaccggactgcacgatgatggccaggttgttcttggagtcgaagtgttcctcgaccgcctcggacacctcgctggtgcacttggtccacaggtcgatgagttcctgacggcgctcctcttcggtgagcataccgatttcgtagttctcgttgaccttgtcagcctcggcctcgtacttttcgatgtactcgtcacgctcgggcggctggatgacgtcggagaacgcgaaggacacaccggaccacggtgcacgggtgaagcccatatccttcagggcgtccagcgtcgcggccacctgggcggtcggataacgggtcgcgatgtcgtcgacgatcttgctcagacgcttcttcggagcctgatcgttgacgaacgggtaatccagcggcagcgtgctgttgaacaggatacggccgtaggaggtggcgaacagcacggaaccgtcgtggaagcgctcttccttcaccacgtccgggctgcccggttccgggtcgacgaccttgagctcgctcggctcccaatccttcggcagcacgaagtcctgcggcagacggatgagcaccttggcctgcatgtcgatctcgtgcttgtcaagggccatttcggcctcttccagcgaggagaacacacggccctggcccttggcgccgtcgatgacggtggtcaggtaatacagaccgaggatcatgtcctggctcggcatggtcacggtgtgaccgtccgccggcttcagaatgttgtcggacgccatcatcaacgagcgggcttcggcctgagcttcggcggacagcggcagatgcactgccatctgatcgccatcgaagtcggcgttgaatgcggcgcaggcgagcggcggcagatggatggccttgccttcgaccagaatcggctcgaaggcctggatgcccagacggtgcaacgtaggagcacggttcagcagcaccggatgttcggcgatgacctcttcgagcacgccccacacctcggaatcgccacggtccaccagacgcttggcgctcttcatgttctgcgcatagttgaggtccaccagacgcttgatgacgaacggcttgaacagctcgagggccatcggcttcggaagaccgcactgatgcatcctcagggacgggccgaccacaatcacggaacgaccggagtagtccactcgcttacccagcaggttctggcggaaacggccctgcttgcccttgagcatgtcgctcagggacttgagcgggcggttcgaggcaccggtcaccgggcgaccacgacgaccgttgtcgaacagggagtcaacggcttcctggagcatgcgcttttcgttgttgagcatgatttccggggcgccgagctcgatgagtcgcttcagtcggttgttacggttgatcacacggcggtagaggtcgttgagatcggaggtggcgaaacggccaccgtcgagctgcaccatcgggcgcaggtccggcggaatgaccggaatcacatcgagcaccatggcctccggcttgttgccggtggtcaggaaggcgttgacgaccttgaggcgcttgagggcacgggccttgcgctgaccggtgccagtgtcgatctcctcgcgcagctgcttggcagcggcgtcaaggtcgaagtcctgcagacgcttcttgatggcttcggcgcccatgcagccttcgaagtaatcaccgtagcgatcctccatctcacgccacaggtccacatcgccttccatgtcgcccggcttcaggttcttgaagcggtcgaacacggcgttcagacgctgaatctgctcgtcgaagcgggtacggatggcggccatctcacgctcggcgctgttgcgcagcttggcgcgtgcggagcccttggcttcaccttcggcctcaagctgggccagatcggcttccaccttcttggcgcgatcttcgatctcggcgttgcggcgcttctccagattggtgatttcggtgtcgaactcgtcctgcagatcgggcagatcctgatgacgctgttcctcatccacgccggtgaccatgtaggcggcgaagtagatgaccttctccagatccttcggcgcgatgtcaagcaggtagcccagtcgggacggcacacccttgaagaaccagatgtgggtcaccggggcggcgagctcgatatggcccatgcgctcacggcgcacacggctcttggtcacttccacgccgcagcgctcgcacacgatgcccttgaagcgcacgcgcttgtacttgccgcaggcgcactcccagtcgcgggtaggtccgaagatctgctcgccgaacagaccgtccttctccggcttcagggtacggtagttgatggtctcgggcttcttgacctcgccatagctccagttacggatgtcgtcggcggtggccaggccgatcctcagtttgtcaaatgcgttgacgtccagcactctattgtcctgtctatcgtttcttttgattattcacgtttcgtggggaccgccacgcttcggcgacgtttgcctccggggcgtgacggtccgaggaatcactggaattcaggggcttccactacctgttcttccttggcggatgcatcagggcgagcaccgatgttgaagcccaggtcgtcggaggcggaagacgggtcgtcgtcctcgtccttcatgtcgatggccacgccttcggcgttgagcacctcgacgttcagcgacagggactgcatttccttgagcagcaccttgaaggattccgggatgcctgccggcggcaggttgtcgcccttcacgatggcgccgtacacgcgcacgcggccgtcgacgtcatcggacttggtggtcatcatctcgtgcagcgtgtaggcggcaccgtaggcctcgagggcccacacttccatctcgccgaagcgctggccaccgaactgcgccttaccacccagcggctgctgcgtgatcatggagtacgggccggtggaacgggcgtggatcttgtcgtcgaccagatggtgcagcttcagcatgtacatgtagcccacggagatcggcttcgggaacggttcgccggtacgtccgtcgaacagggtcgccttgccgtcgaggccgaccagcttgttgccgtcacggtccggaagggtgcaggaaagcaggcccttcaaggtgtcctgacgcacaccgtcgaacaccggagtcgccaccggagtgcccggagcgcccttttcggcgccctgcggcacgaacttcttccaagcggcttcggcatccgggtcaagggagatgtcccaaccggcgtgggcgatccagccgaggtgcagctcgagcacctggccaaggttcattcgagaaggtacgcccagcgggttgagcatgatgtcgaccggggtaccgtcggccaggaacggcatatcctcttccggcaggatgcgggagatgacgcccttgttgccgtggcggccggagagcttgtcgccctgggtgatcttgcggtgctgtgcgatgtagacgcgaatcatctggttcacgccgttcggcagctcgtcgccgtcctcctcggcgtcctcgcgggtgatctccttgacggcgatcacggtaccggtctcgccatgaggcacgcgcagcgaggtgtcacgcacttcgcggctcttctcgccgaagatggcgcggagcagacgctcttccggggtcagttcggtctcgcccttcggagtgaccttgccgaccaggatgtcgccggcctcgacctcggcgccgatgcggatgatgccgcgctcgtcaaggttggccaccgcatcctcgccgacgttcggcaggtcgcgggtgatctcttcggcacccagcttggtttcacgggcgtcgatctcgtattcctcgatgtggatggagctcagggtgtcatcctgcacgagacgctgggagatgatcacggcgtcctcgtagttgtagccgttccacggcatgaaggcgatgagcaggttcttgcccagggccatttcgcccttctgggtcgccgggccatcagccagcacggtaccggcttccacgcgttcgccgtcgtggatcaacggcacctggttgtagcaggtggtctggttggaacgctggaacttggccagcttgtaggagctggtggtgccgtcgtcgttcatggtgcggatgatgtcggcggaaacgtaggtcacgacgccgggcttctcggccagaatcacgtcgccggaatccactgcggcacgccattcggcgccggtgcccacgagcggacgctcggactggatcagcggcacggcctgacgctgcatgttggtacccatcagcgctcggtggccctcatcgtgctccaggaacggaatcagggaggcaccgacggacaccatctggcgcggggacacatccatgtagtcgacggagctgaccggcacatcgactgcctcttcctcgccgactcgggcaagggcctggctcttgacgaagttgccgttctcgtcgagctcctggttggcctgggcgatcacgtgctcggcatcgcgatccgcggtcatgtattcgacctcgtcggtcacatgaccgttgacgaccttgcggtacggggtctcgatgaagccgaacgggttgatgcggccgaaggttgccagggagccgataagaccgatgttcgggccttcaggggattcgatcgggcacatgcggccgaagtgggacgggtgtacgtctcgcacttccatggaggcacggtcacgggacagaccgccggggcccagtgcggacagacggcgcttgttggtcacgccggccagcgggttgttctgatccatgaactgcgacagctgggaggtgccgaagaattctttgatggtggcgttcaccgggcggatgttgatcagggactgcggggtgatggcctccggatcctgcgtggtcatgcgttcgcgcaccacgcgctccatacggctcagaccggtacgcagctggttctggatcagctcgccgacctgacggatacgacggttgccgaagtggtcgatatcatcgacatccacacgcagatccacgtcctgaccgtcacgcttgcccgggaacttggcctcgcccgcatgcagggtgaccaggtacttgatggtggcgatgatgtcttcgcgggacaggctgcggtcgttgacgtccttctcaagaccgagcttacggttgatcttgtagcggccgacgcgggccaaatcgtagcgcttggtgttgaagtagaaggagtccagcagattgcggccggcttccggagtggcggtgtcggccgggcggatcttgcggtacagatcggtgagggccgcttcctgggtgtccacggtctccttggcgagggcgtccatgaccagcgggtaatccttgaacgcgtccgcgatctcctgcttggtcatgccgatggccatgaggaacacgatggcggactgcttacgcttgcggtccacacgcacgccgagcacatcgcgcttgtcgatctcgaactcgagccatgcgccacggctcgggatgatcttcgcgccgaagatctccttgtcggaggtacggtcctggctgcggtcgaagtacacgccgggggaacgcacgagctgggatacgatcactcgctcggtaccgccgatgatgaaggtgccgtgcggggtctgcagcgggaaatcacccatgaacacggtctgggacttgatttcgccggtgtcgccgttttcgaattcggcgttcacgtacagcggtgcggagtaggtgtagtccttctccttgcattcctgcacggtgtgacgcggctcctcgaaatacggatcggagaaggtcaggctcatggtctgcgcgaagttctcgatcggggagatctcctggaagacctcgtcgagaccggaggtatgcggtacggtgttggtgccgttttccagatcctcctcgacgcgctgcttccagcgttcgctgccgatgagccaatcaaagctgtcggtctgtacacccagcaggtagggtacatcaatgggctcgcggatggagccgaagttcacacggtccgacgccttatgcagatcaatgtcatgctggtcggcgcgtgcgatgatggtggtggtgttcgtcgtagcctcagccaatggacgttccttatcgctcgcttaatcgtatcgatatgtttccccggaagcgctctcattggccaccatatgcctaatacgcgggcgcttcttccttgtcagcatgcccgctatatgacatgcatcttacgcaaagtcaacagaataccatatcctaaagattttccggattcgtacccgatgccgttttccctcgtatgagcaagccggcacgaagccgcggagggagaatcgcgcgaactactccacggtgaccgtgacggggtcggatttggccttggcatggccggcaagggtcagctgcgccacgtacgtgccgcggtcgacgcgaggcaacgtggaatcatccgcgcattcggatccggtgcgatcgcccggccacgtgatcgtgccttggattttgtcgcccgtggcgatcagccgcagatcctgatcagccgggcatacattggatttccagatcacgtcatcgccggatttgatcgtcagcaccacgccggaggtcgacgcgtcgaccagacagccgaccttgctggaaccgtcatacttgaccgtcgtcgtgaaatcaagggtgccgccgacaccgaaactctgcgacgccggcgtcaacgacagcgacacgttggatgcgccgcaatccggcactccgcttttcttctcgtcctcggaaggcgacggcacctcttttttggagatcgcatagacgtcgtcgtggtgaatctcacgattgaccgcgacgatgccctgcgagaccgagtagatgcagaatacgacgaagattatggcgatcagcgccgcgatgccgacgacgatgcggcgacgacggaacatcgcctgctgctttttgctgcgtttgcgtttgacggtcgtcttcgcggaattcttctgtgccatgattccccagtctaccttgccgacgttcggttgctcgggtttccgccattgcggacggaaccacgtccgtccacgaaggtcagcacggcagccgcacactgccgtccggcaacatttcgatcaggccgtcatcgtcaagcgacgcgatgcatttgtcgagctggatatgatcggaccacagtgcctcgatgtccttgcgatcgattgcgattcgcccatccggcagtccccgcaacgcgttcagcaccagcccgcgcacctgccggtcggtacctcggaaccgttgacggggacgcgtgcgccgttcccccaatccaggacggccgttggcgaggaacatgcactcggcagcgaccgggcactgttcgcacagcgggcttttcgccgtgcagatcaccgcgcccaattccatgacgctttgattccacaccacggatggccggtcgaatccacgacatcgtgcggcggaatcctcaggcaacaccctgttcgccaacgcacgttccgcagggcttgccgcccctcctctcgactcggcgccgaggaacacccgcgagagcacacgtcgaatattggtatcgatcacggcgatccgctcaccataggcgaagctcatcactgcgctggccgtatagtcgccgatcccaggcagagcgaccaactcgtcgtaagtacgcggcagatcgtcatggtaatcgtccgccaccattcgcgcgcattcctgcagacgcaaggccctgcgcgggtagccgagacgaccccaggcggtgatcacatcggctttgggcgcatccgcgagcgcggccgcatccggccaacgttccatccatgcctgccaatacggcacgacgcgactcatctgggtctgctggctcatcacttcggagacgagcacgccccacggcgtggcccgtccgaatcgccacggcagatcgcgggcggattcatgccaccattcggcaagcgattcggccaccataccggcatctccgtcatgtccgtcttccggcatggagggcatggtttcggctgaagtgttcgtgtcgttcatcgtttctattcttagcatttatgacgaatgaagagcgtgcccttgaagctcagggcgcagaagctgcacagaccgccacgcggaacgcggaggccaaggtcgagaagatgttcgaatacggctaccgtaagtcgaattacggtccggatgagttggtgaccgacgcgcatggcaatccgatttccgtggtcgacgcgatgctgtcggccgaagacgcggccaaggccgaaacctccacaccgcatttgtgctactactcccctcgtattccgggcaataccggttccgcgatccgcctgtgtgcggtgaccggcacgatcctgcatttggtggagccgcttggtttcaatcttcgtgatacgaagctgcgccgtgcgggccttgactaccatgacatggcacatgtggtgctgcatccggatttcgacaatctggtgcagtccatgccgaattcgcgcatcatcgcgttcaccgcgcatgccaccaagctgtacacggaaatcgaatacaagccgaccgatattctgctgttcggcccggagccgggcgatattcccgatccgatggatattatggccggccctcacgtggccgaacaggttcgcctgcccatgcggccgagcctgcgctccctgaatctgacgaactgcgcctccatcgccatctatgaggcgtggcgtcagttgaattttatcggcggtaagtaaaaactgtatatgaacgcaacagagcccggccctccgcataaggaaggccgggctctgtcgtcagagaacgtcagttcttgaacgagtggatcggcgctggaattcggccgccgcgggtcacgaaagcctcgcaagacgtctggttcaccgggatgatcggcgcgtagcccatcagtccgccgaagttggccatctcaccgacgcccttgccttcgaccggaatcacgcgcacggcggtggtcttctgattgaccatgccaatggcggcctcgtcggcgatgatgccggaaatcgtcgaagcggtggtatcgcccggaatggcgatcatatcaaggccgaccgagcatacgcaggtcatggcttcgagcttctcgatcttcaggcaaccgttggatgccgcatcgatcatgttcttgtcttccgaaaccggaatgaacgcgccggacaggccgccaacataggaggacgccatgatgccgcccttcttcacctgatcgttgagcatggcgagcgccgcagtggtacccggagcgccgacctgctccaaaccgatcttctcgagcacttcaccgacggaatcgcccacggccggagtcggcgcgagcgacaggtcgatgatgccgaacggcacgccgagtcgacgggacgcctcctgcgccaccagctggccgacacgcgtgatcttgaacgcggtgcgcttgatggtttcgcacaggaattcgaaatccttgcccttggcctcgtcgagcgcacgggagaccacgcccggaccggaaacgccgacgttgatcaccgcatcgccttcggtcacgccatggaagccgccggccatgaacggattgtcgtccggagcgttgcagaacgccacgaatttgacgcagccataggagtcgttgtcggcggtggcgtgcgcgatgtccttgatgatgtggccgagcagttcgacggaattcatgtcgataccggttttggtggagcccacgttgacggacgagcatacgatgtcggtttcggacagcgccttcggcagggagcggatgagcatctcctcggccggggtcatggacttcgacacgagcgcggagtagccgccgatcagatcgacgccgaccttcttggccgcccggtcgagcgcgtgcgcgatcttcacgaagtcgtcggagctcttgcaggagctggcgccgaccagcgagatcggggtgacggtgatgcgcttgttgacgatcggaatgccgtaatcgcgttcgatggcctggccggtcggcacgagatccttggcataggtggtgattttgttgtagatgttgtcgcagacggtatcgacgtcatcggccgcgcaatccagcaggctgatgcccatggtgatggtgcgcacgtcgagcttctcctgctcgatcatctggttggtctcgtggacctccatgatattcagcataggtgtttccttttctcccctatcagacgcggtgcatcttggtgaagatctcttcgcgctggcagcggatgcgcacgccgatctcgtcgccgagcttttcgaggtcgtccacgacctcgccgaattccttgtcggcattggaatagtcgacaatcatcatcatgttgaagaaaccgtcgatgatggtctgagagatatcgagcacgttgacctgatgttcggacagataggtgcagacgcgtgcgatgatgccgacagtgtcctgaccgacgacggtgatgattgccttgttcatggaactccctaaacgttaggtacgaatatccagctgccgcctcggcaaatgccggacgtgaccccaagtatagaaaaggcacgtgccaaaacacgtgcctttcaagcgatcgccttacattgtgagacggctcgtttcgccatgccggcctcgtcggatcctagcgcgaggcatccttgccttccttcaggaagaaggagaacgcgagcacgaccacgatcagcaccaggccgaatacgtagccgtagcgggaaccggccacgaagccctccgcctcgcttgcgccggaacccatgccgagcaggcaggtggcgatggacgtgccgattgcgccgaacacctgctgcatggtgttcagaatcgtggaaccatcggcggcaagctcacgcggcaatcccttcagcgcggccgattgtgcggactgctgcatcaacggaatgccaatcatgaacaccacatgcgcaagaatgaagaacaccggcgccgtagtcgcgccaatcgcaaggaacagcagggaaccgacgataccgatgaccgcacctgcgctcaccagcggacgtgccccgacacggtcgtaccagcggcccgtcaggaacgagcacaccgcattgaccacaccaccggcgagcatcagcatgccggctacggaggtattcagtcccaggccacgttgcagctcctgtggagcaaggtacatgatcgccaacgtgcaggcgaacgagcaggtgaccatcagggccggtgtacggaacgaagcgatgccgagtgcacgcagatccagcaccgggttggcaatgtgcagctgacggtatgcgtagcatgcgacgaccagtacgccgatcaccagcagcgccacgaccagcggtgagaatcccatgtcggcgacgaggctcacaccggccaccaggcaaccgaacccaatcacggatgcgagcaccgacaaggcatcgaccttcggacgggtcgtttcgatcggcgtgacgaacgtggccgcagtgcagacgatggcgacgacggcgacgacggcgaacagcatgaagatcgcacgccaggagaaggcgccgatgatcagaccggccaaggtcgggccgatcaccggagcgaacatgatcacgagacccgccacaccgttggcggcgccgattttctgcggagggaacacacgcatgatggccgcatacatggtcggcaacacgatgccggtgccgatgccctggatgattcgtccggcaagcaccagcgcgaacgccggcgccactgcggaaagcaaggaaccgacgaggaagcaggagagcgcgaccagcacgagggtcttcgccttgacccacttgagcaggaagcccacgcacggcaacacgatgccgatggcgagcatgtagccgacgaccatccactgtgcgatgccgatggtgatgccgaacgtgtcgcacagatccggcagcgcgatgttcatggacgtttcggacagcatgcccaaaaacgcgccgacgtataggccgagcatcaccctatgcgggtgtgcgaagcgctctttctcctgtgattgcgcatgcaccgcgattccttgtggacgcatgatgacttgcgattgctgcgttgccatgctttcggacaacgtctttcctctctcgacggcaataggtgtgattggcccgtattgcgggacggtcgttcgattcgcgaaccgcccgttttcgggcaacaaaaaccgcatggccaagcctgatatttcggctaagccatgcggttattcaaacagccgtcaagctaccatgaatcccgattcttcgtaagttcgcccggcgtgtcgcctgcgttttccattgatgcctcacgcgttgtacaggcgttccggcgacagggtctcctgtgtggcgagcacgatgccgcctgccagaccggcgaagcgtccgagcggactgcgaccgatgctcaggttgcgcgtggtcagcgggcgtgcggtcctgtatacggtggtgcggatggcggtgagcagctcgtcgctcgcctccacgatgagcccgccgacgatgacatgcctcggattgaggacgttgcacagcgtcgccaccatgatgccgatcgcctcgcctgcctcacgcaccgcctgctcggcaccgagattgccgtcgcgcagccgttcgatgagctgttccacgctgtccggctcgtcggcggtcggcgaaagcgcctgcatgcgccgtagcatggccggtacggatgcctgtgtttccaagcatccggtctgcccgcaagcacatcgtttccgattgcgcggatcatatgacgtatgcccgatttccccggcggatccgtcgaatccgtggaagatgcgcccgtccttgacgatgatgccgccgccgatgccggtgcctatcttcacttcgatgatcggccgctcgtcttcgggcagcatcgccgcgtcgcccagcgcgcggatattggtgtcgttctccacaccaaccgggcagccaagcgcgtcctgcatgtgccgcaccgcatcgaacgcatcccagccgggcatgatcggcggacggatcggcgcatcctcacgaatgtcgatgcgcgcaggcagcgacaatacggcatgccgcaacggcaggtcggcattcaccgccgatgccatgcgccacagctgttcgctcacccaggccagaaaatcctccggagtgtagtcggctatcgaaatcacatgccattcgtgtgcaagcagccgcatgttcatgtcggcgatgccgagcatggtgtgccgggcgcccacgtcggccacggcgatcagaccaagccgatcgtcgatcaccagtcgttccgcagggcgtccacggtccactgcgatcacgccggaagtcgtcagcactcccctacgcagcagcccgtccacgcatgacgacaccgtcgatcgggccaaaccggtttcacgcaccaactcggccttgctgttcgccttaccggaggagaccagcagcgcgacttcgctcggcagctcgctgccggtaacggccaacgtccacggccggtccggcagggtgaaacgccactgttgtttcgtcgacgatattgcagaccgcttcatcgcaatcctttcaaaaatcgttgagattccaatgctttcgacatacgacagattaatgtcgaattgctgcataaatctgtcgttgaaccacattaatcgaaatcgtatcgtaagaaccaccttaaggaaaacggcgcaagcgcagcagcttccccgtgttggtaccgacgaagacagccatcataagaaaggacccgatatggaaaccccaaagtttgcggtctcgctgatgtgcatggacttctccatcgccggcgagcaggtgagcacgctgagccagcatgccgattcccttcatctcgacatcatggacggccatttcgctccgaacctctccctgagcccggaatggctcaagtgggtgctgccgcatagctccgtacgcaacgaagcgcatctgatgaccaccgaccccgactattggctggagccgctcgcccaggtcggcgtgaacgtgatctcaccccatgccgaaacgctcaacacgcatgctttccgcaccatgaattcgatccgcgcactgggctgcggcaccggtcttgtggtgaacccgctgaccacgttcgaatcgattctgccactgatcgaacgcgtcgatctgctcacgctgatgaccatcgacgtcggcttcgccggccagccgttcatcgacgaaatgcttgccaagatcgagcaggcggccaagtacaagtccgaccacggcctggattacgaaatccagatcgacggctcgtgcagcgaaaagacgttcgccaaactacgcaacgccggcgcggaaacgttcatcctgggcaattccggcctgttctcgctcgaccgcgatctcgacaaggcctgggccaagatgcgcgccaactacgaacgcaccaccggcgagacgctgccggccgaagactgattcggtccgtcgaatccgtcgcggcgacgcctccccatcatcacttggcgcagggccgttccctctccttcatacctttcatccaaattcggaacggttctgcgtcaccctcagccgtagcgacatcccggtacggccacatcgattccaccaacccttcccttgcaatggagcaaccatgaacaacatcgatacaacttcggcaaccgcaatcgccaacaacgagccgatcgtcgccaccgccgacagcccggtcaattccgccacgttgaagaccccggtcgtgcttggcatcgacatcggaggcaccaacctgcgcgtcggcctggtcgacgctctcggtgcactcgtcgattcccgtcgcgtcagttcgcaggaggctctgagcggcagcgatccgatgaccaagctcgccgactatctcgaaggctatcttgccgaaatgctcgacggcaaatacgagctgaaggcgatttccgtcggcttcccgtccgtcgtcgacgctacacgcaccgtagtgttgcagaccacgttcattccgggactgaacaacgtgaacgtgccggaacgactgagccgcttcggcgtaccggtgttcatcgaccgcgacgtgaacatgatcatccggtacgacgcgaaacgcctgaatctgcagaatctcgaaggcgtgaccttcggctgctatgtcggcaccggaatcggctgcgcgctggcggtggacggcaagattctggccggcctgcacggcgtggccggagaactcggtcacatctacgaagcgaccggcaggacctgcggctgcgggttggaaggctgctccgaaacggccgcctccggcaatgcgctggtacgtgagctcgaagcgcaccatccgggcgccttcatcgacgacgcgttcagcgagtatggcaacgagcagttcatcgacgactggctggaacatctcgcctggaccttctcgaccgtcatcaatctgcttgatccggcgaaaatcatcatcggcggcggcgtgacgcagatgaaaggcttccccaagcagcgactcgaagagaaaatcaagcgcatgtcccgcaagccgtacccggccgaggatctgccgatcgtctacaccatccccggcaaatacgacggcgtaatcggcgcggccctgtgcgcgctcgagcagatctgacggcctccctctcatcattcttccggacggaacccgtttcatcctttcttacgggcttcgtccgggcataataatcacagacgatcaccaaccgacaatatagaacattcctgttgtaaggacgcaacatgaccaacgcaacctcttccatggccggcacctccgccacccgtagtggatatggcccgctgatgaaattctccctgctttccatttccctgctactcacctcgtcgaacgcgatttccggcgtgatgccggcgctcatcaagcagtttcccgaccagccgcgtgccaacgtcgaactgttgagcaccgtgccctcgttctcgatgatcatcatgatcatcgcctccggtttcatcgcccgtaaaatcggcgacaaggccaccgtgaccgcgggtctggtcatcgccgccatcttcggtatcatcccgttcctcttcaccggcaatttctgggtgatcatgggttcacgcatcggcctcggcgtcggattcggcctgatcaactcgctggccgtctccatgatcgccaaattcttctccggcgacgaaaaggccacattgatggggtttcgttccgccttcgaatcgctgggccagtcgctgatgacgctcgccgcgggattcctagtgctgctcagctggaacagctcgttcctcgtctacttcctcgccgtgccgattctgattctgttcgtcgccttcgtgccgaaggaaccggacgctccggcggacgctgccatggattccgccgattccgatgccgtcaagcagtcggtgaacggtccgattctgctaatcaccgtcttcctgatcgccgccgtgaccatgtacgtcggcctgaccacacgcctgtcatcggtaatcgccgactccggtttcggtaccatccagcaggcctccaccctgctgagcgttatgaccatcggcggcatgctgatgggcttcgccttcggcttcatcaataaggccctgcaagcacagaccctgaccgtcggcctcgcggcgcttgccgcaggttcgctggtgatctacttcgcaccgaatttcgtggtgctgtgcgcaggcgcaatgattgccggaatctcctacccgaccatgatttcgtatacgttcaaccagatttccgaggtctgcccgaagggttcggatacgctgtgcacgtcggtggtgttggtcggctgcaatctcggcgccttcaccgctccatacacgttgaaactagtcggtggttccgccttgagccagccgtatctggtgtatggcatcgtgctgttggtcatcgccgccgcttatgccgcctatcatctgatccgcaaataaccgcggctgaccgttcatgcacgattcccgaaaacctggcttttcgggaatcgtgcgttttgccatccccaccagaagtacacccatggcctcaagccacctctagggggtatttaattaggattctcattacgaatcaatgagatcccatctaagaaatcgcgcacgattccccaaaaaaatacatctcggggaatcgtgcgcgactgtatctcaccttttcacctagggttgccctgatgatggcatccatcggagcaacctcatgcgatcatggcttcagatttcgcggctcgcggcggctgcggcgaatgccggcagggcacgcggggcattgaagcccttggactcgaattcatcggcgatcttctgggcgatctcatggccacgacccttatcgaccaatgcgatgattgagccaccgaagccgccaccggtcatgcgggcgccgtacgcaccattggcgcgggccacatcgacggcggtatcgagctctggcacggtaacctcataatcgtcgcgcaacgaatcgtgcgaagcgttgaacagatcgccggccgtcttgatgtcacctgcggcgaaagcatccacgaactggtccacacggccgatttcggtgatgacgtgacgtacacgcttcttcatggtttcatcatccagcttgccaagcacctccgccaatgcggcattcgaatcggaagaggaggcaacggtttcggcggtaacgcgcagattggcgacgccgagaatctcggcggcctgctcgcaggtggagcgtcgctgcgcatactggccatcgttaagctgatgcggggcgcgggtgtcgagtacgagtagttccagaccgtacctgtcgagatcgaattccttcggttcgacgctttccacggccgacaggcccggcttgcagtcaaggcggatcgcatggccgaacgagcagcgcatggaggcgttctgatcgagaccgccagtggatgcgccggccatgtcgttctcggacttgatggccgcattgatcagggtcacgcggccggcatcagtggatccatagcccagaccgtacacgtcatcgagcgccagtgcggtggagcaggtcatggcagccgaggagctcaggccagagcccagcggcacgcaagacgagaaggcggcgtcaaagcccttcaccgtatcgaagccggcttctcgcaatgcccaggccacgcctaccggataggcggcccatccttccacgccgccggcggtcaggccatcgaggtccgcttcggcgacggcatccggcgccacgtcggaaaccacgcgtaccttcgtgtcttcgcgcggcttcaatgcgatgaaggtgcgatgcggcaacgcgatcggcaggcacaggcccgcgttatagtcggtatgctcgccgatcaggttcacacggcccggggccgcccatacgccggtcggctcctctccgtagacggccttgaacagatcgacggcgatcttcacgccctcgtcgtgcgagagcggctcaatgaattcaacatcagtcattggtgtgtccttatgctcgtattggttccggtcagccttcgatgtcaatcgggccgagctcgtggaagcgcttggcgatgagttccggcgtggtgtcggagacccaggcggccatgccggattcggagccggccagatacttgatcttgttggcggcacggcggaaggagaagaactgcaggttcaggcggtagttcccgcgacgggcgtcgtggatcggagcctgatgccatgcggcgatgtacggcaggtccatgcccttgccatcgcccttgtcgaagaacgcattgccacgcttcaagagggtggagtacatcacggcgaggtcccagcgttcctgatcgttgagctcgtcgagggtgagcacgtcgcgcaccggggccacatgcacctcgagaggccaacgtgcggcggccggcacataggcgacccagctgtggttgcgcatgacgatgcgctcctcggcttcgatttcggcattcatgagatccttgagcagattgccgccggtcttctcgtgataggcctcggtatgctgcagctcggcttccatcttcggcgcgatgaacgggtagcagtagacctgaccatgcgggtgagccagggaaacgccgatctcctgcccgtggttttcaaacgggaagatctgttcgatgccgtcgatcttggagatttcggcggtacggaaggcccatgcctccatgacggtgcgcagacgggataccggcaaatcggccggcaggccatcctcgtccggatcgaagcagatcacttcgcagcggccggcggcaagcttcttctcccacagcgggttgccgtcgacgtattccacggcctcggaacggcccggcacacgcaccatcgaggggaaacggttctcgaatacgaccacgttgtagtcggtgtccggcacttcgccatcctggtacgggtcgcccggcttacgtgcggccagcggattgcccttggcggtggcaccggggccggcggtgatcggacggttcatacgcgcggtcgccatcggaatccaatcgccggtcagcgggtcgcggcgcatctccggagcggcgtacggcacttcctcgccggccgcgttgagctgattggagaaacggtaggccaattgacgcggatcgttcagttcgcgggtcttggcaccggaaacgtattccggatcgtcgtcgagatagaagaagtcacggccatcggcaagcgtggtcggggtgatacggatgtgttccttcgcatattctccaggagcataggttgcgaattcactcatggtgattactcactttcctgcatctgctcggtctggtgcgccagcacgagctctttaaccaaatcccttgttttcccaaccgaatcgggatcgagtccatcatcggtaatgaccgtgtcaacctggtcgaagcgtgcaaacagcgacaacgacgtgcagctccacttggtgtgatcggtcaaaattatcgtccgatcggcaatgtccatcaatgccatatcggtcgcggcctcaagcgagttcggcatgaggaagccgcgtggaatggacacggaatgcgtgcccaggaatacggtgttgacgcgcagggaggcgaccaccttgtcggcgatcgggcctaccagcgagttggaacgggtggtcacgccgccggttacgatgacttccacgtctttcgattccagcgcctgcaccagttccgccacgggaatggagttggtcaggatggtgattccggaggattgctgcgattcgagcagatgctgtgcgaacacgtaggcggtggtgccgccgccgatggcgatcacgtcaccgggggccacgtatttgacggcttcctgcgcaatggcgtccttgagaccgatgtccatctgcgactttacagagaacagcggctcactcagcaacgtgctggtggtgaccgcaccgccgtgcacgcgtttgagaaggcccttgtcggccagatcggcgatatcgcggcgaatggtcatggcggaaacgcccaattccttggataacgcggtaatacgcaccgcaccacgggtgcgcaaccggctcagtatcagatgctgacgttgtgacgatatcattcgaacattatcgcacacgttcactcaaaataaaaaccggaatgagcgtttcgcgcgtttttcacgacgaaacggtaagcaaacatggtcgaatcgcacaaaagcgcacgcagtatcctgagtttcacacccactccgccgcactgaacgcaggcatatccgtgtagccacagagtcccgacacccgaccgatcggcaatattccacccccgcccgtacgaaacccaccttgacgggagcagcttcccggacggcgccacgattccaccctctcgcccgcacgaaacccgctcctgcactcgtaaccgttccgccgccactcactccatcctgcgtgcacaccaaatccacggaccgcacacccgtgcagccaagcggctctcgcttcgtatgcgaatcaaatggcttggggatgcggatcacttatggaacagtcgctgcaagccccagacggtgacgcgacgcatcgcctcgataacgatggcgttgctcattttcgatttgcctcgcacccgatcggggaacacgatcggcacctccacgattgttccacccgcggccgccacgcgacgggtcatgtcaatctggaacacgtagccgttcgcttcaatcgcgtccaaatccagggaacgcaacatcgatgcgcggtaggctcggaaacctgcggtcatatcgcgcacgccaatccccagcatcgtccgcgcataccatgatccgctacgtgaaatgaaatcacggaaaggagaccatccttccgtacgtccgccgtccacacgacgcgagccaatcaccagatccggtacggcaccggccgcaatcccacgatcgcgatcaatcgattgcccgtcgcccggttccgcaacaatgtcatcgcacggcccctccaccgcgagcgcttccaataatttcggaagatcctgaggccggtgcgagccgtccatgtccatctcgcaaaccacgtcgaagccacgctccagcgcccacgcgaagccggccagataggctggtccgagaccgttcttttctgcgcggtgcagcacgtggatgcgcggatcttccgcagccatgcgatcggcctcctcgccggttccatccggagagccgtcgtcgacgattaggatttcgaccgacggtcggcatgcgaaaatcccgccgacggtcggatgcaggttctccaactcgttataggtgggcattaccacgcagacccgttccgccatagccgcacctcctcacgcaacatccaactcaccatagcattgaacatcggaaacaacgagaccattcggctcacgcctgagagaaccaaaccgttacccaacaaccagagccccataacacccaaccggaggcccacacccaagagaaccaaaccgttacccaacaaccagagccccacaacacccgaccaaaggcccacacccgagagaaccaacacactacccaacaaccacacccccacaaaccgtccgccgccatacatccaacccaaaatgacgtcaagcccaccgctctcagccatatttatcctgacctaggttgaagaatcctccccaacggtgcgaaaatagtgaaccatgggatatgtttctgagaatttttggcacgacgcggtgaacaaggccaccaccgatcttttcaccttcggatacaagcacgtcatcaaaccgtatttcgtcttcaaccaccaacccgacgtggcgcatgatcaaatgatcgaattctgcaaagtcaccaaaaacatcccgccgctcatgtggctgtgccgcgaaatgctcaactacaccgatccggtgctcgaaacgaacgtgatgggcatcgacttcgccaatccgttcggcctttccgcaggccttgacaagaactgcgaaatgcccgtgctcatggatagcgtcggtttcggcttcgaaacggtaggctccaccacctcgcgcccttgccccggcaacgaaaagccgtggttccatcgcctgcctgagtacgattcgatgatggtgcacgtcggtctcgccaacgatggttcggagcaggtgattccacgcgccgagcacgcctggcacgacgcgaagagcatgcaggtgtcgatctccatcgcccgaacgaacgacgataagaccggcgacctcgacgaaggcatcgaggattactgcatgtcgatgcgtcgcgccgcaggccgttccgccatggtggaggtgaacatttcctgcccgaacacgaaggccggagaaccgttcaacgaaagcccggaagcgcttgacaggctgttcaccgagcttgacaagatcgatcgtccccagccgacactcgtaaagttgccattgaacaaaagctgggccgagttcaaggatctgcttgatgtgctcgccgagcataacgtgcagggcctgtcgattgcgaacctgcagaaggaccgcaccggtatggaaataccgcgtgattggaagggaggcctgtccggctccccttgctatgcggccagcaatgcgatgatcaggcagacttaccgtgaatacggcgaacgtttcgccattgcgggcattggaggcgtcttcacgccacagcaggcttacgagaagatccgttccggatcaagcctggtcatgttcatcagcgccctgatgtatcgcggtccacagcagatcaccgtgttgaaacgcggccttgccgaactgctgaaacgggacggcttcgatcacgtcagccaagccgtcggcatcgatgcgtagataaacacgtatgtaaggcgagtacgtgcaatcgcgggaggacggcatgccctcatagcgcttgtcggaattgttcggacgaatccctgattccgacaggcctacgggttttgtatggggtatgccgccctcccgttcgtctgttcgcacgccgcccatccgtacgatatccgttcgtgcgtctgcccgcgcgcattggcggtttatacgtcacctatacgagaaggcgggatcagcggaaggctccgcgcacatactgcgccggatacggcgcttcctcaaccggcacgcccagcttgttcgccgcgcgtagcggccaatatggatcccgtaatgccgcacgtccgatttcgatggcatccgcctgcccggctttcagcaccttctccgcctgcttcggtttggtgatgagtcccaccgccgtcaccggaacatcggcacgtgagcgaatctgctcggagaacggcacttgatagcttggcttgaccggaatggtcacgtcgggaatgagaccgcccgtggatacatccaccaggtcaaccccatgctccttcagtaccttcgccaaatcgacgctctgatcaagatcccatccgcctgcagcccagtcggtggcggaaatacgcaccaacaccggcatgtcgtcgggaatgacggtacgtaccgcatccaccacttcgaccagcatacgaatacggttctcgaagcatccgccatattcgtcctcacgttcgttgatcagcggatcaaggaattgcgacagcagatagccgtgggccgcgtggatctgcaccgcgtcgaaaccgatggcatacgcacgccatgcggcatcgcggaactgcgccacgatcgcatggatttcgtccacgctcaatgcacgcggggtacgcagcgatccgtatgcgttcgcgctcgggcatacggtctgccatccgccgaattcctccggcacgctctcatcgtcgaatcctacggcgaagcaaccggtggaggccttgcgacccgcatggttgagttgcacggccatggtcgcaccggcggccttggcatccgccacgatccatcgccatgcttccatctgatcgtcgctccacaatcccaagtcgcagggcgagatacgtccttccggcgccacggcggtggtttccacgatgatcatgccgaaaccgcccatggcacgcgatacataatgctggtagtggaatggcgtagggaggccatcctgtgcgaatgccgaatacgtgtccatcggcggcaaccagatgcgattacgcatggtcactccgcgcagggtcatcggttcgaacagccgcaccgaacccttcttcttgccttttttcttggttttctcgccgtcgcccatgattccgcctctctcgctcgcacagcatcaccgttcggattatgatgattgccaaagtcctgccggcaatccacccggcattacctgcattctaagcagaacgcccgccggttggggcgggcgttcatggactattcactttcaccaagcaatatcgcaccaagcaatatcggcatggtgactattgttcctgctgattggcatcctgctgagcctgggcctgttgctcggtctgctgctgtgactcagtctgctgctcagtctgtgactgagtctgcgtcgtcttctgctgcagtgtggaggaggcgctcttcgccgtgatgtactgtgccgcgggttgtccgtaatcgttatccatcggagcgttgatcgccgccagataggtgttcatgaactccttccaggccggggtggcgatgtacatgccgtaccagttcgaatggtatacgccgttgatggtcttgtagtcgaaggtgttgtgaatcggatcctgcgcatcggccacggccacgaatgcggccacctgattcggcacgaagcctgccgtggtcatcaccgtgttctcgttcgtaccggtcttcgcaaaggtcttgcggccgccgtcgagctgcgtggtggcggcctcgccgcccgagaccacgacaccttggttcagggcatatgcggtggtctgtgcgatttccgagctgattgcctgatggcaattcgcggatggcaccttcacatcggagccgctgcgatcggtcaccttggtgatggcgataggcgtgcattccacgccgttggcgccaagcgtggcgtacacgttcgccatggtgagcggcgatgcctgcacggtaccgatggtcattggcggctggaacgaattcgccgaatagatgtcggtggcgttcgcggtcgcgttatggtaacccatctgcttggcggcgtccgcgatggaacacaagccgatcgtcgaggccatcgaggcctgcgtggtgttgtgggatttgatcagaccctgcaacggggtttccggtgaggtggtgccgccgccggagttctgtacgctccatgcacgaccggtgaagtagtagtcgttgcagctgaacttcgacatcgcatagctcgtggaggtgaccagcgactcgttgatggaatggccttgttgcatccaggccaccaggttgatcggcttccatgtggaaccgacgttgaagcccatgccgccgccgtcttcctcgtcgaccatgtagttcatcgaagtcttggtctcgtcgttctttgcgtcatcggtcgcgtcataggtgcggttgatgccgaatgccaatatctcgcccgtaccgggttttatggccgctatcatcacttcgaagccggtcggatcatcggcaggcacggtgtcgttcgccgccttcatggcagcatcgttggcgttctggtcgagcgtggtcacgatcttcaggccgccttccttcagcagcttttctcgtgcctcgctatccttgccgaaggccttgttcttcagaatctgattgaccacgtatgagcagaagaagccggtgttgttggcggccgcctggcatccggagctgacatcctgaatgttcagcgtatccttcaggggcgtgttgacggcttccttgtattccttctcactggagatgaatccttggtcgtacatcagcttgagcacgatgttgcgctgattctcggcctcttcctgattggcttccacggaagggtcgaagttctgaggattcttggtgattgccgcaatggtcgccgcctgcaccacgttcaggtcggcggcggatacgttgaaatagcgttttgcggccatttcgacgccgcataggctgttgcggccgaactgcgcgatgttgagatagccctgcaggatttccgccttggaatacttcttctcgatctgcaccgcgatgagcatctctcgcagcttacgtgcgatggtatcttcggatgcgtggtattcggcgatcggatcgtcatcctctcgggcctgcgtggccagcacgttcttcacatactgctgggtcagggtcgaaccgccctgctggtcgccgcccttgagatacgtctgcacgaatgcgcggagtacgccctgtacgtccacgccggaatggtcgaagaatcgtttgtcctcgcgggccacgaccgcctgctgcatggccttggaaatcttcttgagcggcaccacttcgcgattctgcgtatagaaatcggcgaattcggttttgccgtcgttgtagtagaaggtggagcgctgtggaaggctggtcacatcgaaatcaatgccctccaccgtcagtgacggaatcaccgccttggccacgctgttcgctccaagcacggcaggcaggaggaacacactggtcgccacgccgccacccacgcatagcgtgatgtaggcgagcaccaatgtaagcacacgtcgagcagtcaaagtcttcttcttgggcatgttgcccattctaaagtggcgggtatactaatcaactccacgcccatagccgtcacgtgttcatcacataccggctctaatctcaaaaaatactgaaaacaagccgaaagaccgttaccttcgtgacctgcggatcagcatgcccggctgatagatgacgatcgaccgaccttcacgcgcgatccacccacgattggcgaaatccatgagcgccttgttcaccgtttcacgcgaggagccgaccagttgggccatttcctcctgtgtcagatcatgcggcaccttcagacccgcctccaccggttcgccgaaccgcgaggccagattcagcaaggtcttcgccaaccggccgggaacgtccatgaacaccagatcggagatgcgctcgttattgtcgcgcatacgatgtgccagcacctgcagcatatccacggccacgcgcggatgctcatcgagccaggcgaacagcgcatcgtgctccaaccagaccacccgcgtgccgttcgtcatcgccaccgcggaggccgtacgtggtccgccatgtgggtcgaagaccggaatctcgcccagcagttcaccgtatgcatggatgctcagcaactgcacgcgcttgtcggaggattgtctgatcagcttgacgcggccctcttccagcacatacatgcggtggtcggtgtcgccttcgcggaagatgaaatcgcctttgccgtattccgcatgctgcagatgcggcagcagctcctcggcctcgtctttggagacctgtttgaacagtgcggtgtgcagcagcgtcgtgctttcgtcgtagatcccgttcggcgtaaccacacccatcgcacctccatctccgatcggatcgccctcgaccattcgcgctatattgtaacgcgcctggccgcggcaatcagatgattcaccaccacatcacggctcatgccggtctgcgaacgcatcggatcgacgcgcttcaccgctgatttcacggctttatccgacatcttctcgcgtgacacgtgcaacacgcgcatcattttttcgccgtcgatgtcataggcgagcgtcacatgatgcagtatcgcgccggggcccgtatcgatcgggggaaacctgcgctgcgccgctccgccgatcttgccgtattgcgatgcgatgtcgttcaatccggtgaaccgcacgtccagaccaagttcgcgcagtgccgtgacaagccaatagtcacacagcctataggagtcctcgatgctcacgcctttggcgaaatccagcggcgcgtacagcgagtaggtgatggtgttgcccggttcgatgaacatcgcgccgccaccggtgcatcgtcgcactacctggatgccttcggcttgtgcggcctgctcgttgacctcgtccggcaatgattggaatcggccgatcaccacggccggagcggcccattcccagatgcgcagggtcgctttgcgactgcctgccgccacttcgcgggcccattgcaggtccgtgtccatctgttcctgcgggctgcgtggtgcatcatgcaggaccgttggcttgagaccgcgccatctcgccgcgcattccactgccgtcagctcgccgaattcgtcgcccgtcgaagtgtgatgcgatgcccgcgacgatgcgattcgcggcagtgacgtttgcgattcccgctcttggggaacggagtcatcttgcgtaacggccctgcgaaaggccgtttcaattccctgcatggtcatgccgaccagtgcaacgtccggatattgttgcggaatgccgcggatcgaccgtcccgcgactaacgtccgttcgatgtcaagcagcatctcatgggcacggttctcattgccgtcaatgaaaaaatcgccgtcgatatggcagtacccatcacgaagccgggcggtaacccccacgagtttaccgcccggctgcttgtatacgcctctgcccatcaatcgcgcagctctacgccgcgaccgtcgcggtgccacggggaaccgatgtcggagcacagaatcagaatgccttcgacaaggccccagatgctggccactaccggtccgatgaggatgatccatccgaccaccgtcagcagtagctgcacaacggccttggtggtgttgccgagatagaaattgtggatgcccagactgcccaggaagatgccgagcaggccggccacgatcttctggcggggcacgtatcccggaggcaacggctggccgttcggctgatagtactgctgtgtatacgggttcggctgagtgtagttcggctgcccatagccctgctgcgcgtatgcgttctgctgggtgtatgcgttcggctgcgtatacccgttctgctgggcgttcgggtcataggccgactggcccgtctgcccggactgcgcataataggagccgttctgtccgtaagcctggccggactgttgcccataggaaccgtatgagccatacgttccatccgcggtttggccgtagctctgctgtgcggaggactgctgcccgtaggaaccatagtcggcggccggctgcgtgttcgtggtctggctatggtcggcggccggctgttcggcaccgtattggctgtagctcgactgcgaatcgtttgatggggtcgatccgtcagccgaagcggaaccattgatgtggtcggggttggtgaaattagtgttgtcgtcgttcatggttcaacaatatcgcataaatcgtatggctaccttggcgacttccccgaaaagcccctgagtcatccctgaaaaaatgttccctccgacgagtggcgccgtcggagggaacattcgctatgagcagacttacatacgtgccagaatatcgcggccgacctcgtcggtggaacgcgtggtggaacccagctcctcgatatccgcttcgactgcggtgtcgatgcgtgcggcggcctcgtcgaagccgaggtggcgcagcagcatggcggccgacaggatcgcagcggtcggattggccttgttctgacctgcgatgtccggagcggaaccgtggatcggctcgaacatcgacggatactcgtcggaggcgttgatgcaaccggaggcggaatagcccacgccgcctaccacggcaccggcttcgtcggtaatgatgtcaccgaacaggttgtcggtcagaatcacgtcgaaacgggacgggtcggataccataaagatggtggtcgcgtcgatgtgcagatagtcgtgggagacttccggatactcctccgccaccgtattgacgatgcgctgccacatgtcgcccgcgttgacgagcacgttcttcttgtgcacgagcgtcacgtgcttcctgcgtttcatggccagctggaaggcgtagcgcaccacacgttccacgccgtaagcggtgttgatggacacttcggtggccacttcgttcggggtgccacggcggaccgcaccaccggcaccgcaatacaggccttcggtgccctcacgcaccaccacgaagtcgatgtcgcccggatcggcgagaggcgaggtcacgcccttgtacagtttggaggggcgcaggttcacatactgatcaagatcgaaacggagtttcagaagcaggccgcgctccagaatgccggccttgatgcgcggatcgccgacggcacccagcaggatcgcgtcggtcttcttgatgcgctcctcttcctcttccggaaggatcgcaccgtcacgcaggtagcgttccgctcccagatcgaagcgctcatactcgaattcggcgacgccttcggccgccttctccagagccttctgggcccacggggttacttccttgccgatgccatcgcccggaatgacggcgatggtgtacttcttcgttgtttcactcatagcacgcgactctactcagcgattcatgcttcgaaccggaaccgctcagcaagtggacatccgcccgtcacacggcgaatcatggcgcgaatcatgggcgaatccaaagatggtccagttgatccgggcagatatgggcggcctgaggccgcctaggctgcgatcagctggtaatgcccatcacactcaggcaccaggcgttctcatatgagacttcctcccactgcttgtagcgaccggaagtgccgccgtggcccgcttccacctcgatcttcgccacggcgtccacgccggcgcgctgcagacgggccagccatttcatcggctccacatacagcacgcgcgtatcgttcatcgacgtggtgatgaagattctcggaaacaccgccacgcgcgcgtcgtcggtggattccggcgcattctcatacggcgtgtatcccttcatataccggtacacatccgcattgtgcaacggatcgccccattcatcccattcggtgacggttaacggcaacgacggatcgagaatcgacgtcaacgcatccacgaacggcacgtccgcctctatgcctgcatagcattccggcgccatgttggccaccgcacccatcaacaggccgccggccgaaccgccattcgccacggtacgcgacggcgaggccagtccggctcgttgcagggcccgcgtggcatccacgaaatcctcgaacgaatgcttcttgttcatcagatgtccctgttcataccaagcgcgtcccatttcgccgccgccacggatatgcggcacggcatacagcacgcctcggtcgagcatgctgatgcgcgacaccgcgaacccagggtcggaactgatctcgtacgcaccatagctggtgatgaacatggccgaatcgcaggtcggcacgtcgcgcctccacaccagcgacaccggaatgcgttcgccgtcgcgtgcggtgatccacacacggcgttccatatagtcgcgcggatcgaaatcacccaatacggtggcgcgtttgagcagacggtcctcaccggtggtcgggtcgatgtcatgcagttcgcccggccgcgtgtaactggagaaggaatagcgcacgcgcggtgcatcgtatgaaggattgccacccacgccgatcgagtacagtctgcgggtctcccccggcatgtcgtcggcggtcgcaccgtcggaagacgtcatggccttgcgtgagatgccgtgtaccgcggatcctttgccctgcgccgcctgcaagacgtcggcatggccatgcagattgcgcgcgtggggtcctgcggtatcgtcggcgcccatgatgtcggagccaagaccgcggtcaagtgcggcccacacttcggcccgctcctcattgacctcatccacggattcgtctacgtcccaatcgtcttcgagcgcatgcggcacgagctcggtgaaacgccacggccggcctgccagaaaatcctcggctgcggccgtcttggtcattacggccacgtgtggcagactttccgcacgatactgcaatgccacgaaatgccgatgaatcgcgataccctcgatgccgaggccgtgcgcgccctgcaaaatggcgggattgcatggattcgagtatgcagtgccgatcggtcgggcgaaggcgccaggttcgacggcgtcgccatgctcgcagccgtatggcgatccggaagccacgcacactccctcacccaagcggtaaggcggctcatgcgaacgcatgtcgatgacgtcgatttcgaaattcggattcagcgcattgtggtacaccacggccagcggaatatcctcaccatgctcgccggcgccttcgaagcatgcgaagctcacatcatattccacatcggcttcgcgcggaatgaacgcccggaactcgccttcaggcgtatcggtgggcagcagcaacacctccgtggtggtcttggaaccggtgccaatcacgatgttgcgctcgtcgaacgacagaccgacgcccacccagaaacgctcatcggcttcacggaacacttccacatcgtcggcgaccggcgttcccacatggtggcgcataatcacatacggacgccacgcatcgtcgagcagggtgtagaagacccattgcgcatccggcgtaaaacatgccccggcgatcccctcgaacacctccggcagttcttcgccggtctcgagatcgcgtatacggaaatcgtagcgttcatcgccacgcgtatcgatgccatagagcagccaacggccgtccttggagatatccatgccgccgatgcggaagaaatcgtgtcctttcgcctcggcattggtatcgaatacgattcgttcaccatcgatcggcacaccggcttcgatatgcggcggatcccaatcatcatcgtcgcgaatcggcaggcggcactgcactccgtattgctcgccctgcttggtacgggtgaaataccagtagccgtccatgcgcgtcggtaccgacatgtcggtttcctgcacatgcgacttgaattcctcgaacaacgtggtgcgcaacgttttcaagggttccatacgcgccgcgcaataccggttctgcgcggccacatattcccgtacttccggtgaatccttgtcgcgcagccattcgtagtcgtccacgaacgtatcgccatgaaacacgcgctcctgaggtacccgcttcgcgcacggaaattccagcccactctggttccggcccagcccactctggttctgctccaatacgccctgcgcaccacgattttcactcatgcacgcgattataccggcatgattctcccaaactaccgacgctgagtcgggtctaaccatcggcagattggaaaaccacccaaactaccgacactgagggcctcccaccatcggcagattgagaaaccacccaaactaccgacactgaggtgggcctcagcgtcggcagattgcgaagaccttacttgtcgagttgctgcttcaggtacggcatcatggttttcatcagattggaccccgtggtgccggtgaaaacaggcacatcggtgaccggcaccggctgcgtggccgcgagtcccgccatcgtacccagacttcctgcggattcacgcggcgaaagctgccgtatgcctaccgcaagcacacgccccgggtagcgtttggcgatggttgcgtatgtggtcggatccttctgaccgtcatcgcctatgagaatgaatttcatgtccggaaaatcggccatcagctgttccgcatactcgagtttgtgctgcacgccggaaggaatgaaggtcttcggtcgcggatcgagatcgcgcagcagaagcggtccttccgggaatccgtggtaggtgatgaagtgtcggatcgaactttccacgttccatggcgatgtcgacaggtagaagaacggtgcatccggaaacatgtcggcgatgcggttgaacagtaggttcatgcccggcaccggtacttttttcttgggatcaagcagcagcagattgtaggccgccttcatcaggctcggtgcctgcgtgaccatgatcgtgtcgtcaacgtcggagattacgccgacttttgtgccgcttggtatcgtgaagagattcgcggcgaccggtttgcggctacgcacgcgatacgacacgttgtggatgcccggttccagcgaatgttcggcgaccagatcgagatagcctgcggaatcggaagcggcgaattcactggagatgtcacgtgacctgtcgacgtggtcgtacacttcggatatgccgacctgcaccgtttccaacggtacatcgtcgatggcgatacgcactttcgtatgcggtgacggaatggtgagcatgcctcgaatgccacgggtcagccgtccggactgacgcttgaacggaccgaaaacggtacggcatatcagtcgggaatagtgctcggtaccgtaaccgacatacggctcgacgcgcggataccagttgagacggcgcaccaatgcggtggaaaaacgcaaccagatgccgaatccgtacgtgatggcgcgacggcagaaacgaatcagcggcggcttgatttcgatgcgctcatgccgtgaggcggcgtcgaacgtggtgacgaccttacgtgcgggaatcggcacggtaggcatgtcgtcactatcactcgcatcaatctcgcgttggggcaacggctgtggttcgttcatatcctcactataaaaggcccgggagaacaacccgttacccaaacgcgaaaatcagggaactttcagggtactttgagcctcgcacagtcaactgttcggcggctattcggtgactattctcgcgtattccccggaactgagcagatccggctcgtcgtcttcgagctcgatcttgaagatccagccttcgccatacgggtcgttcgtgatgatgctcggatcatccgaaacctcggcgttcacgtaccgaatcgtgcccgccaccgggcacaccagaggggtcacggccttagcggattcaagctccgccacttcatcgcccgcctcgacctgggcaccgacctcaggcagatccacgtacacgagctcgccgagctgttcggtggcgtattcggtgatgcccaccatggcgggttcgacggaggcgtcgacccacacatgctcgtcggagtattcgaggtgctcgggcacttcgagattcaacttgttgtcgttatcttcgctcatgtgcctagcgtaccgcaccggacggcatggcgcctaccacttgcaccacggtgccttcggggcagttgtcgtagatccacttggcatccgcctcatacatgttcacgcagccgtgcgaaccgtagtgcaccggatcgccatgcgcaatgccgtaaccattccagcttgccgtgtggaacccttcgccgccgttgaaatagccgacccatttcacgcctttggagaggtaacgcgaaccgtcatcattcaggcccgtcatatcctgcacgttgtatttcagatagatgtagtaggtgcccagatcggtttcatgcttgccggcggttcccgtgcacaccgggaaggtcctgaccgcctgatcgttctgatacacggtggcggtctgagaggcacggtccaccacgatgcggtactccgacttcttctgcacggtgtcgaatgcgtccacgtcgctttcaacgggaatcgtcgcgccttggccaccctgcagggcgttcaccaccttcggggtaagggcggacacgttcttgaccttcagcccatccacacctttgactatggtcaccagcaccgtgccgttgctgtcgacggcgtcttcctgtgagactttgtcttggttgagctggttcggcacttcctgttcgagatagttgccgattgcctgttcgtcataggtcagggagatcgtgcccttgtccagatcggcattcggcttgatccaggaagcgacgacatcgaccggcagttcgaaggtcttgtccttgccgttgtcgagtacgatcttgttgttcaatcgggcgttcgcttcgtcggtggcccgctgtgccgcgctcacgctgaccggcatatcgacgttcctgtagctgatggacgcggtgctgttgccacccggtacgttgatggcgttccgtacggcggccagcaccttgtcggtttcaggagtgcgtccctcccggccttccacggtggtgaaggcctgctcatcggagtcataggagatggtggaggcgaccgcacgctcatcctcatccacgaacttgtcggtcacatacgtggtgagatcaagctcgttggtctgcgccgcaagcggcacctcgcttttgtcgaaaggattcacggcattgatggcggccagcacgccatcgtcatcatgcttggcggcaagcagattggagacggtcttgttgatgttgaccgtcacgccgagatcggtgagctttgccgtatcggtgttgccatcattgtctttgatggtgatggtggtgctcttcaccgcgtcgctgacggtatctttcagctgctccctggtctgcccggcaacgctggaaccggcgaaggtcacgcccggagcggccttatcctgaaaataccaacgtgcaacgaagaatccggagacggcagcgagcaacatcacccccatcacgatgagggtgatgatcagcggccacttgttttttctctttacttccggcatggcgatctcttcaataggagtgaacaccgccggtgccaccggaagcggtgcgatcgtagcggtatcgtctccagccaaggcttgctcacgctcgtcagacatgctgctgttccttatattcttcccctattcacaacaacccccaactatacgccgtgcgatgaccaatttcggtatctcgctcacggcagctcgtgtccgagccattcctcaatcatataccgtgcgatcgtcgccttgccgggagcctccatacgacccgaaatcaactcgttcatgtattcgtcacgggtcacccaccgtgcggaaagcgtctcctcgccgtccactcgtatgtcggtggtcgtggcaagccctttgaacgccatcatcagcgacgcagggaacggccacggttgggagccgaggtatcgcagctcccccacttcgatgccgacctcctccctggcctcgcgacggcaggcgtgctccagattctcaccggcctccacgaatcccgcggaaacggaatacagcccggcattgccccatgcgctgttgtgctgcagcaacagacggtcctcatggtcgatgaccgccgtgatcacagccggttccacacgggggaacagcagtctcctgccatccgcttcgttggtgcaacgttgggcccagccgccgagcgccggttcggtcagcgctccacaggtcgggcagtggcgctgacgcgtatgccacatacccagcgagatggcggtggtcgcctgaccggcctcacgggcgttggcatgcggtgcgaaggcgcgcagatccacccagtcgaagcgttccgcggcggattcgagcagcgatggctttcctgaaacggcttcggcggcattgccttcgtcgaaggcgtcgtcggcaccttcgtaggcgctgtcggccacgggagtttcgatggcatgcacgcgggtcacgtcgactgccaccacatgctcgtcacggcaaccgccatacgagccgaggaagatggcgagcgccgtcggatgcgagcgtagttcggcggcgacgtagcctcccggcagttgcgcgagtcgcatgttcacgttggcatagtcggcgatggcgccttgcccgtgcggtaccgccactttgccgtctttgacgaggatgactttcgtggccggttccggcagtacgttcgcgaataggtcgggttcgcctctgcggctcacctcatagtcgatgtcaccttgtgccaatggcaggaatggcagtgcctgcgtcaatgccaaaggagaaaacacgctcatcgcattcctttccccgtatgaaatatctgaattccatatagtatccgcatccggcaacccacgtcatccgaagcgcgcagcgagtcggcgatggcgtggtgagaaacggatgctattgaattctacgcacgagctggcgcaatgcttcggccaccgcttcgggatgctcgtatgcgctgaagtgtccgcaatcactgattacggtgaaatccacggtcgtgccggtcatcgcatccgctaccggacccatcacttcgggcggacttgacgggtccttgtcgccgcagatcaccgcgcttggtgcgcttaccttcgccagcacgtcgttcaggtcagggcgtcctgcggccatgcgttcacgccaggcgatgccggctgccggctgctcattgatccacagcgtgaattggcgagcgtattcggtggattgcttgatgctggagtccgtctcgtttgccacggcgaatcccatcaccggatcatgcgtgccggtggcttcgcattcgtcggcgatggcgatgcgcctgccacgcatcgccgccgaatccgcatcgcctttcgtgtcacatagggcgaggcccgccaccgcttcgggatgcagtcgctgaatgtcaaggatcagatagcctcccatggaaaggcccacccagatggccttctcatggccggcctcacgaatcatgtccacgtatgcgtcagccatgcgatcaagggcatgcgggaacgtgccgtccgcgtccttgcctccgctggcttcgtcactcggaatcggaccttcgcccgcaccgggcatgtccggtgcccagatcgggaagcgtgtcataccgtgctcgtcgcagattcgcgcgagtgcggcggcgcactggtcccacatgcggtgatccaccggaaatccgtgcaccaacaccacgggaatcccctccccttcgcgatacacggtgttcttcaattcaatccccatgtcatgctccaatccgtctcgcgtcatctgccggcccatgccagcgcctgcctcacaatcgttccatatccattgcccatctgcccgaggaacgtgtcaagcatcgcaccgttcggatcgacccattccacatccagcgtctcgtcctgaggtctgcagtcaccggcgatcggcactacgtagcacagtgcaatcgcatgctgccgggcgtcgaaataatccgagatgccgggcgtggggaagaattccgccaccgtgaacggctgcaggctggacggcagcaccggcaaggcgatatctcccagatccttggcgacgttgcgggcgatcgcctcacgaatcgactcatggtagagcacgcgcccggcaatcagcgtccgttcgatgctgccgtcatcggagacacgcagcagggaaccgacctgcgcgacgcggccgagttcatcggtgcgcaccggcacgatctgcacgtagggaatcggcatttcgttgcgcatgcggttgatttcatcggagccgagccacccgggaggattgcccgttccgcggatgaaatcctccggtgtgatgtcgtcgaattcaccgcgcctgcgtccggcatcgaaatcgccctcgtcgggcacctcatcattcatcactggcatgcctcccattatcgcgcacctcgcgtaacgttcaagcctttttcgttcctcccatagcggacaccggaatgcaagacgaatgccggaggttatatactgcaccacacgcgaatgtaaggagcagctatggcaacgcatgcagtcacctctgagaacttcaacgaggtcatcgagggcaacgatctcgtattcgtggatttctgggccacttggtgcggcccgtgccgcgcgttcggaccgactttcgaaaaggcgagcgaagcgaaccccgacatctatttcgccaaggtcgatatcgatcagaatcctgatcttgctcaggcggccaaggtacaggccgttccgacgctgatggtcgtcaagaagcagcagatcgtgttccagcaggccggcgccctgcgcgcctccgatctggatgatctgatcggacaggccaaggcgttggacgtgaacgccgcagcttccggccacaccggagccgaacaataggcggaagtaccccacaacggcaatgcacgcccgtcgcgatcgacaagccatgattgcgacgggcgttcgcatgcacccccgtgtatcttcggctgccgataatcgagcgcttagggtaaactgctcttttagatgcgcgcattccggcgaagcctttgcggccgcgtgcagaacccgaattcgtcgaggcccatgaagtcgctttataggagcagaatggctaaccacagcaagcatggacgcccgtttaccctgagcctgccgaacaggtcccagtgtgtgaagatcgtcgcaacgttcgcggcggtggggctgctggctaccggtggcattatttcacgtagtttctatacgtcatccacccaggcggagccgaccacgcgtgtcaccgcctactccgccaccgatgccgaagcgtcccgtggcaacgcccgtgagtctctcggcggtgataccgcatatgtcactgtgaagatcaacggcaagtcccgtgtggtgccgggcaccaatttcaccaacgtcaagtccgtgctggaagccggcaacatcacgcttgaaccggaagacaccgtctccccgtcgctgaccaccaaagtcgatgagaagaccgtaatcaccgtcagccgtgcaggtgcttccgtcgaggtctccgactcgtcgatcgcattcaatgtcgtgaagaaggagactccctccctgccgaagggccaggagaaggtcgagaccgaaggcgaggaaggcgtgatggaatccacgaacctcgtaactcgctccggcgacaccgtcatctcctcgaatatgatcagctcgtacgtgaagaaagctccggtcgacaaggtggttctcgtcggtaccggctccacttccacgtcatcgtcgtcttcttcgtcctcgtcttcgtccagcagcaccgcttcggtcggtaccaccgtgccggctggcgagatgcagcagtgggctcatgactatctgatttccaacggttacaccgaggccgatttcactgcgaccgtgtacatcatctcgcatgaatccggctggagcgtgtccgccacgaatccaagttccggcgcgtatggcctgccgcaggcactgcccggcagcaagatggtcagcgccggcgccgactgggccaccaactaccagacccagctcaagtggttctggggttactgcgcctcacgctacggctccattcaaggtgcctacagctattggctcgcccataagtgctactgattttcacatcaaagaccgcaaatcccgcacgcgcaaacgtgcgggattttttcatacgtcgatcgcaggtccggtcacctcacccaggcggcggagacgatatcttgcgaaccgtgccgaaaatggcaccccttctcgatatacttgaggcgttttttggtgatggagccttgccggactgaaccgtgtccaggtaaggctccatcaccaaaaaacgcctcgtctgtctaatgatcagacagcggaatcgaacatcagccttcttccgatccggacttcttgcggccgcgcttcttcatcacacccgctttggcgtcagccacggagaacatcgccacacgctcttccggatagaaggttccctgcatggactggaacgtcacctgtccgtcctgaggttcatcaagcttgaaatacttcaacacggagtcgagaaccatgacatccttgatgttcacggaggcggtctgcttgccctccggcttgctgaacttcacggcattggcatcggactgcttgcatggtttgacggcaaactgcttggtcttgtcgttgatcagcaccttaacatacgccggatatccgagtgcgattgcggtcgccttattgaaacgcaccacatccttggtgactagcatggagagcttgccacgcggcgcagtcatattaacttcctcaaaaccctgtaataccgacatgctttgctcctattcgaaaacagttttaaacaaatttattaataagtgtactgcttaataacggtaattcaaatccgaataggattaatttttgaatttaatatgatcccgttccgcggaataccactaaaactgttttcgcaagaatggccaaatcacctgtaatggaccagttttcgatataggaaacgtccaaatattcactttgctcttgggaaagatcggagcgtccggaaacctgccacggtccggtgatgccgggcttgaccaacagtcgcgccgaatataatgacccgtaccgcgccacttcctcaggcagtgctgggcgcggccctaccaacgacatgtcacctttcaagacgttgaagaattgcgggaattcatccagtgaggtctttcgaataaaatgaccgattttagtaatgcgcggatcgtctttcatcttgaaaataaaacgatcggactggccattttcctctgcgagtttcttcttcaactcctcggcattggtaaccatggagcggaacttatacattttgaacgggcggccatgcaatccgatacgtgtctgtgagaagaacaccggaccaccatcatccaatttgatggcaatggccacgcccagcatcagcggagaggatatgatcaacgcaagcgccgagcaaacgatatcgagtacgcgtttgaccgcatacgcggagttggtgtattgcggcagactggccaacagcacgggctgttccgtcgtgttgcgcaggtacaggcgatggccgctgatgtcggccaatgatacggacagcgccaattccatgcccaaggattcgatggccagtgacatgccatgcagcatttcggaatcgcgcgatagcacgtcggctatgtacacctcctgaacaccgaggctttcgcaggtgcgcgggaatgccgaattgaacggaattaccttgagtgtgtcggcaccgggaatgttgggattcggtacgaatgaggtgaccacgtaggcgtcgggctcatgcagatccgcttcgatcgggcagactgcaatcggttcatagccccaattggaatagtcggccatggtgcgcagggcggcattgatgccggcggatgatccgaccagcacggtcttgtatttgcaccgcccgttccggcggttgcgatgcaggctcatacgcatttgccaacgttcgatcactgccagaaagaacgcgatgaccggtgccgtgatcagtgcggtacggggcagatcgagattgaatgtgaacgacaggctgcagtacagcagaacggtgagcagcgaagcattgatgattttcgcatacagttcataaccatcggccatgagatgtcgatggtacgtgccggcaagtgccaggcacagcacccaaatcagactgaagcagaacaggaacagctcgaacggcatggatcgcatgatggtgacgtacgcttcgccattgaccagcagactgatcagcagcgacagcagcatcaccgcgatgtcgaggacgaccatgcaacttacgaaagcataccgccatcgtggacgtcggtgtgcatcatgcatcccccgattccgcgcactgcccttgtctccagtcgggaacggcgtattggagaaggtcatcggctcgaaagacgcggaaggttggccggaatatgcctgattctgagttttcgcatatgcctgacggttcgtatgcgaggaaatcatatgaatctcctgcgtacgggcatacccgtcaaaatcgattgcctcaccctgcatgggcatacggtcctcttctcttcgcctcattcatcggacgactgatatcacaatatcacaagagtcccccgacatcgggtgtctcaacgctgtatgggcgcatcatccaaggaagcacaacgattctgtaggaaaaatattcccccgaagtcggtggtatgcgactatgtatcgagcaaaaagggaggcagtcggaattcattcaccttaatccgaagtgtcggattcagaggtgtcgttggacgtgcctgagctcgatggtgtggtggggcttggagacggatccacaggagtcgtcgacgaactaccgtcatccttcggtgtttcggtggcactttgcgaaggcgattcggattcggtggaggccgacggttcaggtacggttgtggtggcgccacgtctgtaggtgttcgtgttgccgttcgtattggtgttggcctggttttgcgcgtcaatggaggcgttcacactgtcggaagcggaggttatgccgctgacggcgtcctgcatggccttggtgtccgtgctgttgccgtcaatcagcgcctgtgcggtgtcgatggcgttttccagcgccacgcgtgtggaattgtcggccaccttgtacaggctgccatccagtagcttctgcgcggcatcgatggcgtcctgcagattcttacgtgcttgatcgatggcgtcctgcttcgttttggctgccttgctgtcagccacggccgtggtcgccgaagtcagcgctttggtggtctccttgatgccactgatctgtttgctcattgagcgggcatgctgacgtagcactgaatcggactgtgatgcttcgcatccgcctatggtcttcacgttttgcgctttaatgatcgcatcgttgagcttcgtcaacgtctgcgcgtccatcacttgattggcagcggtgctctgcaatgcggtcgccttcttcagtgcagcggccatacttgtattggcggaatcgtacttgtttttggctcgttcgcatgtcgtgacggcagcgcgacgttcctgtgaggtctgacgattatgccatgtcaggatcagaccgataatcaccgccaccgcaatgatcgccgcaattactcctatgatgatctttttggcattcgatggctgtttaggcaggattggaacgagtttcagcggatcatgttcagggtcgttggaaatgtcttcgatggagccagccgtcttggttgcggcatccgcagcgttgtcggaggacggcacatcgaacgcctgcggaatggatgaatccgccaacggcatggtttcagcgacatccgtgaccttggtggtcacaaccggagtttcgacggcaggtgccgtgatggtcgtcacaggtgcggcgttctcggtctccgcgtcaagttcggctttgcccatggaagagatgacgcgtccactctcggaaagcggctcctcagtggcgaattccgactcggagaagctcagcggtggaatatcccagaacgtatcgacgatatcacgggagcggctggccaacgcaccttcaacaggcttggagtcatgctcgtcgttacccatacatcctcaattccgtatgcatctgccgataccggctcttaagtcactagtttatattccgttgctcacaatatgccagaacgcatatgaaagggctcccgccaatcgacgggagccgcaacaacggcaatcagtgccttttgcccttatgggtactgcgaggcgctccgtcttcgtaatagtagtaataattcgaatgcgagtggaccttcttcgggtcggcaaagttgaagatgaagccgagcaccggcacttcagcggtatgaagcgtatcggcgacctcctgcagctccttcttctcgcacacaccacgaccggtgacgagcaccaggcctttggcccaacgaccgaatacggcaccatcgttggatacgctcagcggggcggtatcgataaccacatagtcatactgggtgagtgcctgctccaccatgagcttcatggtttcggaacccagcaacacaccagcattggccgggcgcttacccgcaggcagaatgtgcaagctctgcttccaatagttctgcaccacatccttcggggtcatctggccggaaagcacgtgcgccagtccggcggtgccttcgagtccaagatgatgggccacggatgggtgacgtagatcggcgtcgatgagcagcaccttcgcgccatcttcggccagagcggccgcagtgttgatggcagtggtggtcttgccttcggacggcgacgtggaggtgatgacgatcagttgcccgacgccactggtcttgtcggtctgcaggaattcgatattcgtgtggatgcggcggaattcctcggcaatggcaccgttcggctgcgatacgatgaccggacgcttttcggtaagagattcatcctgcggcacggagcccaatgcggacgaaccaaccacgccacgcacgtcggaggcatcctcgaccttggtgttcagcaaatccttgatcagtgcggcgaatacacccacgataatgcccaaaaccacaccgacggcaagatacagcgcggttttcggcgaactcttcgaggtcggcgtctgggccttctgcacgatggacatcttcaccggcgacttgtcggaggtggagtacaaatcgttctggatgacgtcctgcagggattcggccaccgcgttggcgatgtcggcggcctgcttcggatcgccgtccactgctgagatgtttacgaacgccgtattggtggggttggtgacggtcagctgatcagccagttccgcaacggtctcgtcaagaccaagctcgttgataacgggcttgagcaccttttcggtggtggccagcgtcggatacgaagtgatctgattggaaatatagttgccgccagtgctctgttggctgatgtcggcgccttcctgagaggcgttataggtagccatggtctgagccgtcgccgtgtatttcggcggagccaggaaggtgtaggtgctcacaccagcgactaccaccacgaatgcgatgatcgcagtgacgatatgtttacgaataattgtcagcagatccataagggtgatgccgttatccgcctcttcagataccccttgcggcacgacaacctgctgagtgttagtgttctctgcagaaaccactgaactctccatctcatgtgtgtaaatcaaagcctattctagaatgtcccctcgaagtcaggggacaatcaccgcttgtcggtgttgggcacgagcatgatctcaccgtcggcaataccttgcaaatgctggccgtacgggctcttaccataccgttcggcggactctataagctgctcgcggtcaatccacccgttctcgtaggcaatctcctcgacaatggcgattggcaggccctgcgcgtgctgcacagtacgcacgaactcacccgcctcgaacagcgaatccatcgtgcccgtatccagccacgcatacccgcggcccagcgtacgcacgttcaacgcgcccgcatcgagatacatgcggttgaggtccgtgatctccagttcgccacgcggactcggcttgacctgcttggcgaaatcgaccacacgttcgtcgtagaagtacaggcccgtcaccgcgtaatgcgatttcggcctggccggcttctcttcgatcgagacggccttcttgttctcgtcaaactcaactacgccgtaacgttccggatcgtccacataatagccgaatacacttgcgccctcgccggattccgccttgcgtaccgcgccgcgcagcgtagcgcccaaaccattgccgtagaagatgttgtctcccagtaccagcgcgcacggttcgccgtcgatgaactcttcacccagcaagaatgcctgcgccagaccatccgggctgggttgcaccttgtaggagaagttcacgccataatgcgaaccgtcgcccagcagcttttcgaagttcggcagatccttcggcgtggagatgatcaggatgtcacggatcccggccatcatcagcacgctgagcgggtagtagatcatcggcttgtcatacaccggcagcaactgcttcgacgtgaccgtggtcaacgggtatagacgggttccggatccgcccgccagaatgatgcccttcattgacttctccttacctatggcgtcccttcgatgaaggagacgggttcagttcttcagttccttggcgacatatgccttcagggattcttcccaatccggcacgttcagaccggtccgttcaatcttcgcgaggttcagcgccgaattggtcgggcgcggactgaccgggttcttcgcattcgcgaaatactggtcggtcgaaattggcttgaccttgtcgccgttgccattcgtttcatcgaacaccgccttggcgatgtccgcccaggacttcaccgcaccggaaccggtcaggttgtacgtgccatattcggcgttcgtatccagcaggtggaaaatcgcctcggccatatctgtggtgaaggtgagccggccgcactgatcgtccaccacggtcacctcattgagcaggtcgttcgggtcggccacgcgatcggagagcatcatcatggtcttcacgaagttatggccttcaccgatcacccacgagctgcgtacgatatagtggcgaggcacgttcgccacggcgatgtcgccggcggccttggtctgcccgtacacacccaacggcgcgaacgcctcggtctcgctgtgctccttctcgacgccgtcgaacacgtagtccgagcttacgtgcacgagcgtgatgttgtgttccttggcgattccggccagcagggccggtccttgcgcgttcgccttccatgcgatgggtcggccttcgtcggtttcggccttgtccacggccgtgtaggcaccggcattgatgatcgtaccgtacaggctccaatcgaactggtcgtattgggtcgggtcggagaagtcgaacgtgtcgatgtcgttgaattcaaagccttgcagaccgtgggtctccacgtagtcgcggattgcgtggccgagctggccgttgcaaccggtcaccatcgtgcgacgcggcgccatgggcttggcgtccttaagcattggatgatgcaggtcggcttcgcttcgttcggattcctcaagtgggatcggccacggaatgttcagttccgggtcggcgaggttcacgaaagtgtaggtcttcttctgttccaggctccagtgcgcgttcaccagatacgtatacgcggtgccgtcttcgagggcctgaaagctgttgcccacgccacgtggcacgtagatcgccttcgacgggtccagtcgggtcgtgtacacctgaccgaagctttcgccggggcgcaggtccacccacgcaccgaagatctcgcccgtcgcgatggagatgtacttgtcccacggttcggcgtggatgcctcgcgtcacgcccttcttcgcgttgaagctaatgttgttctgcaccggtccgaaatccggcaggcccagttccagcatcttcgctcgttgccagttctccttgaaccaaccgcgattgtctccatgcacaggcagatcaaacaccagcaagcctggaatgttcgtctccgtgaccttcagttccttctcaaaatccatatttcccatctctccatcagaccattcgaatgcggatacgacggattgggcgatgagggactcgaacccccgacacccaatccttgccaagcctcactgaccttgggccttgtagcgcgcctcggtcgcggccttggtcttctcccaccactggcggttttcggtgtaccaatcgattgtctgcctgagtcccgattcaaaatccgtgtgggtcggggtccaacccaactccgtctgcagcttcgtcgaatcgatcgcataacgacggtcgtggcccgggcggtccttcacccaatcgaacgcatcctcactctgccccatcatcttcaggatcatgcgcaacacggtgatgttgttcttttcgccgttcgcaccgatcagatatgtttcgccaatacggcccttggtcagaatcgtccacacgccggaggaatggtcttcggtgtggatccagtcacgcacgttctcacccttgccgtacagcttcgggcgaatgccttccaaaatgttcgtaatctgacgcggaatgaacttctcaacatgctgatatggaccatagttgttcgagcagttcgaaatggtcgtgcgcagtccgtacgtgcgagtccatgcacgcaccagcaggtcggatgccgccttcgtcgacgaatacggcgaactcggatggtatggggtggactcggtgaacttcgccggatcatccagcgccagatcgccatatacttcgtcggtgctcacatggtggtagcgaatgccgtatttgcgcaccgcctcgagcaggcggaacgttccttccacgttggtatgcaggaacggctcgggatcggcgatggagttgtcgttgtgcgattccgccgcataatgcacgatcgcgtcatgccccggcacgatacgatcaagcagatcagcatcgcagatatcgcccacgaccagctccacacggtcttcgggaagtcccgcgatgttctccggattgcccgcatacgtcagcttgtccaacacggtgacgtgcacatccggatgattgttgaccacataatgtacgaaattcgatccgatgaagccgcagccaccggtcacgatgatgttcttgggagtaaaggtctcttcagtcatgccccgattctacagctccccatcaccacgccaccctactgatatttcatgatgaggctggctcttatgcaaatcggcaaaagtggtgtttcattccgttcgatcagatccttgcaggagcggtaatcacatagtgacatgaaaagaagttcccaccccagcatgaagcgacattatcatcgccatgcccgcaaaatcgtccgttctcattcggaacaatgctggatcatacgccccgtattaccccctatagtagaattccactcgggagaacggactaggagagaatcatgaatgggaacaatcaaagcatggaaagcaatggcacgcgtgtcaggcatgcagatccgacccattcccaaatcccagatgaggtgtcacaggtgagaaagccactggttctgttcttggtgattccctgctaccgcgaacaggaacaactgcccataaccacgcccatattggaacgcaagatgggttccctgattgacgcgaagatgatttcgcagtccagtcgcatcctgtttgtcgacgacgggtcccaagaccatacctggcaggtcattgaaggtctccaccgtgataatcccacgcttttccatggcatcaggcttgcccaaccgcggtcaccagaacgcacttctggcgggtctcatgaccgccctcgaacaaggctgcgacgttgccgcaagtatggatgtcgatttgcaagatgacgtcgacgccctcgaccgcatgctcgacgagcatgccaaaggcgcgcaaatcgtttacggcgtgcgatccagccgcgacaaggacacttggttcaaacgcaccaccgccgaggctttttactccgtccaggcatggatgggagccgagaccatccgagaccacgcggactacaggctcatggaccgtcaagccttggaagcactttcccaatatcacgaggtcaatctattcctgcgcggtatcgttcccgacttgggattcaccaccgccgttgtggaatacaagcgtggcgaacgcgccgccggcgagagtaagtatccgttgaagaaaatgatctccttcgccatccaaggcatcaccagcttttccgccaaacccctcaaatttgtcactggcgcgggattgctgtccaccctcgccggaatcgtcatgcttgtttacacactcatatcacttttcaccggcaactccaccgcaggatgggcatccatcatgtgcagtctctggcttatcggcggtatgctcatgctcagccttggcgtccttggcgaatacatcggcaaaatctacctcgaaaccaaacacaggccaagatacaacattcaacaaagactataaatgacaccgctctgtgcagctcacagatgcacattcccatcatcaatcgcaacaagcacagacgattcgacatctacgccacacgaaaccaagaaaacagccatggaacaacaaccgaacgcacaacacgaatccgcagcgatacatccctttaagaacgccaacaccacccaattccctcatctcatcaagttccttacacgcaaatggaacatcctcacatgtctgttcatcgcgttcattccggtgttgctcatctgcatatttgcgatgccggccttttccacaattgatgacgccatacaggccatgtacccggaaggcgtctattacgagcaaacgtcatacctcatgctgtatacgctcgcccccatcagcgtacctctcggaatactaggcaagatattccccagtttgccggtgttcgcactctgccagttgctgctcatagttctctccactgcagcgatgctccatctcgtatccaaaggaaccgacagaccatccatcagagtttcccacacggccatgctcatagcatgcgagtcgttcttgaccacatacttgaactacacagccgttgcctttgtcgtcacggcatccggtctttcgttgctcgtcgtcaacgcgctcagcaagcaaataccgcatataacgggacaagacgttgcgggtttcttcctggtcttcctaggtacgagcctacgccccgaatccggattcgccaccttcatcttgttcgttccctttataatctgggtgctcatccacgaacgacatatgccttccattcttcgaggtattgccgccggcatcgccgcaatcctcgcatatgcaatcggtatggccgcttacctcatcacgcctggatggcagcaacttccacgtgcgcttaagatcggtcgtgccatcactgatacacaatccgtcgatgcgaataccattcaaaccgttgcccccaatctcagcaataatgatgtcgatatgctttacgcctagtggttcggcgataaaagtgtattcagccttgataccttccagaaaatctcggccttcgtacaggaatactcgctatccaacattctgctcattgacaaacacaatcttttgctcacggtcatggcgattatttcgctttccctgcttgccgcattcatatcgctcaatatgacccgattcgtccgctcagtatgacccgattcgtccgctcagtcgtcaatctgcagacaggcatcatcctttgcgtcatagccactcttcttgctcttgcgctgcgcaatcgtatgttcgatcgggtcactttctcactcaatatcatcgctctgtacgcccttctcactgcctcatacagctttgccgacaagccgactcaggcaacgacaccagcacggcggaacatcacatcatcgagacggttgccgtcattttttaccgttctgctcagcgtcatctgcatcgtcttagcctttgcatttcccgtcaaccacgctgaaagcatcaaagcagatgcagccgaaacatccatcatccaagacaatatccgacaatatgcgtcaagtcaccctgaacagatcttcatccttaacgttgtttgcgatgaagcttacgtgaaaagccacagcgtattcgaaactttcaaaacttgccgatacgaagacaacaccatcccccgcggtagttgggagatattcgccgcacccgacgactatattctcgacaaacacgatcttgataaggatcatcggtatggcaacctcattaatcgttctgatgttcgactcattggagataagagcacagccaacagaatgctgacattcctccgtgaacattatgattcgaacgtcaccttgacgaaagaggcctcccttaccgataacgacgattccaataattccatcggtgtataccggtacagcaaaactgccaacgggcaatgaaccaaacttcgtaacatgaagggtaaggcgacacaacgaggtccgaattcttgcgtatttcgggccttgtttttcgatgagaggccacgcctgaaaattgcgggtcttgaaacatgcccgcccatggcacgacgaaggtaaaatcctacctggtcatgactcccgtcttagcgatggaacccagccaattcaatgatggtttcggatggcgctcaaaggtctccttgtcctagccgatcaggccgaacgtcggtgtgaatgggcccccatccgtaattatcaagcagggaccaatgaaggtagcctcgcacatcgataccatcggccatcgcatcatgcatgccgatgagggcgccaagggtatagtcaacccttcgactgtcatccgccgtagcaataccattctcggtgacagaatctcacgtgccctcttgtgggcttcaatgagtgccgggaatacccggatcaggagccggtaacgaagaatagagcgataatcggtccaaaccaataacgactggcgactacagtgagtaactggtcttggaaatacaagctacgcatagacgattcatgagtaataattcgttgaaagcgacatttcccagactacggcagtctttcgtgatgcacatgcatcacaggaatgcagggtatagaggaagcgactcaccacgttggccaaggagcttatatgaatgtcatgatatgtccgcgttgcgggagcaacgagtttattcagcacggcagcagatttatctgcagttactgccgtaccgcctgcaatgatgtcttacccaaagaatcaggaacggtgattggcgtgaagagcgacgtcgaaaggctactcgcaaaatgtcgcaccgatccgaaacatgccgcacgctacgcgagtcttgtacttgacattgacccaggaaacgaagaggccttgcgttatttctagacccctccgaatatagtcggaacaagaatcaaccgtctttcaaaggagatagatcatggagctgaagacactttccaagcagtacaacttcgatctggctgagtttaccgaatatctgtcctcacataattacccaatcactaaagcatcattgtttagaggcgccgagatagacgactcgtacatttccaaagcagtgtcatcgttcaaacaattcctatctgaggaagaggaacgcaaggctaaggaaaaagccgaggaagaggaagcaaaacgtgaggccgaggaagaggccaagctggaagccgcgaggaagaagaacgctatggctcaaatgctcatcacctctggcttcaacttcgatggatacacaatcaagaaatattccggctatatctcgggcgatgatgtaatacagatcgatcgtggtaggggcggcattttctttgacggtgcaactaatgtcggcgacgcattgagcgcatcactagtgcagattcgcaggaatgcacttaacgaactcaaggaagcagcctatgatttgggctgcaacgcagttatcggcgtggacttcgattacataactctcgacccagaaactgtcggatcgaacggtggcacattatatctgccttacgtattctgcgtcaccgccaacggcaatgccgtgattatcgaaaaagactagtgtactactaaaagcacataggggaaaggcccatcgatggcattcatcaaagctttttcgggagcgttgagtggatcttttgctgaccaatggttcgatttcttgactttgcccgacggattgtcgcccacggttgccttatgcaaggcggtacattccagcgccaaccatgcgcacagctcgaatacaaaggcgagcgagtgcgtgattacgaacgggtcacttatcctcgttccggagggatatgcactcgtcacgcttgaaaatggactggtgactggatacattgatgaaccgggaggatatgtttggcattcagacaatccccaatccaaaagcttctttgcagaatctacggctagagaatcattccttgcacagacctggaatcgttttatgttcggaggcattccaggagtctcacaaattgccatatatgtcaacatgaaggaaattcccaacaatcgttttggcaccgcaaactcggtctattgggatgattcatatttgcgcacgcaagttggcgcaagcgccagaggttcctataccctgcatatcacagatccgattttgttcctgaaaaggtttgtcccagcctcttactactcattcaacccgtcgacagccgctttcgactttgcggatatcaacaatgaggcggcaacacaactattcaacgaagtcgtggcatcattgtccaccgcttttagcacatacgctaattccgaacagactggcggaaggatcacgcgcctccaaggagatgcgactggattcgcaaacgctctttccaaagcagtagaggataactatcaatggaagaaggaccgtggcctgcaaatcgtcaaggccgcacttatcgcaatcgattatgacgctcccactaaagagctactcgcgaaggttcaacgcgctgacgctcttcaaggttcacgcagtctgtcgaatcttcaggcatccttcgcacagggaattcaatctgccggcgacaatccggacggcggcgtcgaaagaatggccttcatgggcatggccgtaaatggaatgagtccaagtatcacctcattaagtcaattaggatttacaggccaaacttcgatggaatctaacccctttgaacaactcgagaaatttaaatccttgttcgataaaggagtcattagtcatgaagaattcgatgctgtaaagaaaaggattcttggtatttaacacgttgcatgattatcgatcatagaaactaaacagcctattcgtaatccttttaagttgaatgaattcaatacaatatagatagcgccagaaattaactgcatgactttcctcaagaaactcccccaatctcatacctagaagaagaaattaatgaatattgaatatgcatgcgctattaccattctttcatcaatcgctatgtgggcctgcttccgattaatcgaaagacatgagaccacgccacgtgccaattcctatatggcactttcccaagtgattgctggagaaggtagtgggttcgttcgttttctgatacttcgaggattcccacctcttatcgttctcattggtgaaacgtcaattcttgctaaattaggggcttctgccaatcaatgcctgttctgtccattcgtatcggctctgatctatgttttgctgacatatcttccctcatttattcgtggctttacctttggagagaaatttcttagcgcaatattaattcttacttatccatgcatcgccgtatttacaggggtcatatctcgatatgttgatttctccagattcgctccttcaaatctccaaacgctaattgatggaatttggcaaacttttcttgtctctatagtcataattactttttatgagatgcttcgaaattatcccgatgaaagatatataaaacaagatgaattacatgacagaaaagtacaaatcgttaaaagagaattagagcttatactttgtaggtttaaggaagtaatcattacgacatgtgcaaattacgacacatccccctccttattactttcaatcctgatttacgaggatctaaatagaccacaatggatacgtctgattgaaaatattcttgttcggctccccggagcgaaacttacagtaggaattgcccaagtaacatccactttccccttaagcgatgtcgagagtatcgacttagcttctgctcaactacgatacaccaataatctcactactacccagatgattagaacaatacgtcaatataatccgtcagataaatacgttgcatcaatattggaaattaaaggaatagttgaagacacaatttaaccagaaatattcagataatattcaatcactcagctttacaggtcaagtaccagctgccgactcctccaaaaggcaaatatctatcggaaaatgtcgatgtaatctttcagggtacttacgaaccgattcgttattctgccgcatctggagacatgcaataatcaaggagtcgatgacagcgacaacggcgaatacacatattcgccaatatgctcaaatccatagtcacgaccttctttgtgaccaactaggcacaattaaacggtctgattttgaaaatgatatcagcggtgaagaaacctatagaaatatcatcaatatggcactcgtcccaagatgtaatcgattctcgaatcacagcaatcagaacggatgaaatccctaacttgattctttcttttttgctttcacgatgtttttctaattgtctcttcttcaatggccgagggaggctggttcgttccgccgacaaaaccttgatgcggatccgttggtgcccgaagattcgcatgctttcaggttggccagttcacttccgggaagcccttgtcccgaccgagagtcaggacgtcggaggccatgcaagagcaattcgccaccccagacgactctttccgacaaaatccaaacatcctagaattcgaacaattgttcgatgccctgtggtatccttacatcatcaacccgttcaaggaggaccgcgatgattcccctctccacagacagccgctgcactcaaggtcgtccagtacggtactcatgggccggcgaaagcacagtccgatccgacgcgtacacgacggatatcgtaaccgccatcgcggaacgcttcgcctcagaggcggcaaaccaggaactcatgcaaggagaaatcgaatccaaacatttcagaaaatataagagtaagctcaaggcgttcctcgaaaacaaactcaaccgcctgcaggaaggcaagctaacccctggcagcgaagtcatacccgtcaaacgagcaagacgggacgcacgcatattcgagctacgttggcatcatgaaacaacgatccacagatcagcaaaaacccagatacgacattatgtgggagagccaccggaaatagaagacaccgtcttcgggcttgtcatacatctcaaggacatatcagggacagaaaccgaaatcactgaaaagcaaaacgaacagatcgacaagtctctgaacctatattcgaagcattcagccaacggctggaagcttaattagcatgtcgaggttgctgttgatattactataagtaatatcaacagcaggagaagaactatggacgaacaattttcctatgactacggagagctcgccttcgatttgtaccaggcagcagacgaacttctcgacgacttagtcactatgagaaaacatcgcggcatgacacagtctcaactggccgacgaaatgggagtcagccagtcctacatctcccagattgaaaacggacagaagcaactcgtttctctcctcaccgactatgcgcaggaggtcggagcacgcatcaggtacgtcgtcgaacccgcggagaagaagccaaaaggtaatcggcattacgtcactggacaagtcacgggccaggcaaaggcattcgtggagtggcagaatggggatcgctcatccgaagacgctcccattcaagtaaaactacctctgcatggcggcagtgttccacgtggcttctttgtcgactctcgatctatttcaatccacagcttcacacccagccaaatccctacaatgcaaatggaatcagcccgatgaacgtcagcaacatcaccttaatcagccagtccagcgaacgcgacttcacacagaatccaccagaagattctgcaaccaatctcagtttcggattcaatctggcaccaagcgacggcaaaccatggccatacgaaatatctttgcattccgaagtctccgcaaaagacggtgatccgggaaaagccgacatccctcttctattccgttccgaccttcagtacgctatccagttcgatacccccattgaagaaaaggaaataccgtatgcactttcagcggcatggccgtatgtcagggaaggactgatccgacaactccaagagcatggcatcccctccgcaccgctcgtgccgatttcaatcaccgtttcaacagaggaaacagaatgagaccatgcaacgggattgtgaactacgtcccgtttgttgggcgttgcctattagcgatacaggatctaggcctgcgaggaacatgttccggatccctcccggagtgtgcccttcaagccgtttccggcggtctgtagtccaacggccgatgcaggcgcttcgagtttcgccacgagatccaccgaaacgtcgccatacacaatcgaaatggacagtgaggtggggtgcgattcccgcttacaatagaaattgcaccccacctcacttgtcatcgaaatcagtcagcctcctttgccaaggaaccgacaaccgcaccctcctgcatagcaggaacaccagcactgatcttggaggcgaggccgaggctcttccgtttggtggtctgatttttcttggcagaagcaacctcaaagagctcattgacgtgagctttttcctcatcactgatgcgattacgcgtcacaagggaaacgacgatatataccaccaagttgacgatcaaaccgaccacaccggacgtcagactccccaacgccggaatatcgtccgggaagatgactgtcagaattgcagcaattccaaagccggagatcatgccagacagcgcaccatatttgtttccgaatttgaagaaaattcccaagaataagggcacggcaatctgcacgattccctgataggaaagctgagcgaggagctgcagtcgggacatgccatttgtaaagtatgcgagtaccgcagagactagcacgaacaccaccatgcagcactttgagaaaatggtcttctgccgatcgctaaggctcattcgactaccgatgatgtcgttggcgatctgggtacctgcagcttggacgctaccatcgatatggccgatggaaccagcgaaaatcatcaccagacccaagccaagcaaccaagttccaccatactgattcagcaaggtggtccaaccggactgcggatttgcagccacttcaggaatatgggccgcggcaagcatggtcagggtcaaaagcgcataaaacacaccagcaatgacaattgcgtagttcgtggatttctttaccgaccggatgtctttagccgtgtaaatacgtacgaaactcattggccagcacaatgcaccgacgacaccggtaaaaatctggcagaaaagatacatgggaccataggagccgccatcgccaggaaccttcagaagattatcggacatatgggaaagcatgccccagtttgccggagaactcggggagaccaagaggaagacacatacgatcgccgccagcacataagcgaacagaccttggtacatgtcagtgtagatcagtcctcgcatacccatctgaacggtccaaatctgtcgaatcataatgacaatcagacccgcaatcagacatacaggaagagcccagctaccgttggatgcgatgtggaacaccgttgctagtgcctgcatgccaaggatggtccagggaagaatcgcaatagcgccaatgatggaacacaccacaccgacgggcttggacatgtaacgcagtctcatcaaatccggttgagtgacgaggttgtatttctttccccatctccaggcacgagtggcgatgaaatacatgaacgatagacccagagtcgaataggcaagtccatagaaaccaaatacaccggatgcgacgctgatacctgcgaatgaaatgaacactgtgcccggccaccaagaattaacgtagcacatggcaacgtaccaagggccgaatgaacgacccgcgacggcataatcatcgaacgagcgggtacgcttcaacgtaatgtacaaaatcgctatgattcccacgaagaatagggcaatcattccaagcatgatggccatggtcactcaccttccttattgctaccggtcatttccgggtcaacttcgccgcgtacactttccatccaatagaagaggaacatcactgcggtgaggaaaataaaatcgaagagccaataccaaatcgacatggggactcctaggaataaagcggtctgaccacttccccagaagtacaaaggtggaagaatggcaaacgcaagagggattacgtatagcactacgaagattacattcttcgtagttgaagacatgtttctgattgcttctttcatttgactgctcctttcattgacttttttggttatgggaaatcgcttgcccctggtttgaggaacgattcgaactaagtatttttctgattaatctgcttgttcctttgagcttttgttagatgtttgccttcacttgatcccaattgagctcgctccggtaggtgtaggccctcatgagtttccagattccgtatttccagtaatcaaatgcgacatcgcgcacagccgaggctatgacaccccacaagccccatttgatgtcacctatcactctggaggcctgaatacggctgagtctgtcggtggtgatggttccaaggtattcttcgatcagaggcatcgagtccttgctgtcatagaacatctcagagagccatagagcaagttcgcagctcgattcattgttgccgcagaattcaaagtcaatgatcttcatagtgccgtctttaaccatgaagtttcccggcattggatcgttgtggcaaggcacgatgtccaaccctgaagccatgaaccttgccttgacgtccttatagtcgtcaatgagttccagaacccatgcaggcaggtctatgttgagctccctcacttgggccagatgctggtctatctgctcgaacagcgtattcgtgtggtcaaacggctggctttcatgcagtttcctgtagatatccatcacttgcatgccttgttccaaggtgcgcaacgtggtggtcgtgcatgtgtcgtaaccttcgaggaattcggtgatttcaacgccgttatccggatcaaattcatacaccttcgcaccgattcccaattcggatgccttctgcgttccggcatcaccggcgctacggtcaataaatccggtgccgacaccgggaacctttaggaaataggtggttccgtgattgtcccgggcataccagttctcgttattgaggcctcctgaaagcggtttgatatagatcgacttatcttgccagattccggcctcgttcactgcatccgtcaccgtctgcggaacgattacgaattcatcatgactgattcgaccttctataacagtgtttcccatttggatcactcccttcgctgcgccttacaatctttcgagccatgccgcagggccgaatggcaggaccatctgattccgagctttcgttaggcgccaaagtccgtatttggcgaaatctatttccggcgtttccgttgttgcgctacgccacagcccgataagagcccaatacagatcccctaaaataccgaacacctgtgctaccggcagtgttgatgccggtagtcccaatcctgtaatcagctgcgccggagtgccgcagaaaggcccgacttccgccagaacggatccagcctcctcaagtgggtccatgacaccggaaacagtccaccctgtaagcatcggcatgcttacattccccgcttcgggcgaaggatcgatgagaatgttcgaagccgcaccatctccatggcatggaaccgccggttcgtggaattcatcaactcttttgatgaatgggtcgagctgcttcaacaatgcgtcgacctctctaggcaacgttttcccagtatgcatatacaggtcacgcatgccgtacacgtcttcaatcaggtctcttttcgtaactcctttgatagattctcccgaaagctcgtgaatgcggcgatgctgttcgagaacagaccaaagcacataaggatttctgagttcgtcaagcttcgcgtttctccagctctttggagtcctctccatgatgatcgtctgaccatcgatagccagaattttcggtgatattcccaaggaaccagcgtccttcatcatcgttgcgatgctttcgaacggggatgagtagggacgactctcctgagtgaacacccttcggaaaacggcatttcccgatgaatccgtgccctcggtaaaaataccgtcaccaccgacccagctgggggagatgtccgtcttttcaatgtcaccccagttccattcgccatagttgtcagcaaccatattcaggcaccccctcaaaatgcggatagttgattgtttccggtctgctttgctccaaagcgcccgcgatggctagggcgccggcatcatcgaatctctttgcaacaatctgtatgcccacgggaagcttcgatgtctgatccactccctcgcaatacacgactgccggttgacaggtttggttgaaccatgccgtgaattgcgtatggtgcagcaattgctcatcatccccagggccgggaatgtccgcgttgaatccgacgacgggaataaccggactgatgaggtagtcgaaccgcttcgtctcatcgatcacatggcatgccgtgctcagcactccgttcatggcatcctcgtaatcggccatgctgagctcggacgcctctttgacccattcggcaacgtaatcaagaacggcttcaggatgccgagaagatctgatttccgccgctgcatgggctttgaacactcgatccgcattggagaaatccccatcggtcagatcaagagacagtggttccacctgacaacccatttgcgcaagacgctccgaagctctgacgacaaagctcgatacaacgggatccaaagatgccccataccccatatcaagcagaaggcccactttgggctttcgcgcgagaatatcacctacctgtttggcttcaaatgcgccgggaagactccaggggtcgctttcggaagaggttcccacaacggcaagcacctgttcgacatcggagatgcttctcgacaatattccagaggaacgcatcacgcttgctggagaataggcgattctttcctgagtaggcttgatagccgcaaggccacaatggccggcaggcaaacgtaccgaacctgcgatatccgttcccaaaccgaatgcggccagtccactcgccagagatgctcctacacctgagctagatccacctgggcttttactcagatcccaaggattacgaacgattccgaattgagagctgataccgcttcccaacatgcccatatcaggcatcgtggtttttgcgactatcacagcgccagcagcttcaagcttctgtatcggctcagaagaaaaagccgatggatcatcgccatcatggatagcggagccatgccaacgtttaagacccttcacgtggtagctgtctttgacaacaaccgggacgccgtccagagggcctttgactttcccttgggaaaagcgttccgcactcgcctctgccaattcctctgcttttggattaagcacgctgattgcattacacttctgggatacttttttcgcgtaaccaatatgatctgcaatcacctgatttggcgtaagagagccactacgataggcttctccgtactgagctataccaaacatgggaatcattccttcctgcgccaatccattcattgttaagtgggaaacacataaacagatgccttaatgtcggccgttgtctgtcattattaagcgaaacgaatttacacatcccgaagtactgttacatcttggttagttattcaagtcctgtattaatggttccgaacattttccgaaaagaaagcctcgagaccaatcggcggaaaaggttcgacgccctctcccccgttgttccaagcgccttttcaaaaccattaatctgcgattcacccatttacttctgcgaaatattaggccagacatgtgtgattaatgtgttccttgtcaaagaagaggagtggcactatggcagaggaactcagcttaagcaaagatgagatcattcgcaggatccatacgctcgtgagacagatgcagctccgctcaggcgagaaaatcggaacggaacgtgctttagccgataagctcggaatcacacgatcagcccttcgaccagccttatcaaccatggagtgcaaccatgagataacgcgccgaatcggacgtaacggcggcatcatcgtcactgatggaaaactgataaggaacatcaacaccatagaatcgcttccagaaatcgcgcgaagacaaggctttttacttgaaagcaaggtagcgacttccaatatgtccgttgccggaccaatggacatcagacaacttcagttggatgaagatagctcggtaatacgaataaaccgtctgcgcttccttgacggcgagcctttctgtttggagcagacaacgctgccggcggcgttgtttccccatcttctgatggatgattcgtatgcgaaatcgctatatggaacattccattcgcgttacggcatagacgtcgtgtcatcagatgaggtacttgaagtcgtcgacgccgatttcagtcatgcatcgttgctcagccaacctgaaggtgctccgctcgtcaaggttcaacggatcgcttcggatacgctaggccgcatcgtagaaaaatcagaagatcttttcgtcgcttccaaaatcagattcaccatgcactcaactggatatgtcaggctttccgcaacggctcaaaagagcgaaggcaccaaccgccatatgcgtcatgctggggattgatatggattacgtgaactggcccctagagtcggcgaagcgaaccacagaccatccaggaactcatcattaatgggcacggcctgagcgcgacgcttacggtcatccacggaagcgggatggtgtaccagcttattcgcgagaggggccttgtcatgctgaaagtaatacttcaagtagtccgggtctaaatcagtgcacatgaggaattgagttttccgtcagttttttgaaacgtcgagcaagaacatccacctgtctatccgcagcggctgcactatgtgactgccttagagagtttccccggtttctgtcgtcgccatgattcttgactttgaaagaggaatcgaaaaaccgcatgtcattttttgtgtaatcacttacagcgcgcttcttgcacagcagactgtatgtgcacaataaatcagccacttgaaacagcttgtactgagatgggctaactttctctttgaaaacgagctcatcttcaacaacattacggctaaacgattcatgaatcagatcccccaaccacttctggccgttatcataatacacttttatagtgtcgaaggtgcataaatcatcccggttatcaagaataaggtcatccagccaattatgaattttaacctccatggcttggcgccttgattctgatattcgacaattaataccgcgcgcagaatcgggttcgcaataatgccgacggtcaatgacacacatctttcctgccacacctattcgtgcacaactacctgcaaagtcaacggctttgttgaaaagcttgtgtctctctctgatatcaagagattcgtatggacgttcacctctgatcaaattgtatgagtgtaaagcatgatttttggaaataccaggaattttcataatatccagctcgtaattcaagtcatctaccaggttggaaatatcaacatcctgatcatgaaagaccagactgaccacgtaaaatgcatctttgcaactattcagtcggcatggcgctgaaagttcaccggattcatcgatgaagatgctaagctcacgatttctagtcatagaaagaaagtatagagtatagggcggggatataccccgcccttggagggaccgaataccagccccagattcgtaacccctatatatgttatgaaggtatacgaacagtttacaattgtcccatagttttagaacatatgcaaggcatacgagcgattctttgatatttagcggccatgccggcgtgttgagcactcactattcatgataagaaaatctgtatcgaagtatccataggcatgctcttacgatgtttcagaacggaacacgaagcattcgatgcagaaggccaaagcatgcaagagttcgaaagccatcgagctatgtctttctgaaaatgcgcatgcaaaactgaacgcatccaaaccaatacaggcgattctcgaagcttaattcttccagctttccaggatactgctcgcccgatcagcagtaacaaggacggggtcgagctggtctataacatcgatgttttgaacgcagaagtatagtctgacctcctcaaaaatacgaagttccaaatactcggtaccaaatagttctcgttctacacctcatcagatgtaagtattcgatgtcagacatcgtcggacatctttagtcaagcgcgtctctgagctcttcttcagtgaaaccgaatgtgtaatcctcatccattccattcgacaaccaaattagcgcggcatcagacacattgattgattcgtcattgtcagacaagtcaaaatcaccttcatggacatatcccactttgtccgcttcatgatcgaggccaatcatgcatctacatggagctgtttcctcgccgatttcactgtcgttatcgtcaagaacgatattaatgatctttctgtgtgctgctcctgttggcattttgtcctccttcttcattgattttgttatcttcagaagacatatcaagttcttttcggctgacagtttcaaaacgcaactttgccggttcttgatgggtgagatgcatcgtagtgacggtagtaaccagtgctgcgaaggctatcccaatgaagattcctcgcacgcacccttgagtattgccaattgtttttcccatggcaagtccctccttgaacccttgtccgtagagcagattacgcaacgcatcaggccctcccgcggcctttgcttgctgctccaaaatgttatatgccgccaatccgggattcatcatgttcactcctttccatactggttatctggcatcctatctcaaactttcatagctaacaaaagcgggcttgtctgcagtaaaatgcccgcataggaggatagcgactatgacaaaggcatctagcaaaatccgattcagcccgcagagactggaagacgcacgtaaagcatccggcaaaaaatggagttatcacagtctcgcagaggcggcaggagtagatgaaagaaccattcgtaaatgccgtgatgctggattaattaatccagaacttctggataaaatagcaaaaatccttaacgttgattttgcatatttaaaaggcgaatttgattcattctatgatcaaatcgaagatgagaaaacgcaagaaaagtacaaaaaaaatattcctggccccttcccggcatccttactcgcatcatttgcctgaagaggtcaattacgataaattaattgtggaaatactcaaactatatggtatctctcctgatagctattccgacatgaagagtggagcacgacttgcccttcgagaaaagcttcactcgtcaatctatcaagcgttacattcttattttccccattgctcaccttttggttacttttatgcgtcgggcatgccgaaacccacattggatgacatcctagcagtgctagcagattcagaggaggaaaccgattattaagctggcatcttacaaggatctgcgtcaactcagcaatgatggtttactgaattgtccggtatggaactcatggtatcgccaatcgtttggacttgctttaatttaaatctcatctatctttcgtttcaagaataatgtcattcaagacggtgcccaaaatgttattcactctgaattatgcccatcatggtgcgaagtctcagctcacttctgcaacaatgtcaccaaatcggacatatccagataactgcgtacgctccacgataacgcctgctagtttgcgcaaattcggctctggattctgatggaagggagacatgatcctgccttggcacggttttcagtcgccagacaataaaaatcgcgattggaaaaagaggccgggaccgtcgcgaggggaacggcgggaccgccacctgtctgctggatgggttctgcgcatggaatcaggctacgcacgaacagcataatcgagcgattgagtcggaagaaccgccgccgcacccgcgtggtcggtggcttccctgacggagggaacgccccgatgctcgtgtgcgcccgcatcaggtatgtcaccgccgacagccggccggaccggcattacatggacatgtcccaactcgatgacaggttacggtcagcgtcatgagatcacgccaacgaccggccaacgaccaatctgcacaaagaagcgggcactaccgattcctcatcgtccaatacctatctctaagttcgtctactgcagataccacaaacagacggtgtgatcaacagatgagcatcacactatctacgtcatgaaacgcgtaacatcgacaatgtgtgccaataggggggtaatacccaatgctgaatactgcgaataaccgcttatgctatttctgcagcaacaaccacttacggaacggcttcagctgcgatagcagaatacagcagcataacgaaatcacaaagatagcaattgggttgagagatgcaattcgtataagatgagcatcttgcggaatcaatttcgccaaaacctcatgtaccaatggatgaaccatataaatgccgaatgcgtaacccgcaagatattgcagaactttagcgaaccataccggacattgataccacattggcgcatgaatcatccagttggaaaacgcaaacgcagcaaacgcaattgggaaaaatcctgcagtaacaagaaatagttcgttcgtcaaggccaattccattgagctcaggccccacagcaagcccaaagaaacaagtgccatcgaaatacgaatagcacggttttcgatatggaatagattcttcttaagagcatatcctaaaagcatatagagaacgccaagggctccacgtccgacgaatccgcccagagtcatttcgtaatcagattcgccccccaaccagttgtacaccatttgcacggtcggcaaaacaaaaatgaaaacagcaccagtcagaatcaacatacaaatataacggtcagcattctgctcgcacgcccgtatgaaagctgcaatgacaggtatgaacagatagataccaagtagcatctgcatgtaccagaaatgaatcatgaaaggctcaccgatcagcagcattgtgcgaatgccctccatgatgttatccactgaaggatccgccactagcttcgcaatcaatgcaatacaagcccatgattcgaaagaaaccagcaacggtaagtaattatgcttgagaaaacgcctgagctttggaccggaatagtctctgtcgagcatgagatagcctgtaataatcaagaaaatcggcacgccgattttggaaagtgatccaattatggcagagacaagaactctcgctcctcccccgttaagaatcgggacgggtaaattatgcacagaaaccacagcaacaatggcagtggttcgcaaaaaatcaatggcaaccaaacgcttgcctatcattactattgcttggttatctccgtgtttcaaggtattcttctcttctcagaaggtcgagtatgtaataatgtcagtctcgaacattgaatccatattttctcatacccccacccaacctcatattgatttcagctcatacaatacagagttttagctgcatgaatcatactcgcgtaacgatactttctggcatacgccgcgtagaacagcaaaccggcacggcttccgggaaattacccaccgcaatgtacattacaggtaattcgtattctggcatagacagtagctcgcgcgtggcactgtcctgaggaaggctgaacattgcattcagcggacaagccgcgaggccatgcgcttccagcgcatacagcagagacatagaaaagagccctccatccacaaacggttcgttacgctcaccgttgttcatgaatgctctgatatctgatgtaatcagaagtaataccggcggcatatcgtacccgttgaatccaccttggattttcagcgcgtctctgattttctccggatcagtaagctggtacacacgcgtcgcctgcctattgcatacggatggcgttttcatcgatacggagtataccctgtcgagcaactcctgcgacactggttccggtgaatattcacgcacggaatagcgatgctcagacagctctacaaatcctttggagaggttattcgccttcgaggaagtatccatgatgaaggagccggcgtttatggaatcgtccgactggtatttggacgccttattccagatatgctctggaaacaggacctttacttgagaaaggtcgtaaccgtcagcttcgtgacggtgctgatactcatgtagtacggccaaaccctgcagatacagcgggttgtctgaataaccagcatcagctttttcaagcagcaccatccgtttcgaaatctccgcaagtactcctttaccaaacccatctctgaattcgacatggcttagtcccttctccagtctgtgtatgtcgaacgcaagccgcgtctctatgcgcgctttgtcagtggattcctcacgagagatccatcccatgaaacgcctggactgaatacgttctgcctttctgatagacacctgttccttaatgaatttcagaccattccaaacaactgatggcacaatgcttttaatgatttgcttagtggacatgttgtctccttccaaaatgtcgctgagatttctggttacgccgcaaacccgcatgtttctcatacgggcgatggttgatgggtgatgcttacggtttatatcgaaagtatggtgcttatctcgctcatcgagacacctttctctgtaggcgatttatgattttcattcgttcgtcatcggtgagcgacaccttcatcactcccgcgccgaacaacagggagtacacaacaccccacaacaggaatgttgggatagaggcaaccggcacgagcagacctcccagcaggcatacgacaattaccatgaatgcgaagccgatagtcggtagctgatgcttccagaagtagaccatgtccaggccaatacgtgcatggtagtaccagttcatgaacaggcccgtccctaaaaagatgcttgccacgtagccgatcgcagtagcccagtagccgatggagggaatcagggccacactgatgatgatgtcgattatggacgtaaggatatagatcaaacttctgattttgtgccgattcttcgcgcgttgaatttcgatacctgtattctgcgtgagtggaatcataacgggcagcaccatgatcaggcacagccagtatgcatcagcgttcgcttcgccagcccataatcgcacgaaatactggccaagtatgatgaacccaccgaacagataccagaacaacaccatctggtacctccccacacgtgtcataagctgcgtaagtatattattgtcatccgattcagcaacgatacgattgatttgtggtacgaacacgttcgacatggtcgtcgacatggaatagaagattgttctgatttgtaccgagatagcaaacactgcgactgcagtcgagctggccatagcgcctagcaggaaattcggcacattattgttgaccatgtcaaagatctggttcaagaaaatccagaagctgaacactgcaatagctgtgaacagagaccacttcaacccatggaacgtaaatctcatatcaagtcttcgcaccgcaaaactgatatttagtgcaagtaaaatcagagaaatcgtcaactgcgcacaagctacacccactgcacccataccgaaccataaaaacagtatcgcgaggaatggctgcaccaatgcagtgaacaattgtctggactgttggaatatgaaccgctcatgcgccacaatatatgagtcgaacggcgtggaaaccatcgttaccgctatattcgcgctcatgataatgagtagtatacgcgccagaccaatctcatctgaagtaagaccgccagaaaataaagaatgcacattgatgaccatgagcatgcctccaaccagacatacaatggcgaccaaaagatagacaagcagaaacatgccattgagcctgcgtacacccggaccgtcatccccgcaaccagtggctctctcacgcatgtagaaacgcacatagctaccgtaaaaaccagcagacagcaaggtaagcgcaaatactacagaattagtcatctgaaaaacaccataattcgcctgtccaagaaaatgtaagagaattggcacataaatcaggttgaccaagttttttgttagaatatttgcgtatccaagtagagcaccgttttttttctgatttatcataaacaactatatctccatgattttatcaggatagttctgtattcttacgatgtcatttccaacagtttgcacatacttgatcagtctcaaatatctaatttgagttcactttgtccaaaccaagctcggagtagacggaacaagggtcatgcattatctatataaaaaacgattaggcttcaagaaagagtcagcaatagaaataatacagtacaacataagacctttttagatttggatgtagttaccgcacccactctggtaattgtttatcgagacagttcgtcagatacgtcataaacttctcacgttcacaacctatagcctcggtgacttctgtatattctccagcatccgatagattaaatgatggggatccataaaccttctcttcaattccaagggtccgcgagagagtttcaagtcgggagaacatactttctccgcctctacggtgaacaatagtaagaggagtatgcaatatggaactaaatactgcagcatgaaaagagtcagtgattacatgcgtcgcattatctatgagagaaatgaattcggcaggacccgctggaggctctccatctttttcacgatctgaaagcggaatgataggaatatgtccatggctggagactagatctagcacttcagctgcctcttctccaattccaccgagaagatacgtaatgatgtatggtcttttaggtgtaagtcgatcgtctgcgatagaacgccattcttcagagctaagcacaaatgtagggtcgcagataacttctgagtcacgcccagaacattccttaataagttcagcacctcgtttttccctaatcgatagtgaagagaagttctttagtcccttagcgatttttcgtccctgttttgcagtcaaaacatcaagtccgatacttggagccaaagctatacgttgctcaggatttgcaaaactaagaaaaaaccaatcttcattatatgcaaaatagtatggattccaaacttgatcgctgccaacagaaaaacagcaatattgtttgtttaaattatcatcaattcgttcaacacgttttatcaacattaattcgttaaatcgtgcaaaagccgaaattctatcttgactcatacaatcttcaggatgtgactcttttttaccgagtaaaccctttaaaaaagatttaacctcctgaataggcaccggcttgttggtaatttctagtaacatggattcaaatccaagtttcctgtataccataaaggaagcatatgcttgcagtctattcccataattgtaactacctggtaatgtaacgataccaatcctgttagtcattttttagtgatcctccctataagagtcgttacatgcatcaaaaaaatagtccagaaacatgcaggagtaatccaatttctccaaagtaaaaccaaagaaatcgccttatcaagtcgcagactgcttgcaccaatactttccatagcctttatatataggggctctttccgcatgaattcgaaacagagcttaatttctcgtaaacttcttcctttggtcagtaacttcatatcatcagcccaagttgataaaaatttcctttgttgcattatacacgcctcattcttaagccctagaatcgaggagacccttctttccacatacgcctgctgcctacagtactcaaagtcaaaaaaagcatgcgttgtggacgcaggattttgataataataatataatggtttatctagtaaataaaaatttttagccaaatataagacacctgctacctcaagtctatcttcgcacatcttcaaaccgtcatattcaatctgacacacagattttagatattctctttttattgccttgagccacaagttattcagtttataactagaagcaaaagttaaaataacagagtctttttctaaccatccttcttgattctcaatgttcgaataatcaatccaattactaattttttttaaactaacagttgcattgaagaagatacaatctggtcttttatcgcgaataattttttcaatttgctcaagcgcatccaacgacgtaaactcgtcatccgaatccaaacaaagtatatattcaccttttgcaatggcgaaggactgacgtctcgcaaggaaagggccgtgattattctcgaatctaaaatacgaaattttgtttctatctattatagattgttcatcaagataagaatataatccatcacttgaagcatcatcaacaatgacgatctcccaattggaacatgtctgcttggcaatgctttcaaaagctctaaatatatggcagaccgcgttatgagcgggaatacatatactaaaaagcggcatatcatatatcctttttgacaatactaaataagtctttcttatcaattttcaaatgattaaatggtagatattcattcaggattatctataaaactcatatcgatagaacgaaattgattatctacctgtcttttaatatataattttcgtcccccttgagcaaaaataaaggcagcaaaaataataagcaaccgtttgtaactcaaatcgtctgagaaaagattgtcaattgaaaccattagcattggaatataaaatatcgatagaagtagtataggaatgcatgggcttttcgaggttcttgcttttctatatagccatgaaaaaaaagtgcagattgagaaaataataatccaagttcccagcaaaccaaaatcatatatatagctcatcaaaacagtatatacatttccataaagtcctctttccggaaatatggggtaaaacgagtacattccagaaactttgtatccaaaatccacgtgaccaacttttaatccaaaaacattcaacagaaaactgattgaagagaaagacaaaaacccgttattaccaatcacgttcatcctttgcatgaaccaatccaatccgtaaacaggccctccaatatagactaataaaatatcatcaatgttaaagttgtcgctttttcccgtcaaaaaaccagccatgaaaaaaatcacacaaaatattataagaaatatagcaagttttatgaataattttctagcgctggaaaccatttgcccgtttttaataaaataaattgtaacatactgaaagacaatgacaccaagaaagaagagtagttgaattcgtgcacctgttataaggatggcaggtatatatataatgactggaatccaatattttttttctaatggtttcgataaagaagaatttataatgaatagataagagtagaaataagctattgcactacttagaccattcatcatggataaaaggatacttttattggatccttgctctcgaaatgcacctaataatgtttcagaactggacaaactcatattggtatgagttcgaatatcccaatatgaatatataagaaatatgatcaagagaatgctagcaaaaaaattaaactcacgagagaccataagaccataacgctctatttgattttctttattgaaaacattcgctgaatcattcttcgaatgtatgattaaacgagaaaaaacatccccgccaatcgcaactatacaagtcgttataattacactagcagtattccaatgaatatcgagctgaaactttccgagtatgagtaacatactcgtacttaggagaaacattgtcgaaaaaatcggtccaggagacataatgtcatagtgagttataaataaagctataaccacgattagggccaatacacaacatgtgaataaggcaaccattatcagtgacccctcaaattcttgcacataatatagcctcttatcgagcctttcgatatagcattcattttatctatcttctttttttcaaaaaaaagtactaatagatattgcttgataatcttaagaatagactttatatgaactttaccattattaaatttaccatccatatatatgatattttgagcaatataatattttcggaaagaggaatgattaagaactaaaaatttaacaccaaaaaggttatacatctgagcattacctatctcatgattgaggcaaacatctggtacaagcaaaatatcatatccagatgctctcagtcgtctacaaaactcaaaatccacaccatcaatgaacattgcttcatcaaatccaccaacttgattccaagccttaacccttgttagagatccggaacttatacattcattaattatcctagaagtatttccttcatactccctgacaccagtagtacgattaaagaaatttggacagataatcgccaagtttaagttctcattgtggttgataatattggcagtcaaagactgtataaagttgttggggataattgagtcctgatcgcaagtcagtaaccattctttaccgtcattctcagcttttttaaaagctatattgaaagcagcagctatgccttcattcctttccaatccaataaaagttacattatcgctgagacatatgtttctaatcttctcaacatttcttgaaccattatcaataacataaatctgactaacctgtttaactaccgaagcaaaaactttatgtaataaaccgatatctggattaaaagtcacaattgttgctgcaatatcttgtctatcttgtagttggataggcatttttaaaatctccctaataatattgatagcttagcctcaaggtctccaacaataattccgcaacttagtgagggattgaacaaaagtggaatacgcttctcagaggacacaaggttaagaaatgttctatcctcgatccctagtgagctggatggaagctccagcaatcttgtcgccaattttggacgattaaacttattccctctattaatgatgaggtcccattcatgtttaagccgcttaaaagcagaaccaccgccaggagtaagagaagtgttgagccttcgatgtttaacgtaagacgctgtgtccataaggagtggtgccccagtgagtaatccaaccaacgccacatgttgatcatgagaccaaactggaatagcaccatattgtcgaatacgcttttggagtgcttcattccataccattgtatgcccagcaagtctatgtcgaataaactcggcaggaattgtatactgtaggccgggaaaaacgttctttgaaagtggttgaagtttttcatccgcaatagacactgaagatgcatatagagccggctcatctgcataaggttggagagctgctacagccttggcgagtttacaaggttcccataaatcatcttgatctgagaacgcataatattcactaccctctgcatcaagcaataatttttcaaaactatccaaaaaaccaagattggctccgcaagaaatattgtatgcaaaatttttatctctatatctgccagatactttttttgcgagataaggagtcctgtcattcgaaccatcgtcacgaatggtcagtgagattgtaacctcacattgagcagctatagattcgatctgctttgaaaggaatttcgatccattataagtcgacatgagtacattaacattgggaatttccttaattattatctgctgatgtgacgtatctattctttttaataaggtgttgttcatgctaatatactcattttcatgcctgaatctctcatgcttattgacacaaacagtaaaagcctagacgcaggctttatcatagggctccagcgatcccatagtcctcattgaacgtacctcctaacgaagtcgacacaagctgttcataccattcaacaagttcgctggcactttgcttgatatcataaccattttgtgcaagccgcctagtttcactagttcgagtatgggaaagatggctattagccatcgtaattattcccttcgcccaagtgtcaatgctatctgaaagtgcgaggcggtttacaagttcaggaacaataactgtctcggcgggaatttccttcgaagcgactgttggtaaacctcctgcttgagcctcgatacaaaccatccccaatccctcataggttgagggaaacgccagtacgtcgaacgccgaataccaagatgcaacattattctgaacaccaaggaatttcacactacgacttataccaagattatctgccttcgcctgcaatttccacgaatcctcaccctcaccaatgaacacaagctcggaatcaggatgataggaatgtaaaaaagaaaaaacttcaagggtgtgctgctgattcttttggaagcatagccgtcctacttgtcctatgagcagtgtgctctcaccaataccaagttgacggcgcaatatcctgcgtgcttcaacatcaaacgaaaatctgcgaaggtcaatggcattatgaataatgtgcacgcgtccatcaattaccgcctgattgccaaatagccatctggcggcatgcttagaacacgctgctagatgcgtagaatatatctgcgagagaggacgtaggacattcttgaccaaagttttggtatactcttgcggattcgaagtactatggctgtgggcgatacgaaccttgacacctgctcgtttggcagccagaagcgttaagacgcttactgcattcatgttcgagtgtacgatgtctggcctaatgtcacgaaatacactttcacatgcatgtatataagcaattggattcttataagatgggacttcgtatatatgaccgccaagtgacctaatctcgtcacgaggcacaactgtagagtcattttgaataatgaagtcgaactgcacacgggaatgatcgagacaccgataatagttcataacggtcgcttcaactccgccgcccaccatgcgaccaacaacctgagccacacgaacaactttggtcatctcataacccgtcctgcacctgtaggagaaataaaataataacggtcgttctcggcgttgcacgtcatacagtaaccctttcgaccactgctccctttacagaaaagctttgaatccccttttttcaaaggtatctaagcttaactgtactcctcttaatagatgcatctcattatggttccccccatagacgggtgactccagtttgacgattccttcgagtaccatcaggaaattccgcgcatggctcatcgattttttacagattttggtgacctgtttccagtgacatcgaaaaacatttaatcaataactgaatcccagaccataacaacattaaacctgttgatagtattattcttctgaatcaatctaatgagcgtaaactcacgcagatatcgacagaaattctgcagatagcaccagcttaactcaagcgacaaccctagctatacaagaataaagttgcggattaaggaaacaacgtctcagaagggacttcccagttttcctctgattttttgctttcttctcatcaatgctcatacaaccgcactgcttccactaacttggaacgagtccgttctctgcacttccgtcatggaaaatgtcagctgcgtacagatgatgctcacatagatgttcaaaacaccttatacactgtgcaaatctcgttttctctgatacacagtcgctctctcagcgctacacagggcatggttcacgactcgcaggcattatccatgctttcggcgtgtcgatttgcaaaactcgccagccaagtgtatttttttcttacatgtacgaggagtgactcgaccggtcttaggatgtgttgcggtcccccgggaaagaggcggatggctttttaaagttatccgccttttccttatcctaagaagtgcaatggaaggttcaacttcaaggggcagaagggtgaagcatcaaatcagaaaagcactgaacgctacggaacagtgcgaccttctcgcaggtcacggcgtcaagtttgaaatctgcacaaaagaacaagctgagaaatttctgcagaataacacttatttcttcaaaattaaagcatttgataataacttctatcgggacaaggatggccattacagtaatcttgatttcgcctatctccaagacctatcaacaattgattttgaatttcgcgcactcatccttcgtatgaccggagatatcgagcatgcactacgtatccgtttcaacaatttaatatcacgtgtcaatgaggacggatatcaagtggtaagagattatgaatacgatcaaaaagagatttatagaaaaagatctctacaagaatttgacccgaacaatgattatcgtaattccgtttacacaagaggaatgattgataagtatctggatcaaaagccaatttggttattttgggaaacatgtagtttgaatagcttaataaattgttacaattctttccttcagcatcgcaaatttcaagatatcacatatcctctgctttatggcgtacgtctgctacgaaacgcagcttcacaccataattgtttatttattccaccctcctctaccattaacaacacaagaactttagataacctgatgccaatccttctttcccaaagaagccgcatacgagaaaacacacttcaacttataaaatcagatcctttaattcacgatttctcctgtgttattctttcccatataaacctagtaatgagcgctggaatgagacactacatcgtaagcagtgcagaaacttttctggaaagaatccagcgacatagtgagtggtatcagaatccaaaaagcggttgtacccatcttgtaaagcagtttgatgctattaagctaattttatcggaatacataagtttcatcaaaaaactcgatataaacgaactatctgatgagcaacaaaaattaatacatcagccaaagcgaaagccggtacgtcatgggccgagacttccttctcccagaacaaggaaacggcaaaagggaggaaagcaacattaaagtccgtagttttatcagaaaagatgtacaacatttcgagtggcataccttattcacaaagggctacacacgaaatgctcgcctgaaaaaaagcgaggagagaatcaattcaattcattaagtagatatcgagttaagttttttcactcaaactttatagctcatagggtaatcacaatccgttttcccatgacgttacaggatgtatccgtaccctcggatcgttactgttgtaaagtgctgatatccaaattgaagatcatcgattccgggcaacgctccggttcgaggaacatgctcatatacagcggaaggtaggtaatccgaccatcctgccgaatgttgccgttgccttccaatggcggaaccggctccttgacgttgtaacagggcaaggccacaccagcatccgccaaccataggaagctactggcataacgattctgccgagcatttttagaaagatccgcaagcacgaatcgacgattcttgtcatcaagttgggaaggaatggcatcaaaaatcgaccgaatcttcgttctgtccttatcatccgcatatttggcgatgtcaagacgatacaaggccaacaggtcggactgcaaggcgattacctgcgcgatatcgtgagtatccacatacctttgaaccacgtcaggcatgccacccactacaacatacgcttggaacaggcgcatcatggtgtcatgcaccgaatcgctgacgggttcgttcccgttgaagcggtctcgaagcatatcaatggtcgattcctgcacaccattggccaaacagaattcctcgaaatccaatgggtacatgcgtagttgctcttcaaatcccaacggaatccgtgtcaaccagtatatcaactgccacgttttccgtaacgttttacatggttttcgggtggctttccgtaacgttttacacggtttttaggtggcataccgccacgttttacaagaatggctgccgttgaggcgcgtgcatctagcctttcgaccgtcgtgcccgggttcgggtacgcttccggcgcttgcgaatccagccgaccaggcacgcaaccacaagaataccgatagcggccaacgctccggcaatcgcatagacccaaagatgacgcggcaattcggcaggcggcgtcacggaacgtacggatggtctttcggaggcattccatcccgcaggcaccgtggtgcgttcggcatggacgagcagacgatgggtgttcacaccgtagggcgtacaggtcacgagcgtcaccagatcgcggccctcctccgtagtgaggctatccacctcactcggcagtacgacttcggtggaatagaccttataggcatgatcctcccccaaaacgcggatgatgaaccaatcacccttcttgagttcgtcaagccgatcgaacagtcgcgccgtaggaagccccgtatgcccggccagaacactatgggtggagtcacctccgatgggtaccgaagtgttcaccacatgccccactccatgcgaaagcggctcttctgtggtgtagtggtagatgggcaggtcaacgctgatggaaggaatgatcagctccgccatgactccatcaccggcgacgttgagcacactctcgtactcgtcgttaccaggggaagcatcatcttggtcgaaagggtcgaccactcgcgaactaccgtcgcgcaaatgggcgttgtatgcttccgccttcgccttttccgcggagagatccgcgggtttcaaggcagcgaccgtctgctgctgagtattgctcacagcatcctgcgcacgctgattaagccagtcactgacgaatgggtagcttatcagcgcaagccccgctagcagaatcagactggcggcggcaagtcgcagacggcgccttcgtctcaagcgttttttggtaccggacacggcaaaagcaggggaacccgaaggtccccctgctttcacggcgtgccttgcatgttgtgcagacgacaaggtcttcagcccgcctgagtgcttcttagagctcttgcttgcgagagcgcaggaagaagacgatacccactgccagcagggccacaccgccggcggtcagggcaaaggtgcccgccgcaccggtgatcgggagagccggctgcttcggatcgacgacgttcaccgacgaaaccaggtagttgttttcgacaacggcggtggccgggttgtcctgggtgcaggacgcctcgttcagcgtgaacgtctggtcggcgaccttgctgaagcctgccggcaccacggtctcggtaacggtgtaggtaccttcgccgagatcctcgaagtacacatagccgttctcgtcggaggtggaggtcagcgtagtggtggaaccatccttgttggtgaccttcagctcgaagacggcacccttcagggcgttgccatcaggatcggtcttcttgaacacgaaaccgtaggtcttgaccttggtcttgctgtccggggtgacggtcgtggaggtgtacgggttcgggttgaaggtgacggtggcggtgttgccggtcacgtcattggcatcgtgagagaaggcagccgaggtgagcttggcgttgtaggtgaccgtgatagcctcacccgggtgagccagcacgtaagccttggcgaacttgatggtgtagccgttggtagccgcagtgatggtgtagtcagtaccggaaacggcagccacaccattgatcttgatggacgtggtgtcgatttcaagaccggcggtcggctgatcgttgatttcgaaggtggcatccttggagtcggccgggtagttcggaacgacggtttccaccttgaacgggaccatatcgcccacgctgtacttgtcggtggactccttgtattcggagccgacacccttcttgatggtcacatcggtcttcttgacgtcgatggtctgggccgggtgagcatcataggttccggaggcattggccaccgggctcgcgtcgacgaccatgttctggtagacacgagtctggccgctcgtgctcgtcacgcgcacaaggtagtagccgctaccaagcgtaagcgtggccgaggtgccggatgcggtggcgctggccgccgcagtcgtaccggcgtcagcgaacgccttcgcgatggcgctggcggcattctgcatgtcgctaccctgatggaatgaattgctatcggaagcaacaaccttgatcttatcgatcgagtcataggcagacggcagattggcggccatcgtgtaggtaaggttgttcgacgcatcgatatcggcatcggcgatgaggaaggcctccaccgtgtcaccgtcaatcagattgttgatcgttaccgtgctatcggccacatcggtcgggctcgtcggggtagcgtgcgccgcgaccggagtgagcacgaacgccatggcgatcgctgcgagcaagcctaccagcatgctcatcttctgcttgagaacggttcccatatccttttctccttttctcatcggggatgggaagattacattgattgctcagacccggctgtgcagtcctgagcctgaccgccgacgaagcatgaccgcaccgccgcctccgatggccagaaggcttccgaggaagagcagtatggctgtcgcacccgagcctgccgtatggggcaagttgggaatggattcgtcagcgatagtaatggcggccaccccgtctttgaggggcagcgcagcggttgttccgccgctgtctttggtactcaccgttccatcatgtgcaacggaaatcagatgagccgcagtatcaaggttgtagccagccggggccttggtctctttgagccagtagtcggtacccggcataaggccgtagtagtgggcctctccgttgccatcggtcgtaacgacggcgtccggaatggctgcggtgagattggcgtcggaatacacggtagcgggctgatcattatcgtcgtagacaccgttgccgtcatccttgtagagcgtaaattccgcaccgggaagcagactgccgtcagtcgacttcttgatgacagtcagaggaatcttgcgcgtgttcttgaataccgggacgttgtcgccatacgacggagtgagtttcagctttccttcgccggcatcctccaccgtgacggtgacggtctcgacgtgggtatcgtacacaacgcccggggtgttctccgcctgttcctcaatggtgtaggtgaaggtcttaccgacatcactcagggtgtacttgatctccttgaaggtgacgttgccagaggcgtcgttcttctgcgtgtcgagctcggttccgtcctgatccttcaatgtgaaggtgaactggccatcctgcaaggtgccaccttcaaggtgcttaatggccttgagctgaatcgagcccttggcttcgtagggtacgaacacgtgcacggtgttagtgaccttggcgttgttgttgatcgtcatggaagcctggttgggtaccttccaataagagatcccattgatggtctcacgttcatacgaattcaagtcagctgtagtagaaaccggcaccgtgatatggaatacatgctcgtcttcggcatatccatgcccagtattcttcgccgtagccgtgacggtctgatcggagatggcaatggtccagttgtccgtgacgtcaacgtagttccccgatacattcttcaataccgtcaccgtggcatgcgatgcatccaaggcattatccaaggtatcggtcatgacgatggaagacgccttgttggtgtcagccacataggggaacttttcggtgacatcgaaagtagcgatctcaccacgattacgaatctgccgttccggtgactttaccggggctggccattcaggatagacggtgaccgaggaatcgtaccccattccggtatcgcatccttctccagaccactcagtaacgaaactgggtcctgcttttgccacgacggtggagatgttatccggtaccggtgaatcatcctttttactggatttgaaccatgtggtcccgccctcttcagaaaccttaagcgtggtgttgtttccaatcagcgcagacttgtatccgctgaccagtcctacgccctctcttcctggatgggtgaagtcggagattcgggggaaagcattggcgccgtgatgaataggctggtcgatatcccaatacgtgacattgaactcattgtcagattcgatcggagtatcggtcccgtctttgaccagcgtggtcgtgaagcgcgatttgatgccaacatcaaattcagagcttccatatccggtaagtgacacaggatagctgttggcaaccgcagcagttgcaggaccaaagcggtctcccaaatggaatgggcagacaaaagcgggttccttaaggccaacggagtcgagctgccatgcatgcactgagttaaactcaacgatggagctgatcctctcaccggaggtggtgtacccgatattgttgaagcgcatcttgaagccgctccatgtagagcccgaaagtgtcactttgccgttatccggagcccggtacaccatgtacacaccgctgtaatacgtatgtatccagcgcattttccagccgttttccaaatccacaggattaccatcctggttggcgggatcagcaggcgtcagatcggacacattgtgccacgatccgttagcgtaatactgagcggcgcttttccagtcgatgttcttatcgatgtagaccgtgccaccaaccgaattcagcaaattattcgtagtggtatacggcgtgccggcatgcgccggagcagtcgtaaacaagcaggaacccagcgccacgataaggctgatgagtacaacaatgatgtgcttggatatttggaagggtattcgactaccgaggtgacgctcgcctgcgttcatcgcttctctccttgcataaaaaaagcagtcattcataccccccccccccgcaaaaatcggagagggaggaggtacgactgactgccagtcacacccgcaattctgtttctctacataacgagaagttgaattattttctctatgtaagaaatatacccataagattttcagctccccctctgcataattacagcattgacatcttatttgccgtataaaccgtcattcaagagtgattcccgacggaaaatcgaagcaccgtcaagggtgtagctaggggtatggcacggcttgtcgttttagctctcagcgcaacgcaaagctcaaaattgcaagaatctctcgaataaacctaggtcacatattaacctaatcaaggaatgcatcatcatccacaggaaacataaatttccttctgtcatccgaaaaaggaaaagtcagcgcctaaatttcacgcccagataacagtggacccaagcgcctaccatctccatcaggcgacgtctatcgtggcacattctgctccgacaaagaacccattatgtccactaacaagcataggacgtattctcatctgccgagacaccactgacggccgcctccgctgaaggcgcgaaggcggcgaattcttactgcgtgacgactgcgagcgactatttaatctgcaacgcctgaagcaccgcctcacttacatgtcgcgcagtcagtccatatcgttcgagacaagcttctgctgtaccggaatgcccgaaaacatcctccacgcctactttgactacgggaacacggacacacgtctcccccagaacctcacccaccgcggaacctaagccacctataatattgtgctcttccgcagtaacgatggccccggtctgtgaagccgcatcaagtatagcccggcgatcaatcggcttgatggtatgcatatcgactactctgacgctaatcccatgctcttgatacaacatttcggcggcttccaatgatttcgcaaccataagcccagccgcggcaatcgtgcagtcggagccttgcctcatcgtcacggctttgccaattgcaaaatggtagtcgctcaccgaatcggtaactgtttcgaccggcgagcgccccaaccgcagatagcatgggccagagtattcactaattgccgccgtcgccgcagcagcttctctcgcatcgcaaggtacgaccacagtcattccaggaatggtgcgcatgaggctgatatcttcaatgcattgatgagtcgcgccatcttccccgacggacaaaccggcatgggtaccaacgaccttcacgttcaaatgcggatagcataccgaattgcggacctgatcataagcgcgtccagcactgaacatggcgaaggaattcacaaaggctgttttccccgtagaggcaagacccgcacccataccaaccatatttgcttccccgatgcccgcgttgaaaaaacgctcggggtatcgcttggcaaagtatgaagtcatggtacagctcgtcaaatcggcatcaacaaccacgatatcgtcattcgtcgcccccagttcgcacaatgtacgaccataagcttctcgggttgattctttactcattgcgtcgctccaatcctcaacagttcaagatggtcaatggtcgactgaatttcctcaaaggcgagtttgaattcttcttccgttgggacgttgccgtgccatttcggattgttttccatgaaggagacaccatatccttttaccgtattggcaatgattgcggttggcgccaacttctgggttgccgcttcgctaagggcaacatctatcttctccacatcatggccatcgatttcgatggaattccacccaaacgcacggaatttttccgtgatttttgatatacccccgatgcgatcggtgaagccgtcgagctgaatccgattgttatcgataatcgctgtcagattgctcactccataatgggatgcgacctgtgccgcttcccagatctggccttcctgaatctccccatctccgagaatgcagtacactttgtatgagcgaccatcaatcccagccgccaaagccatgcccagagcggccgatagtccttgccccaaagagccagcagacatatcaacaccgggaatccctgtcatttcaacatgaccggagagattgctgtcgatattgcgaaacgttttcagctcatcatgcggaatgaatcctttcttcgacagaatggaatacattgccggagtgcaatggcctttcgaaagaacgcaacggtcccgatccgggtcgtcaggatggtcgggatccacgtgcattgcggagaagtacagaacggtgagaatatccatcaccgaaagagagcctcccagatggccggagtgtgcggcctggaccattagcaaagcgtccttgcggcattcggccgccattttctgtagtttaagtctgcgtgagaattccataacttcctcgttattcgtttacctgtggttgtgacgacccgacatacgaatcgccacaaccatattccattgggtgcaaggtcagaatccggtacgcacattgcctttgttcttacgcatatcgaaatacacggcaaccaagatgatgacgcccttgatgacgtactgccagaaggagtttacgtgcagcagattcagaccattggagatcatgccgatgatgagtacgccgatgaacacgccactcgttcgaccaacaccgccatacatcgacgttccgccgataaccgcggcggcaatggcgtcggtctcatagcccacaccggctgtcggctgtccggacgacatacgtgaggccagcaccacaccggcgaaagcggccagaaaaccggaaacggcccatacgaagaccttgacacgcgttacgttgatgccagagtacttcgcagcagtggggttgccgcccaacgcatagatatgacggccgagtctcgtcttgttcaacagcaggtatagcaggaagaacaataccagcatataaatcacaggcaaaggaatcggaccaagatagccattgcccaaagcggtgaaagccggggaacgcaccgtaaccggctgaccgccggccgccagatatgcagcaccgcggcaaatgctctgcatggccaacgtcactacgaaggggtggatacccgtataggcgatgatcaggccgttcagcaggccgataatcagcccaatcagcacgccgagcaaaagggcgaccggtagcggcaaaccgaactgggccatgctcaggaccgcgacaacacctgagagcgccacaagagcaccgcaggtcaggtcgatgccagccaacatgatcgacagcatcacaccaatcgccagaattgcattcgtcgacaccgaccgcatcagattgaccagattagcccaagacaggaagttctcggcaaagacaccaagaaagaccaatagcaccagaaagccgatcagaatgcccatattctgtctgacgactcgagcgatggatccaagaatcgggatgttctccacattatctaggaatttggtttcggttttcattgttctgttccttattttcaaagatggtgtgttcctttgtcagcccaaggcgtgtttgaggatttcgtcctggctgaattgcccgcgttgcagcacggtcgtgatttgtccgcccttcatcaccgccaaacgatccgacatattcattacctcgttcaactccgaagagatcatgactatggcgaccccttgcgatgcaagtcggttgatgatcttgtagatctccgccttggccccgacgtcgatgcctcgcgtcggttcgtccagaataaggattctcggattcgtcgccagccactttcccagaacgaccttctgctgattgcctccggaaaggttgcccaccttcgaatccaatgagggcactttgatgttcagcgtcttcaccgcatcctcagtcagcttggtctccttcttgctgttcacatagagtttggagatgaattcctttaagctcgcaatcgacgtgttgaatctgacatcgttgaagaggaacaggccctgggtctttcggtcttcgggcacgaatgccagtcccagatcatgcattcttagaggatcgccgggcccggtgagggttttgccgaatactgacaccagcccttggcctccttttcggaagcccatgactgattcgaaaagttccgacctgcccgaaccaatcaggccatacagtcctaggatttcaccgcatttcacttccaatgtgaccggttgtctccaaggctcgcacgaatatcgttcaacacgcaaagcctcctcgcccggcgtattgtacgtgcggtaatagtagttttcgatgtcgcgtccgaccatcatgtgcacaagatcatcctctgtggtgcttgtggtggcaacggtatcaatataggtaccgtcccgcatgatcatcacattgtcggtaagttcgaagatctcggacatcttgtgggagatatagatgatccccataccttgggacttgagcttcctgacgatacggaacagatcatccacctccttttcggaaagggaggatgtcggttcgtcaagcacaatcactttcgaacgcagagacagggccttggcgatttcaatcatctgctgctgacccatacttaaggcattgaccatcgcattagggctgacatccaggccgaccattgtgagatactgttcagattgctcgatcatctcgcgttgactgaccaaaccggctgagttctttaattctctgccgatgaacacgttctcagcgaccgtcagaaagggttcgagtgcgagctcttgatgtacgaaggcgatgcccttgctttgcgcatccagaacaccatcaatccgcacctcctcaccatcgattcgaatcgttccactatccggcttcaatatgccgccaagcacattcatcagcgttgacttacctgcaccgttctcaccgagtaatcccagaatctctcccgcatgcaaagtcaaatcgacattggtcaacgctttgacaccgggaaaagttttgacgatattcctcatttcaatgaggatcttcccccgttgggttgaggaagaggtgatggattcggcgccaatgacaggattattctgtactatctgttccaccattgcctacccttcgcaaagaaaaacgaatcgggcgaactaacgtctcaaggaagaaaagcggacgatatatgacgtcgcccgattcgctggaggatgggctgcatgcgtcattcacgcagcccatacggtcattggatcattgccagccgtcggtgccatactgatcgacgttgcttttatcgataaggaaggtatcgacaacaatgttcttatcaacggtctttccgtcaagaacatcgagggccgcttgagccgcctttttgccgatttgctccggtgactgggctcctgtgcccgtcattgtgccatctttgatggcctttttgccatcagggctgccatcgacgccgtataccaacacatcactcatttccggatgcgccgccagcgcctgcacggcaccaagcgccattgggtcgttcacgccgaagatagcctttacattgggattggattgcagaatgtcttccgtcaaggtgaggcttgtggacagttcacctttgccatcaagctcctgaacgatattgaagtaatcgcccgcggtcttcttgaatccatcaagacgatcgatgcaggcctgtcctgcaggacaattcaccactgcgacgtccgagcccttcttgagcttcttcatcatgtcttcagccaccaacgaccccgccttaccgttgtccgaagcgaccacggtcttgaccaggtcctgatcatcgacgggtgtatcgatattgatgaccggaatattggcatctgcggccgcctgcaacgcaggctgaacaccgatggtgtcgtacggtcccagaataatcgcgtccacgccagacgcaatgagatcgccaaccatgtcattcatctttgcctgatcggcctgcgggtccacggattgcacgctaacgctcttgccttcaatttgttcattcacaccatcgagaatggcctgccagaacggattgttcatcgtggatggaacataacccagtttgatcttcgcattcgagtcacccgtggttttcgttcctgaagaaccattggttgaagatccacagccggagaggcctgccgccccaaggatgaccgcacaaatcgcagccattatcttctttgggaaacccatctttttctccctttcaaaattgatgtacgctgccgacgcccgataacttctcttgttttccagtgcgtcaagaacgtggaatttatgagtggatgacggaagtcgactccacgttgagccttctcccattcactaatcgattctctgttcttgggtttagaatacctctttggattcggactgtaaatccaagacacgccgacaaaaccgtcaccaaccgctagaatgccgtttttcagtgctttagacgaacagcccaaccatccggaatgagttttttagatttactaagtaaatctaaaaaactgcaatcagctaaactcagccacattccgaccatgcatcagtcatacaaacgcgaccatgctgaaaccactgatacatcgaatcacatctgcggaatgccggccatgtatccgattacggtttcatacgtcgtttctctggtattcagcacggcattgatccgcccatgcctcatcacacagattctgtcggaaaccgcaaagacatcggacaaatcatggcataccataatcaggcttttacccatctcacgcatattgagcagctgattcaacacctctcccgtctggatcacggacagggacgccgtgggctcatccagaatcaatatctccggattgcgtagtatcgcctgcgcgaacgacagggtcttgcgctcccctccggaaagcccttttaccattctcgttggggacaagggggagccaagcctcttcaatatctttcgagtgtcctccaccatctgctttttatcgatgaaaggaccagacacacgttctttgcccataaacacgttatccgcaacatccatggcgggacacatcgcggaatcctgaaaaatcgcgaccacacccgctttgttggcctctctgattccagagaagacaatcggctcgccatctctcaacaggcacccatcatccggggtctccaatccactgagcacgcggaccagcgttgatttaccagcgccattatcgcccataatggcgaggatctcatgtggaaagacatcaatatccacaccggcaagagcctcgaccgagccatagcatttacgcagtcctctcgcaccaaaaacgggtttcgaggacatccctccatcacacatcccgaccgtagccgtcataccgatttccatcatgctctacaccgtgcctaatcttccgtgattactcttctcgcagcatcaagcattgcgccatgggcaaccgcctcatctccacatggtcccagcagaatcgatcgttccgctcctacaggaaacatgattttgttcagccgttgtccaaaagctatcagaaatccatcgccgattcgagtcattcttccaccgacgactatggtgccgcagtcaagcgccgtcactatcggttcaatcgcagaagccacggaggcagcgacatcttcgataagccttacgcatacaaggtcaccgttacgggcatcgtcgacaatatcgcgcaacgagatttcaccccgtgccgggcgaagcaaagaagccaaatgcgtggcgcttgcaaccgtattcaggcaacctcgacgaccacagaagcaaaccgtgccattggaatcgacctgaatatgaccgatttcgccggccagcccgaagcatcccttatatatattgccgttgaggaatagagctccgccaatttcataatccgcatgcacgtacagggcatccgtcttatccattcccaacgccttcatctgtgcgacgcacgccaaattagcattgttctcgataacaggcacaacccctgtaccttgttcgaaacggctccgaatctcatcaccgctccaaccggccagaatctgaggcacctcgaccttgctcgaagtcgacagaggaaaggggagcgcaaccgtgagctgtttcaaatcgctcaactcagctccgatgaattccatcatctccttgagcatctcgagcgcgcgaataatggtggtatcaggttgatgatgcgcagacaaaggcatgctcttatcgctcagtacccggcccgtgctgtcgcccaattcgatatgcaaatcaagccgtccgatggacacccccgcagcgatgccgcctttggaggcaagcgtcacatacagcgcatgcctaccgttacgactcacggatttggtctcgaccacattcttggcaatgagttctttgacgatattcgaaatcgttgcggtcgaaagcccggcggcgtcggcaagttctatctgggtcatgcccccaaaccgttgaagcaccgaaagcacctggctcacattcgcctgtcgcaacgacgacagcgttcccatgcgagcaggccgacccatttgcacaaacctccaaacaagggcgttatgttcacgccggcttcttccaaccgaagctcggaaagagttcccctacatgggcgattatatcccaattgccaaaccggcaaagctttggggtccgcgccgcatcgcgcggcatggaccccaaaccgatcagctaaccggcatcagtgggccagcatctccttgacgatctggtccttgttcaggctggacggataatacgtcggccagttgtccatctccttgagggtttcctcctgcgaatcgcccgcgaagatgtggaaatgcgcggccttgcccggggcgatgccatggtcggagaactgcacgaccttgggggcgccgtcaggcacgtcaccgactgcggagaacaggtagcgcacgccacgattgcccttcttgtagtcgaggatcttgtatccgtcgtacttgtaggtggcggtggtgtccttgccatttcgggtgaaggtgatctggtcgcccttgatggtgatgcgctccacatcggtcttgtagcctgcgtcatagtacttcgtatactcttcggcgctcatggtgcccttcttggccttggcttccatgaccttcttgaggctgtcgtccttcagatacgggtagacggattgccactccccctcatagtcggccatcgaacggttggcgacatcctgggtgaggaaccagccgttagtggtgtcgttggccagcgcctgcttggcgatggtcgtaagccagcccagcaacgtgtcctggttctcgggcagctgttcggtggcggaaatgatcgtcttgttgctgctcttggcggcatcgttgagtttttcggcgaaaccgtccatctcctgcgggttgacgaccagcagatccacgtcggatccggaaacgatgtcgagggtggatttgagatcggcggcggaaggctcgccttcgctgttcatggcattcgtataggattccggcgtcttgtcggtggcgccgagatagtcgagcaggtagctgatgatcgattcggtggccacatacgagcgcttcacgccggcggcacgagccttgttgaccatggcgacgaattcggcatagtccgcattccaggcattcgaatgacgctgtgcggtggccgcggtatcggtgccttcaccggccttagcggtgtaagcgtccgtaatggcggtcgcggctttgagtacggcttcggggctgaaccacaggtgagggttcgtggaaccgtgatgatggtggtggccggactcgccatcgccgtcctcatgctcatgctcatgctcctcggtggcggtgatacccatgagatcacccacattgacgatggtctgcttgctcttgtcgagctgcgccttctcggcccaaccgtcgtagccggctccgttgatcaccacgatgtcggccttggacagcttggccagatcggctggcgtaggctcataatcatgcggctccacggaggtggaattaatcagggatgtgacctgcgcgcatttgccgccaagctcctgggcgagcgcaccccactggttgacggaggcgaccacggtgaacgtggtgctgcacgaatcgttggcgtcgctgaccgtggaggtcgaaccgtgagatgcagcggagacgttcctgccgttttttgtattgaggaacgcgaatccgccgacgacgagtccggagaccaaggcgcccacgatgaacgctacgatgatggcgatgatacccttcctgccgatggcatccgtgcttgctttcgtcacggccatggtatcggacgcatctgcggacggttcggatgccgtattctccggatttttgctttcgggctggctgagattgttctcggtcatgctcttctctttctatctattccttatatataggtgacaatctgtgtgatgtcttcaatcgacatgcatgtatccgcgacgtgccgcggccgcaaggttcgaggacacctggaccgtgcgcccgtcgggcgtggtgacggtggccaattgcggcgcttcggttttccaatgcgcgcgtctggaacgtgtgcgggagcgggatgtcctgtttttcggtgtcgccatcagccttgcctgcccttccaccgcggattcttcttgttgatgacgtagaggtgaccgcggcgtcgcacgatcatcgatccttttttgcgagccaatgagcgtatcgaagccctgactttcatcggtcattcctttccataggtgtcgtttgctgtgttttgctggcgttcgcttgccgtatgttcgccggcgaatcgtccgaagagtccggtcaccagctggatttgacgactccgggcagctcgcccgcatgtgccttgttgcgcagattgatccgcgacaggccgaatgctcggatgaacgcccgaggacgtccgtcgatcgcgtcgcgattgcgcagtctgacggggcttgcatcgcggggaagcgcatgcaatcgacgcatcgcctccgcccgctcctcttcactcagccgcatattgacggaatccttcttgtatcgtgcgcggcgttccgcgtatttcgccacgatggcttcacgctggcgttgttttgcgatgttgccggtcttcgccacgtcagcggacctcccggaacatcacgcgtttcctgattacgggatcgaatttcatgagctcgagtcggtcgggattgttacgacggtttttggtggtggtgtaggtggatccggtgcctgccgtggatcgcagggtgataaccggtctgatttccgtggtctttgccatacggttgttgtcctctttctatttgagatggccgatctcaccggattcgatgagtcgcgccgccactgcttcgatgccctgcctgtcgatggttttcatgcctttcggcgtgagcgtcagggtgaccgtgcgtccaagcgacggtacgtaataacgcttcctttgcaggttcgggctgaaggtgcggcgggtttttctatgtgaatgcgacaccgcgttgccgacgtgggcgcgcgtgccgagaacttgacaatgtttggacatgtcggtaactatatcataatgataatcattatcaataaaaggattgtggaaagagcttgaatatgcagcatccagtattgccatcattgggaaacgccgaaacggacaaggaggcgatctccgtagtattgctgaccggcgtacaccgattggcgttggacgccacatcattctcattggcggactcatgcccgtcggtctgctgcgtgacatacgacttcaccaccgacgacaccgccgaaacgggcttcagcatgactcgcaccatccgccgaccgggcggtctgggtcagttaagcgaaggcgactgcacgaccttccccatggaagcctgctgcccgacctgttcggtcaaacgggatcttgtcgccgccctcggccatctatgcaaccgggccgacatgttcctcatcaccctgccgatcggcatcgaaggagcaccggtcgcgcaatatctgctggaatgttcactgctgggcggcaccgcgcgccccgtggatgcggcgacgattgcctccgtgaccgatcccgaaggcttcgcctccagactatgcgacgacgaacagctgctgttggcaggaacggatgaacacgacggcgtattcgatccgcgatgcgtgggcacggtccaggccagactgatcagcgaagccgagcatgtgctgctgcttcccactacgcgccccaaccatcccgacacgaaagccgtcgcgccggaacgcaatcacgaacgaccgtcgagatctcatgatctgatggccgccctggcctcgcccgaaacggtcatccatccgaatgcgcatgccgtcagcctgcatacgttgctggaaacaacacccgcggcaacgatccccgaaagcgccgatgcatgcggccgcagcaatggactcgtctagtccatcacgtcattccatcgcatcatcggaatcgtcttcaccgttccctatgacgtgccccttctcatcccacgggcatgagtagatgacacagggcgtcgatgggggacggttgacgaaagtatagatcagctccagttgacgacgtgaaatgccgatgcgggcatccggtgagatcaacaatagcggcgacgccaattgcgtatggatgagcgcagtaatggtgcgattattgatcgcaccatcatccacccagatgatcgcgtgggcatcatatccccgttcgacacgttcacgctgcttgatgatctcgttcatgatcaggtcgagcttctgcatgaccctgccttcatgggtgttgggatcatgccagaacacgctggataccacggaatcgtcccaccccaagcgatcgccgagcatctccgtatacggctgccaagtggacagccaacgcagatccagcattccacccctcgccaaggcatacagtttgccggccagttcatcggaccaatgcagttcatggaaaccgcgccgcccgaaatctatgaccgccgtcttgtccagcgggaacgcccttttcgccgaatacaggtccgtacggtacccgtccggatcgggaaccaactccacatgcccgacatcggaataattgacgattccggtgttggggaacgcgttcagaacgccatcaaaatccagatacatcaccggcttgttcgcacggctcatctccgtctcacgattcgcaccatggactatcttgaccatcttcctcatgactactcctctcgttgcgtttacttggcgaatgccatcgttcagcttccggaatcggcctgtctccagatctgttcatccttgatgagctgggtgccataacgcatcttgagctgggataccagatcatcgatatgccgctgcgcttcgatgatctcggcactgtacttctgcattctcgcctgattgaaggcgatgccggtctcctccggcatctcaccgaccacatgaggcttctcaccggacagcgcatatgccgccgcctcatccatcagtttccggtcgccgctccacctgctgatgcaacgttcgatacgcttcgcaccgatcaattcaagcggcatccccacactggagaaaatctgataggggcgcaatccgcgcatgtaccagtacatgcagtagacctggaattcatgggcgtaggtgatccgtttgcttgtcacatgggcaatcgccggcagcgattcgaggtagcagacctcttccagcgtgaattcgacgttggtcataccccatcattcctaacgtagatgagcgatcatcttgcggatacgctcctgcaacgtgatgatcgttctattgagctcctgtatttcggacagactcgaaaggatgatctcatcacgcatggcgggctttcgtccctcttcatcgagctgtcggacctcggccatgagctgggggttgctcttccacctgctgatgcaccgttcgatgcgcttcggcccgatcaagcgcgaaggaagtcccgcattggaaaagatgacgctcggccgtgtgccatgcacatattggtacatgcagtacacctgaaacgcatgcgagtaggtgatacggctcgtggtcgcatgttccacaaccgccagggactcgagttcctcgatctcctgatccgtaaacttcttattgttccgcatatggtattccccgtatccgttcttgcatcggcatatgccgaccttgagttcttccgcacggtcttgcgtcgtcgcagaccttcagatgcttgcattcctttcgataatttgcctcactatactctgttcgggcaggaaatccgcagaacggggaagcctctccccctataagcaaaccggtactcctcaatccccttacgtacccttgaaacgagtggacgccaaatacgacacaccacccatcatgctgagagcataacgggtggctgtcatgatatttcgggggcttacgatcgggtcagctttttacgcttcagattcagcacgatatcggcggcatcggccacacgctcggaatgcgtgaccacgatgacgcacttgcccaactggtgcgcggcatcacgcaacagcgtgatcacatcacccgtcgtcttcgggtccaggctaccggtcggctcatcggccagaatcacggaacccggggagaccaaggcgcggccgaccgcgacacgttgacgctgaccacccgataggtgcatgatgttgcgcttcgcttcctcgtgggtgagacccagatcctcaaggatcttcagatcggccttgggattgaccaaacgtaggttctccaccggcgtgagatagtcgatcagattgtggtcctggaacaccaaggacacatgctcacggcgatgctttgaataccccgtctcggcgatgttcccgccttcgaaacggaccacgcccttcgacggggaatccaaccctgccaacaacgacaacagggtggacttgcccgcgccggacggtccggttatcgcatacatcttaccggcctcgaaatccgcgctgacatccgacagaacgcgtatcttggccgcgccgtacatgtaatcgacatgatccaactgtagacaaaccgacatgattgttactcctaactcatggaggaaagaatggacttgggagaacgtgccagcaccgaggcgagcgacaccaccaaggcgatcgcgatgaccccgcagccaagcagcaatatgagcgatgtctgagcaggcggcaaagcatccacctgcaacgacgaaagggaggcatcatccgcattggccagcagcatggacgacacgaaccccgatagcaaagcgccggtaccaagcgagcacaaggccgcaaccaacgccatcaggcaggtttcgatcacgaactgcccgacgatccgggccttgccgatgccgatggccagaaagacacctatctcatggatgcgggagcgcacccagaagaccagcaccatgcccagcaccagaacgccgaccaggcagacgaccgccaggatcagacgtaccagattacgcaccgtattcacagcctgcagtacgccggagaaacgggacgaattatccgtgacgtcatatttcgtcccggccagctccttggccttccgtatcgtgtcaggcaggctttgcgcgctggccgacaggcaccgtaccgtatcgatccgcggttcaccggtcagtttggaagccacgttcatccccgcatacagcagattctccgaggaatccgacggcatgggactttgcgactgcgttttgccggaaaatattccggatacgcgtacggtggagtcatgatcgccttgtttcaacgtgaacgtcgagccgaccgacaatccgttccgctgcgcgaaatcccgatgcaccagtacaccatcgccatcaccggagatgtgctttccctgttcgagccggtacagtccactctggaattccgtggacaacgaggaatccgtggaccccaatacgctgacctgtgcggccacgccaacgtccagacgaggcccctgttggggaacgacgggctgggcgccgtccagttccgcaaaggtcttggtctcatatgcggcctttttcacgccatcgagatgagcgaatcggtcggcctccttcgtgctgatgggatcttcgcgcgcctcgaccgcaaaaccgatgcccatgcttccgccgatgcgatcggccacatcctgcaaggccgccgaaactccggcctgcgccaccagaccggtgaagaccaacaacatcaacaggccgatgagtccgctgcgaatcggcttgcgcacgatggccagcacggcacggctccacacattcacactcgtcatcgctgcatccccagcagatcacgcggcgacttgtacagcatcggcatgcaggagacgagcacgcacaccaacaccacgcccaagagcccgagggagacgggaaggatggcgcccgcatcgaccgataccgcaagcgtgctcaacgagcgagtcgccatattggattcgagattgccgccggcctgccccatgctgctcagttcgcgggcggcggaggcattgaccgaacgaagcgtggacgaaccgagccattgcgccacccctcgcgcacacagccagccaagcgccagggacggtatgccgaccaaaatcatctcgctgacatattgggcgaccatggagggcttgcccacgccgatggataccagcacgcccatttcccgacggcggtcattcatccacagcagcagcaccaggcacagtacgagggccgcgaagatgagcacaccgatcagggtgccgcgcatcatggagcgcacgccctgagccgcactcagcatgccggccgtgtactggtcgttgcgggtgatctgatagttcttccaatccaccggcagcttcttcgcgtcattcatggtcttttccacatcaacgcctttggcgagagtgaaggtggcgtcctggtagatctccttatcgggcttgtactggtacaactcacgcgtggtattcagatccgtgtatacggtgttggaggtcagctcggccctggtggccaccttcctgttgctgtcgcccttgaaaatgcccgcaatcgtggtggtgacgcttgccgtggagccggattcgttgtcggcatcatacggattggccctgagggtgagcgtatcgcccaccttgaggttattggctttggcgagatcctcgtgaatcatcgacatgtgcttgtcggaagccttcagatggcgtccctgcgcaatgctgagcgcatgcgaggcgaaggcattgagcttggccgaatcattcgtaccctcaagattcacggcattgccgaatcgctgctccttcgtcttgtcgtaatcgtcaccttcaggcagcttcatcgcatcggcatccgtcagatcggcggtgacgttctgacggacgacatacgaagcgattccaggcagtttcgcgatgcgctgcacgtcggccggtttcaccgtgccggctccgcgcggcgttcccgaattgttctgaggattgttggccagcacaaaaccgacgaccgcctgcttctcgatttgctcggcttcatgcttcgccgcttgcgatacggcaatcgtggcaagcatgcttgcggacactatggtcaggatgaccagcagaaccaaggtccgtattcgttttctgagtacatagcgtcccgctcgtgagatgaacgtcatgatttcctttcctatgagaaaacaagaagagggccttcacacaagcattctgaaggccctctcacatgaatggaggcggataggcgttacttgccaccgcgtcgacgcatgaacagcgagacacctcccgcaatcgccgccacgaccaccaacgacaccagcacaacacccggtatgaccagactcgaacccgtcgccgccatgacctcccgcatcgacgtcgttccgcctgaatcggcaacggtcgcaccgggcagttcagcggcctgggccgcggtttgggtgaatcccacgaataggcataggccaaacgacaggaccgcactcatccatttcgtcattcttcgcattgtgccgaggtctttcctatgagatctttttgctcaatggtcggctatcgctcaaccgaccgattatcctcatggtaaaagtccacggaatcccgtccccttcgctattcggcgacggtatcatgccatttcgttatcggcgcatgcatcatcattatttttcgggtgcgtctagggtatgtttcggcccgtcgttcaccttccgtccgaccgaatcgatcatggtgcgacaccgttcgctcaacggcaccgacatggcgatgaggaacaggcacaacgccagcacgacatcttcgaccactctccacaccccggtcgccaaatgccatctcgtagcgtccagataaatcacgaaaacgatgagaatgtacagacggacacacagctgacgaacgggaagccgttcctcatcatgctgacgatcagacaccatcccccgctttccttcgacgccggccagccctttgaaacgccatgataccgccgaacgtgaccatcaccggcagtcgggggcatccatcatcatggacaagccgtcatgccatccttcatccaccctatttcagcggaaaacgccaatcgggacaacgattatccgaaggtacgtcatagggggactccaacgaagacgccgcacagacgcgtaacatgattcttgcttgcgaaagcaagtaacggagcataggggctattggcctgttcggattttatctttctctctgtccgcgcaggccatatcctttccgaaactgccggggttccacgcctctcccctcttatccttcgtggaaccccggcagtttcctttcctcagcatcgtcatggcatgcagcgacgaagccggtcgtccccgacgacgtgccgtccatggcacacaggttgccgaaggcccgtcgacggacaacgctccacgccgcgcacctcccgtaccctccccgatggatagggtacgtatagggggattatgcggcttgtcaactccttgcagacgccggcatcgagccatagcatgccttattacgtggggtgctgatgcggcctgcgcaagaggataaggatttcaatggacttgagtagggcatgtatggcaatattctctgctgcattttttacgccactggttttttctccgattgccgcatgggcatccgcagccccgatagacaccgttcctcccaccatgtccggcatgaacagattcctcaggcagggaggcaagaacaagctggtcttcgatgccgtctcggccaaacgggccggatattcggaccgtgacctgaaaatcgtatcctcccagatcaggctgatgaacatgctgctgagcgaggggcaggccatacttcacccggacggctccctatcgttgcggtattacgcatccgaaggttcttcacgaaccctcgcacggggaatcaacagaatggtgatccaatggtatggcgtcttcgaatactggttggacagcgacaaggcgcgtgatctcatctcggaaatgaaaatgggacgattgctgcccgatatcattcccggatggctcggcccgacgatcgacatcgactcgacatcgttgcttcggggcgcgcgagcggcggtcaaacccgatcgaggcgtgatcgtgtatgcgagagccatgcgggccggtgaactgaattccatctggttcacctcccaatgatgccggaccgggtctgaaggtgtcttcaggcgacgatctgcgagcgaatgggagccggctccacggcgtaatgcttgcgcatgcttttcagcatcgtacgaatggctccgttggtctggttcgcagccgtgcggaacttgtcgaaagtacgaccgtgcggatcgtcgatatcgtgcggagccggcaacatcggtcgaatcatcgaagaggacctgatcaccgactgcagacgctcctgaatggtcagacctttgatcatgccgttacgggcgcagtattcgcacatgttcgcgaaatcgcttaacaggaacgtataccgtacggcggccggcgccaaggccacgatgtccttgcgctggctcttttcaaaacacaggatcaggtcggcctcgtccgccatctgacgtgtgaggcgacgggagcggaatccgctggactcgatgcccacgctatccatcagacgcgcgctggatggatcgatctgatgcatcggcagaccgcgggtgccggcactggagacgcgtaccgtggtaccggtcagatatttcgtcagcaacagctcacccataggcgaacggcagatgttgcccgtacagacgaacatgatatgcatacgctgacctcttgcagtgcgtgtttcggttccttatgccggctccagggccgccataccctataaatggatattttagcgcagtccctgccttcaccgaaccgccatcgtgagggctcgggacggaaggcttccaccatcaccgtcaaatcactatatggacatatcttgcagtgcgaaacggttcggcaatgtggtttcgatacactgccacgcactacgtaacaagccgtgaccgcctacgacagacggggcgtacggcagggttccacgaaaggacacatgatgagcgaagaagacaagctcaacaaaaaagtggccgaagccgttgaagtggcagcgaacgaggccgcaaagcgtgaaatcgacgaactgaccgaattcgagcacgcggtcgacgagatgctggcctccggctatctggatgatacgttgcgcgtaatcgacacggaaggcgtggcacaggtgcttccggtactggattccgaaccgatctcgcatctggtcgaaggcgtggaggccgtcggcgggcgtgcgaacgtgttcgttcataccagccagggcgttgtggcgctgagcgtgttggagtacaagccgaacgacgaggagtgacggccgtacgggagtcgggcttgctggctcccgtacggctttggccacggttacggccacggccaaagaggccctcagactttaatgtgagatgcgggccaaggcgcgctgaacggcttcgcgtgtggtgccggcgccgcgtccacgcaccccgaagaacaccatcagcaccatgatgaagcaaatgccggcactgatgcgcagagcccactgaatgccgaacacattggcgacggcatacgtgtctttcgcacctccgatggcggcccaacgcaacgacgtaaacgtttccatcagaatcaccagtaccggagcaccgaccgcaccggcaatctgacgtacggtattcgtcacggccgaaccggcactcacctcctgcggccgcagacaattaagcgaccatgtagtaatcggcatgagcacgaatcccatgccgatctgacgcacgaactgccagatcgacacccaccaaatccaagacgtcatggagatcaaactcatcatgaccgtaccgaaacacaatgtgatcgtgccgatcagagcaaccggccgggcaccgaatctatcgagcgccttgcctccgaaaaactgcgaaatgcactgcccgagagcgccgggcaacatcaccagaccgctgatcgtggcggaatagccgcggcaattttgaatatagagcggcataatcaccataatcgaactgaatgcgaagaacgacagggccgcagtaaccgtaccgaccatgaaactgcggttcctgagcacacccagattgagcagcggcggctgaaccgtccgacgaccatcttcaggccgggcggcggcataccggcgagcgccatgaatctggcgggcgacgaaccagatgatgccgatgatgccgatcagcatcggcagccagaccatgggatgcgtatatgcgtatgattcgatgttcgtgaagccgaacatcagcccgccgaaaccgaagatcgacagtccgacggagaagaaatcggccttggcggaagggtcgtgcacgccgaagttacgtagtccgaagaatgccagaaacagtgaaatcacgccgatgatcgtcaaagtgaagaagatcgagcgccaaccgttcaaatcggtctgcacaccgcccaaggtagggccgatggccggggcgacgctcatggccatgcccacggtgcccatggccatgccgcggtgggacaacgggtagatcgaaaagacggtgatctgcagcaccggccacatcacaccggtgccgaccgcctccaacaggcggccgatcagcaccaatgcaaaggtggagcccagccaggcgaacacggatccggcagtgaagacgatcatcgaagcgagcacgatctgacgggtcgaaaaacggcgggtcaaatatgccgtaagcggaaccatcacgcccatgacgagctggaaaatcgacgtcagccactgtccggtcgtgacggaaatgccgaaatcggtcacaatggtcggcagagcggcgctcaattgcagctgcgtgaagttgccgacgaaagtgatgaacgtcagaatcgcgatggaaacgaatgccgcatgcgtcaaatggccgttggcataagcctcttcacgtgcgagcgcctgcgatgttcccttcataccattgttcatgcatcacctctgccacgtcataaatgactccagaattctatgcctacggtcgggcattgcgcccccggccaaagctggttcagaccttgccaaggagcgtgaggaagatcagaagaacgttgagtgcgacgatcagcgcagcgacggcgatgttgagcgcatgcttgaacggaccgtccgcatattcgcccataagatccctgtcgtgcgtgtagcgcatgagcggaatgattgcgaacgggatgccgatcgacagcaccacctgcccgacgatcagcgcttcggtcggattgccggcaaaccacagcacaatcagcgccggcaccagcgtaacgattcggcaggcccacatcggtgccttgatccgcagcaatccgtgcatgatctcggaacccgcgtacgtgccgacggacgtggagctcagactggaggccagcaatcctatggagaaaatcgtgccgacgaccggccccaacacactcgcgatcgcatgctgcgcaccttcgatcgtgtccgtgccggtcatgccgtacaacgaattcgcagccagaatcaacaacgacagattcacggaaccggccaacagcagcgcccaaaacacatcgatcttgctgccgtgcaacagttgacggacggtcggcttgcgttgaccgggcgcataatggtcgttcaccagcgtggaatgcaagtagatggcatgcggcatgacggtggcacccagcatggaagtggccatcaacaccgttgcggaacctttgaaacgtggaatcagaccggccgccaccgccttcggatccggcggcgctatgaacagtcccgcgatgaagccgaacgtaatcaccagcagcaatgcgatgatgagtttctcgaacatgcgatgcgtggcacccttctggaaaatcagcagaatcgtggaaaccacgccgataatgcacccgccgagaaacagcggcaggccgaacagcagattgagggcgatggcaccgccgatcacctcggccaaatcggtggcgatggcgatgacctcggcctgcatgaagaacatgaaccgaccgccgtcgcccatgcgctcgccaaggatttccggcaggcttttgccggtgacgatgcccagcttggcggattggtattggatcagtacgctcatgcagttggcgattacgagcacccagaccagcagatagccatatcgtgcgccggaagtgatgttggcggccacattacccggatccacataggctacggccgccacgaaagccggcccgagaatgcccgccaatgcgtgtccgtgatgttccttgcccatggcctttccgtgcccttccctgtgactggcgattaacgagcaacgttatagcgcgattatgttacctcggcctgtatttcagctttccggaatggactgtgcggggcaaccgtggagcaccgacagcatggcccgcttctccttggtggtcacggtcagaccgtacttgtctttcacgccgatctgacgcgcgacgtaatcgcaacggtagtcgccgttcgtgggcagccaataggcggccgacgcggaacccttctcctgattggccggaccatcgaccgccagcagattgtacatgtcgttgccgtattcgtaacgtttggccctgctccattcgcgtgcgccggattgccacgcattctcaagcgccaccacatggtcgatctgcacggcgctggacgtatcgcgcccacgccggaaatgaatggtcttacccgtgtacgggtcgttgagcgtaccggattgcactttgcagccgccggcactctgataccgcacgtccgtcagatcacgggccagcacatcctcacgtacgtcgcaaccattgccatccgcgtccgtctgacgatagccgaacgcggtacgatcataaccggccttgctggggttatcgtcgaccgtaagccgttccagcgtttccgcagcggtgccggtcgccgtatattcaccggtgatctcaccgacggtcggactggttttcggcagaatcaggccgatggtgatgccgaccaccgcggcgatcaccagtaggcacagtatgcgttcgaccggtccttccgcattgaaacgcttcttgcgaaagtgcgtggcattacgtcgtcgtggcatgggaatccttaatcataggcgcatgggtcatgggccatgactcatagctcatgtgggtcataggcagaatctcatcggtaagcaagccgttttatgggcggccgaccgtcgaatcttcggtacaaccgaatcttcggtacattgcaacgaactgcagactattgcgaatcaggcgtaagtgaacgtcagcggatcgtgaccggcacgggtcggaccatcaagcgcatcgatggccgcatgctcctcctgggtcagcgcaaaaccgaacaggtcaaggttctcccgctgacgttgcgcatgcaccgacttggggatgataatggtgccgttttcgatgtgccagcgcagaatcacctgtgcagggcttacatgatgagcctccgcgatacgttcgatcgcaccgtttccggcgttcagatcggcaccgcgcgccattggcgaatacgcttcgaccgcaatgccatgctccttgcagtatgcgacgacctcccgctgctgccaggtgggatgcagttcgatctggttgactgccgggtattcgccggtctcatcatgaagtcggtcaagatgctccggaaggaagttgcacacgccaagcgtcttcacgcggccttccgcgcggaactcgacgaaggccttccacgtttcgccgctgcgccagtcgaacggggtcggccaatgcagcatatacatgtcgacatactcgagttgcaacagaccgagctgacggtcgaaggccttgcgtgcggaatcatagccctgctcggaatcacgcagtttggtggtgacccagattgtttcgcgcttgctgccggtgttgtagccggtgttcgcaagcgcacggcccacgccagcctcgttgttgtatccggcggcgccgtcgatatgacggtatccggccgcaatggcgctttcgacgaccggcgtcacgccttcatcatcgatgcgtagcacgccgaggccgacctgtggaatcttattgccatcgctcagcgtgatcgtcggaacgtgctgttcctgtggttccgtcattgtggttccttccgttctttgtggttcggttctggttctgtccggtccggtttccgtggcatttcccagattagccccgtgcgctgcccgactcatccggaccggacagaaccaaaccggatcaaatggaaccaagccggaccggacaaggccggaccaggcctaggccgaaccacaccagatcagacggaaccacaaagaacggaagtctttcgatcatcaacccttatgctcgggtggtggcgcgtgcaataacacgcgactgggtggtgatcagttccggctcaagatgacgcccgttgatgcggtcgataatgcgactgactgcagtgggggcggtccaatcaaggcaggaatccatggtggtgagcggtggctggaaataagcggcttcttcgatgttgtcaaaaccgatcacctgcacctgatcgggcacgctgataccgttggccgccaaagtgaacaaggcacccaacgccagctgatcattgaacgcgacaacgccatcaaacggcacaccggagtcgatgagccactgcgtcacacgggcaccggagccgatggtccagtcgtggccggtgttgccgagcagacgcgagtcaaaggcaacgccgcgcgcatcgcatgcctcaagtacgccgcgcatacgcaactgagcattgccctccaccgcatcgtgcaaaccatccagatcctcaggcgcggttctggcacctaccacggcaattcgaatcgcaccgcggtcgaataggtattccgtcgcctgcctggcttcctgcacatcgtcgggagtcacatgatcggccttaccatgcgtgtcccgcgcaccgacacagacaagcggatagtcaacatcaagatcctccggagacagatcttccacttcggaaatggacagaatcatgccatccgacacagtggtgttgaagccttcgagcagtgcacgagcgccactggcagagccttccgcataagtggtgacgtaaacggagtaatcgtgcagtcgcgccgcgtcaatcacgcgattggctaattcggccaggtatggcgcggtgaggcttggcacggcgagcgtgatgaaccccgtattgccacgattgagattacgggcggccacgttcacacgatagccaagccgatcgataaccccttgcactttctctcgcgtgctttcggtcatgcgaccgctgttgttgatcacgttggaggcggttttcagcgaaacgccggcttcttcggccacatcgcgcagtgtgatgcgcttcttgtcctgcttcgtttcgctcatatcagggctccttgcctgccttttggcctatatgtggcagatgtatcggttcttccgcagttttctggcttatgcatagcaggtattcaacgaaaaccgagatattaccgttgccatgataaggctcggattccgagattcacgattcacctgccatatataggacggataaagacgaaagaaaccggtaatccgccacatgtaagcgagatgccctcgaatcatgccggcgtgccgactgatttcgattatcgtctggtaatcagcatgccattgcgatgaatgacgtaggaacccggcccttccggaccagcctcgctgtggaattggcagatcggttcgccttcgatgccacgcaatgtaacctcctgcttgccgcggggcatgtagaagtcgaaggtcgcatcagcggatttacgcacggtatgcagtacgtcgccgtatcggggatcgtcttcgccacctgaagtagtgagattggcgcggacgaacctggtcagatcggccgcgttcaggtcgcagcccacaaaataggcggcgccggcaccgtacgggttacgggtgatggcggcggtgccgtccaattcccattcgtccgcggactttcccgaataggtggcgagcacttcggtgtcagggccttccacgttcacatcgttctgccacaggcgggtcacggcaccgtccatgccgcctcccaattcgatttcacatggctcgccttccgcttcgcatccgagaatgttgaactcttcgccacggatgccaagcatcttgcggagcaaaccattaccggcacccggatatccgccgagccaagtgtggaaatgctcgtcgatcaggccggtcgcatagccgatcaccacctgaccgccggcagccgtgaagtcggcaagccgttgcgtatcggcggcgctcagcatcagcacgctcggcagcaccaccacggaataggcgctccaatcgtacttgagcggtactacgtcggcccgctgccctgcgtccagaaacgcgcgataccagtcacgcacgtcatgccaatggctgagtttcatgctcggcagggtttcactgcgcgtggcccattcggattcggcactgaacagaatcgccgtatcggaacgttcgagcgtgcttccctgcatgcctgcggcgctcaaatccttgagcaccgacccgagttcgcacacctgacggaacaccttggtgtcttcaccggcgtgtggcagcatggcggagtggaaggcctccgatccgaatgcggaagcccgccattggaaaaagttgatggcgtcggcgcccatggccacgtgcgcaagggagtcgcgcacgatttcacccttacgtttgcggatattgagcggcttccactgtaccgccgaggtggagtgttccatcacataccagggcttgccgagcgccaacgaatccatgagtgcatcggaacaggcgagttcgtcgagatgcgattcgccttcatggaagtaatgatcgttggagacgaaatccacttcttcggcccaatcggcatagtccatgcagcactggtcggtggagaccatgaagttcgtggtgaatggcttgtcggggcagatttcggcgatggcgtcacgctcggccttgtagaagtcgagcagcatatcgttgccgaatcgctcgaaatccagtttctgtccgggattgaccatgctgtcggtgcccatgaagcgcgggatgagcacttcgtcgaagccgttcatctcctgcccccagaaggtggtgccccaagccgcgttgagcgcgtcgatggtgccgtatttgtgctcacaccacttgcggaaggcggccagggcgttgtcggagtagtcttcgcggttgttccagccatattcgttgcccatgtgccaagccgtcacatatggattgtcgccgtagcgttcggcgagtttacgacacatggtaagcgcatatgttttgaataccgggctggtcgggctccacgactgacgcgagccggcgttgatctgatgaccgtatttgtctcgcggaagaacctccggatggctttcgtacagccaaagcggagcggtggcggtggcggaagcaagatcgaccgcgatgcccgctttgccgagcttgtcgatgatgcggtcgagccagccgaagttccagcggtcctcggtgggctggatgcgatcccagctaaaaatcgccagggccacggtgttgacaccggcctgcttcatcaggcggatgtcgtcgtcccagatttcctcagaccattggtcaggattatagtcgccaccgaacgctatgccaccgccattgcgagtcagcagtctcggccaagaaaaggttcttcttgtcgtcatttaagcctcctgaaaaatgcgtttgccgctttccgattctttgatatcccatatgatacaacggtgtagcaacgctttctaaatcgatatttcgcacagcatggcgagccacgtctccgccaggcgcggcccgccccagctcattccttgacggcgccggcggacaggccggactgccaatacctctgcaaacataggaacgcgatcaccaacggcacgatcgtgaccaacgaacccgtgatcaccaggttctggatcgcctgcccacccgccgtggaggcctggtccttccactggttcaacccgatcgtgagcggataccaatccgaatccttgagcatgatcaacggcaggaaatagttgttccacgtcgccacgatcgcgaacagggccgtggtcacgatgcccggcgccagcaagggcagcgacacctggaagaacgtacggaactcgcccgccccgtccacgcgcgccgcctcgagcagctcggtcggcacggcctggtccgagaagatccacatcaggtacaggccgaacgtggacaccaggctcgggatgaccatggcccacggcgtgttcgtcaggttcagcttggcgaacagcaggaactgcggcaccgccaacgcgatgcccggcacgctgatcgcgccgatgaccaccacgaacacggccctgcgccccgggaaacggaacttcgccagaccgtagccgcccatgatcgccagcagcgtggcccctcccgcgccggccaccacgtacaggacggtgttgaggaaccagcgtccgaagatcccgccgtcataggtgaacacggtgacgatgttgtcccacagggcgaacgtcttgccgaaccccagaccgaaggtcgacgtgaagtccgcctgcgtcttggtcgcgttgaccagcagatagaagaacgggaacaggcagtagacggcgaagaccgcgcataccagggtcagcagggcgctgcgcctgggattcgcgacgttcgcgaaccccgacctcgcggccctcgcccgctccgccctctcgtccctggccacacgcctgcggcgttccctctccgccttcccggcggccttctcccgccccttcggacccgccgcggcggcgctgcttgcattgctcatcttgatgctccttgaatcctcgtgcccgtgaggcgacgcgcccgcgcgcctacctcatctgctctttcatgctcctgagctgcaccgcgtacgcgatcgccatcgtgatcaccgccatcgtgatcgccagggcggccgcgtagttgctctggttgcccgcgaagctcaggttgtacgcgtacatgttcggcgtgtagtacgtgccgatcgcgttgcccggcaccatgttctgcatgatgctcggctcgttgaacagctggaacgagccgataatcgagaagatcaccgtgatcgccaggctgccgcgcagctcgggcagcttgatggacctgacgatctgccattcgctcgcgccgtcgatcgacgcggcctcgtacagcgaatgcgggatcgtggacagcgaactgtagaagatcagcatgttgtagcccgtgaactcccaggtcacgatgttgccgatcgaggcgagcagcacgcccggggccagcacgtccagatgcgtgccgaagaagccgttgaacgagcccaccagcccgtacttcgcgccgtacatgaacccccagatcagcgtggagaccacggccggcaccgcgtacggcaggaacgtggagatacggaagaacctggtgccgtgcaatttcatggaatccagggccaacgccatcgccgcggccaggaacagcatgaccggcacctgcaccaccgtgaacagcgccacccggcccaccgcgctccagaactgccggtcgtgcagcagacggacgtaattgtcgaatcccacgaaccgcgtgcccccgatcatcctgttctggaagaaactgatgtacaccgcgtacatgatcgggatgacgaacacgaacacgaacaccaacgcgaacggccacatgaacttccaaccacgccaatccgcatgatgcctattgacacggacctggtcgggaggtgtgtgcaactgcgtcggaacgtttgctgttgcttgggtcatgattgcttctttctgttgcgctgcaactgctgacgccaaccgcttcgtcggccgttcaatcgcagatggttgcgattcgggcatacggaaggcgaggatccgcacgggacgtctccccgccttgccttaccctgtacttggttatgcggttggaagtatggacggtcggcagataccggaccggaactcaacccttattggtgacggtgtagccctgctgggtgccatgttccgcgagcgccttgccgtagttggcgaaggcttccttcaaggtgatctccttgttgtacgccttggaaatctgatcgccgaaagatgactgcgcaaacggattgtacggtaggtaggagaactcggagaccttgcgctgggcggcttcggaaagcacctcgttcacattctggccgccgaagtaatcgttgaccttcttgttggcctcggtggtcgggtcggtgaagtcctcggaggtgagaatgctcttgaggctcgggaaagtaccggtgtcggccatggtcttggcgccctcgccgtgggtcaggtattccacgaacttgtaggcggcggcctgctgcttggactgggagacgacggcgagcgcagagccaccatcctcggcggaggcctcttcgccttcctcccactgcggcagctgggccacgcgccagttgccggcctggtcaggagcgccgttcataagattgatcggcatccagcctccgatggtcagcgaggcgatggtgccgtcgttgagctcgcggttccagtcgtcggaccagttggcggtcttggtgtcgataaggtcttcgtcgatgagcttctgctggaactcgatgtacttcttcatgccggaatccttggtcatgtcaatggtgaggttttcgccgtcgactttccaaggctgggcgccggcctgccaggcttgcgcggtgaagggctggtattccatgctggagccggaattgttggtcatgtaggagccgatggccctgaccttcttggccgcctcgtaatagtcgtcccaggtcttgatttgagtgccatcgacaccggccttcttgaataccgcatcgttatagaagaacatttccggaccggaatcgattggcagcgcgtacggcttgccgccgtactgcagcttgttccatggaccggcggagaaatcgtcggcgagcttatcggcaccgaattggctcagatccgccaaatctccggttaccgcgaattgcgtgacggtcgggtcctcgagcatgaccacgtcgggggcgcccttccccgccgcgatggcattgctcagtgcggtctgcgtgtcagatgcggtgccggtgttgttgaacttcacggtaatgccgggatttgccttctggaagtctttgatgaggtcgctcatggtatggccggtatcccagccccagaacacgagttccgccttgtcggcgtcaccggcgttgccattgctggcgtttgcattgccgcaagcggccagaccggtgagggtcatcaccgcggtcagagccgcaagaaccttctgagagttacgcatgtttcctccttcgagagccagcatcagaccgtcttcgtccgatacgatcaggagcctcgccccactctgccgcccgttttgatataccgctgtaccaatgatgatgacagtcggtacgccctcttacggacagccttgggatcgcttctgtttgactctgtttccttcctgatacagctgtgtatcattgactcttatgatacacagctgtatcaacatgtcaaatccagtcgaacatcccctttccgatatccgttcgtcaatcgattgactcttgattttccaggcgtttcgcattcacttcgtgacagacgactttcctgcagtcgtagcctcgggcatctgaccgaccgaagatttcagctccaccctgagcaaactctcatacttagaaatcatcaatcaagggaaatatcattccaatgtggcgcgtccgacagcgcacgatcccctaaaaaccggttcgccggcagagcgtgcaccagggataagtccgaagtcaaatattagggggcatcaatccgaagtttccccctccatctgaaatcaacccccggcaatcctccgtatgcaggccctcaccccggtcgagcaaccgaacgtgaaggcccaagcatacggtcggtttcgctacaaactcaggaaaagctcgtgaatgcgggtatcgtcggtaagctcgggatggaaggccgtggcgagtatgttgccttgacgcaggccgaccacattgccgttcacctcggtctcgaccgtcgccgccgaaccgacttcggccacgaacggcccacggatgaacaccagcggaacatccttgagtatgacatcggacgagacgccttggggaacatgctcgcccggtgcgaccacgacggcgttttcgccgggagcggagccaaagtcggcagtggcggcaaaggaaccgagctgacgcccataagcgttacggcgcacgatggcgtcaagcgcaccgaagtagacgttcggatcattatccagccgtcgcgccagcagaatcatgccggcgcaggtgccgaacaccggcttgcccgcggcgatatgcgccgcaatcggatcaaacagaccggtcgaccgcaaaagcttgccctgcgtggtgctttcaccacccggcaggattacacggtcgatggagtcatcgaaatcctcgacggcacgcagcagcttccacggggcgtcaagacggtccagcatggcggcatgctcggcgaatgcaccctgcactgcgagaatgccggttacgccgtgacgggcggattcggcacctgcggccacatcggccgactcttcctttgcgatatactcaacggctacaaccatcggatctccttatgcgacggcaagcgggagccgagaatcctacgattcccggctcgccgcgtttgttcagcatgatgggcgcacccatccggaacgacgagtccggcatgcgccccgtcagaacgacatgtcaaaacgatatgggcgagaaatcactcacccctggcggccatgatggtctcgatctcgtcctcattgatgccgaccatggcctcgccgagattctcggacaggcgcgcaagcaggtcggcgtcctgccagttggcggtggcctgcacgatggcggcggcgcgcttggccgggtcgccggacttgaagatgccggagcccacgaacacaccttccgcgccaagctccatcatgagggccgcgtcagccggggtcgcgacaccgccggcggcgaagttgacgaccggcagacggccgttgtcatgcacatacttggccaagtcatacggcacggccagctgcttggccgcctcgtacacctcgtcgtcgcgcagggagacgagctcgcgaatctgcttgttcatggtgcgcatatggcgtacggcctggatgacgtcgcccgtgcccggttcgcccttggtacggatcatggatgcaccctcggcgatacgtcgcaacgcttcacccagattcttcgcaccgcacacgaatggcacgtcgaactgattcttatcgatgtgatacacgtcatcggccgggctgagcacttcggattcgtcgatatagtcgatttcgatggcctgcagaatgcgcgcctcggcgatgtggccgatgcgcaccttggccatgaccggaatggacacggcttcctgaatgcctttgatcatggccggatcgctcatgcgggagacgccaccggcggcgcggatgtcagccgggatgcgctcgagcgccatcaccgcgcacgcgccggcatcctgcgcgatcctcgcctgctccggagtggtgacgtccatgatcacgccgcccttgagcatctgcgccagattcttattcagttcatttctgttgttggccatcgccagcctttcgtcggtagtcttactcacgatacagatactaacgatttgtaattaacaaattacataaactgaatatcacagtggttcaaaaagttggtttcactaaatttttgacctcattttcaccatctcgccattccctgcgatttcgattcaggtgacaatcatacgatttcgcccgattttcttgcctcacccgccgatcacgctttcgaatcgtcggttacgcacgatatcagaaaaacgaataatcaacggttgccatacgaccacattgcggacgcctacatgtgcacgatcgcatcggcgatacgcatggtggaatcacgatgcgaaacgagtacgaccatgctcccctgctccgcaagaccgttgattgactgcaggatcaccgattcgttataggcgtcgagacggctggtcggctcgtcgaacaacaccagatcggcatgacgaaggaacatgcgtgcgagtccgatacgctgacgctccccctcagacagccggccaccaagctcgccgaccggagtgtcaagaccttgcggaagcgaatcgaccaattcgagtgcggaggccctgtcaagcgcgtcgcgaagcacgcggtcaagacccgcgccgtcttgtggtccggagtcagcgacggcacctgtgccggattcggattcggattcggcattcgcgcggtcggcatcgggactgacggacggcttgccggtggcggaatcgtctccgcacactccctgaggcaatgcgatcatcagattctcacgaatcgtgccatcgaacagatacgtctcctgactcatcatggtctgcacccgccggcgccagccggcatcgacccgaggcagcggcattccagacaattcgaccacgccggaccgcggatcccagtagcgcatgagcaacttgagcaacgtggacttgcctcgaccggacgggccttgaacgccaagaattccatgctccggcacgtcaagcgaaacgtgtgaaagaacgggagccgaggaatccgccggcccatatccgaacgttacgtcacgtacagtcatgccatggtattccggacgcgcggatccggtctcgaccacggcaggagcttcgtccatcaacgagaacaggcggcgcgccgaagcgaaagtctgcgtcaggttcgcaggcagcgcgctcaacgcaagcgtcgggccaaacgaactggcaaccagcacgaacgcggcgacaagctgcggtacggtcagtcgcacgacaatcggcatgacggcatccgggccggcatacgccgcgaaattcggcatgaccatcgccaggaaaacggccaacacggtgaacaacatcaccagcaccgcgccaagtcctgcaaaatcgccattgcgcgcactcaaacgagcacgatgcgaccacagggaacgagtgcgggcaacgataccggcaagccgcgattcgccctgaccaaaacggatgatctcgtcgagaccacgcatgtcatcaagcatctcatcatcaagtgcggcggattccccgcgaatcccggaacccaggccgcgcactgcgagcgcgaacagcttcggcagcacgacaccgaccatgagatgagccacaatcagcaggatggcgaagaccgggctcagcgcaagcaatgcgatggcatagatgacggtggtcgcaacggcgattacgaccggcgaaatggtgtgagcgaagaaaatctcaagcaattccacgtcggtggtgaccagcgcgatcaagtcgcccttgcctttgcctgcgagcttggcgggcgcaaggcgacgcaatgcggagaacgccttggcgcgaaacagcgcaagcaggcggaaagccacattatggttcatgtactgttcggcgtagcgcataccgccacggatcagcgcgcagacgatcatggccgcgatcgcaacggtcagattcatatgccagatcggcagattgatcgcagcgaatgccgcggccacgccgaaaaccggtaggaaagtggccgcgagatggccaagtgtgccgcaggtgcaagcgatgatcatgtatttgtgcagagggccgacctcatgcagaagtcgcctcacaagccgccaatcggacatggcaccattggtggaaggtacctggacttgcggctcgtgacttgcgaggtcagggttcgcctccgcagtttcgttcgtgtcggattcggcggaatcggacatccggagcccttgagcggacattccataacccgcctcctttcgctttccgactcgttccacactgtcctgagcacgaaacagcttggcatacacgccgtcggccgccatgagctcggcgtgcgtgccggtttccacggttctgccgttttcgaacaccgccacttgatccgcatcgaccgcattagccatgcgatgcgtgaccatgatgacggtcctgccactgccggcaagttcacgaatcgtctgcaggatcaaggtctcgctttccatgtcgacgctactggtcgcctcatcgaacacatagacggcactaccgcgcaggagcgcccgagcgatggcgatgcgctgacgttgaccgcccgataggttcgccgcgccttggtcgatgcgtagatcgagaccccgtggatcggcccgtacgaattccgcgattcgcgccgcatcaagagcgctccacaggtcgccgtcggtggcgtcggggcgtgccatcagcagattctcgcgcaacgttccggcaaacaggtgactgttggctccgaccagggtgacgttgcctgtcaatgattcgcaggtcaagtcgcgcaattcgcatatggacccgtcatctccgccagatgggttcgagatcgccgaaggcgaaccagacaaagcgatggagccctcatacccgactagagagccggcgagaagattggccgcagtggatttgccggaaccggaagggcctacgatcacagttagattgccgggggttgcggtgagggaggcaccttgaagggcaccacttttggccgtaccgtgcgcggcgttttccgattgcggaggattggacggtgaggcgtagcggaaggcgacgtctcggaagtcgacggtgacaccattgccatagacgggtagactgaccgtgccgcgggtcggctcgggcgcgtccaacaaagcgaaaatacgttttgtggacgtcatgccgttcatggcgacgtggaagaaggaacccaactgtcgcaacggaatgaagaagtcggcggacagcaggatcacaatcagcactccggcgagcggcaacgatcccaagtcggcgaaacggaaaaagttcggcagccaatcgtatgtgccggccggataccgtccgccaaccatgtattgccagattgcgacgatgatgccggctgccgatccaccataggcgaccacgtccatcgcggtaagcgaacgtagctgaatctgcagtacattcatggtcatcacgcggaattgctcggccttttcgtccatctcctgcgcagcgctggcgtcggcgtcgaaggtcttcaatgtttccagcccctgcagattatcaaggaatgcggagcccatgtcagtgtacttgccccaatattgtttgaatacgcgggcggcacgcatcgccaccagtcccacgatcaacacgatgagcggcgcgcagatgagcaacgtcacagcggtcggcacattgatcggtgccacaacaaggaacaacgtaatcggcgccaacacggcatagaacaactggggcaggaacagttcgaagaaactttgaatctgctcgacgccctcgccggcggactgcaccacgtcggcggtgcccacacgttgcgaatacgaggggccgagtgcaagcatcttattgaacagtttttcacgcaatgcaagtttgacccgttcggcagcctcggtgccgaagtgggctgcggaacgcagcatgaggaaacggaccaccatggcgaagacgatgacgatcgcataggccgcaatcgcccctcccggcagtccagcggcaaacgtcgaagtacccacatgggcggcgaagccactgagctgaccattgagtacggtgatttccgtaccgagcagcaggtactcaagcatgtgcgctaacgtgaaaacaaagacgacgttcgcgagcaggcctatccactggcatagcactttcgccgccaccaaccgaccgacgccgggagccatggagaacagtcgtctatcgaacatcgcgcctctttcataagcctcacgccgcaaacgcggcatacgcaaatccacatctcaggctacagaccacgtgccgaatgcacaatgacttcttcttagagccagtcaccgccggcacacataccccccctaattcgctatctcgccgccgtgcgagcactctacgaaactctccatagttcatgaatttgggaatggctatttttcagtgccatcacattggcgcaatgccgaaagacgagacggagtgctcgcacggcggcgagatagcaagttaggaggtagtggcaggaatcccgcacggcctcaagagaggctggatgttcgccattgagcaggcagccttgacgcaaggggtaattgcgtcaatcgtgagtgtacacggataacacggtgatattcaacaacatttcagcagattctgatgcattccgttcagacgacacccccttgctgacggctcccattccattcagatttacgtcggcgccatgtcaatcctttttcagaacgattgtcacgcgattgcaacaccgtgtttgacgatttcaattcatttgtcagttcatacaaagtgaatcgcagtgttcttgtcgcttctcacaatgcagactcatatcgttaccacgtatgatatgcaaggcgtttcaaggggtaaacctcccttgtgcagaggattacgcggcagtaccgcaccgctacgcggccgattcccgcgagaaaagagaacacttcatgctcaccgagtacacgactccaggcacatccgctgaggtacgcgacgacgaatccatctactccctgctcacggagcgcattgagcgcaccggcgaagacacgataatcgccgcccgcaaaatcggcccaggccgatgggcgaatgtaaccacaggagaattccgacaggccgtggtcgccgccgcgaaaggcctgatcgcctttggagtcaaacagggtgacgcggtgaccatcttctccaccacccgttacgaatggggcgtgctcgattttgcgcttgccgccatcggcgccgtcagcgtaccgatctacgataccgattccgcagcacaggccgagcgcattctcaacgattccgaagtgaaactggccatcgcggacaatcgcgaacgattcgaccgtcttgattcagtcatcgaccactgcccttcgttgaagcacattctcatgcttgattccaatgccatgggcgcgctggaaggcatgggcgtggccgtatccgatgaagagctttccgcgcgcatgggtgcggtgaaggccgatgatctggcgaccatcgtatacacgtccggttccaccggagctccgaagggcgcggaactctctcatcgcaatttcgttgcgatcacgcgtgccgcaagcatggccctgcatgagatgatcactgacgaccatccgcgcctgctgctgttcctgccgttggcacactgtttcgcacgtttcatccaatattgttcgatcgcctccgatgacggcgtcgtcggctatctgccggataccaagacgctgcttccggacgtacgttctttcgaaccgacctatcttctgggcgtgccacgcgtgttcgagaaggtctacaacgccgcttcccgcaaggccggcaccggctggaagggtcgcctgttcttcaaagccgccgaagccgcgcgcgattggtcgcgcatggagcaggccggcgagaagccgaccatgaagcagactgcgcaacacctgtcgtatgaggcctccgtgtaccgcaccgtccgtggcgctttgggaccgaggattcgttacgtcgcctgcggcggcgctccgctggacgcatcgttggcgcatttctttgccggcatcggcctgccgatgattcagggttacggcatgacggaaaccgcggcaccgttcgccgcaacccgcgtcaccgacaatgtgatcggcaccgtcggccagccggcaccgggttcgtccgtgcgcatttccacggacggcgagctgcaggtgaagggcccgaacgtctttctgggctaccacaatctacccgataagaccgctgaagtgttcactgaggacggatggctatgcaccggagatcttgcctcgatcgacgatgaggggcgcatcacgatcaccggccgcaagaaggacatcatcattacggccggaggtaagaacgtctcccccattccaatggaacaggagattgcgaagtgcccgatcgtggagcatgcggtggtcgtcggcgacaatcgtccgttcatcggggcgttggttacgttggatccggaggggctggcggcgtggttgccgaccgtcggtctgtcggcggatacgccgctggatcgcgtagccaccaccgctgccgtgcatgatgaaattcagcagtatgtggataaggcgaacgccacggtgtcacgtgctgaatccgtgcgcaaattcgtagttctggacacgcaattcacgcagggaaacaagtgcctgacgccgtcgctgaaggtggtgcgcccggcggtgaaccgcatcttcgccgatgtgatcgaccagcagctttacaacggcaagcgctgaagcctgcgttcaccagccgcacatgcagtaggcgtcggtggattgggaatctgctcaatccaccgacgcctaagtatgtctgagcgtcggcagtttgcgacacttgcccaatctgccgacgctcagcgcctctcagtgtcggtagattgaggcacctcccagtctgccgacgcctagagtgccgtaagcgtcggcagattgggcatggccccggactgccgacgcttacggcacatcgactcagtgacgattgttgagacggtggtacatctcgctgatctcgaggtcacgctcgaattcgcgggcggtggtgttctcgtcaatggtggcgagctcgacgccggcaatgcgggcgaagtcctcccaagcctcacggccgacggaagtggtcatgcaggtgtggtgcgaagcaccggagcgcagccagcactcggcggaggtcttcaggttcggacgcggaacccatagggcacgggcgcacggcagctccttgagggaaccgtccggctcgacgatgtcgaccacgttcatggtcaggcggaagcgttcgcgcacatcagacatggacacgactacggcatccttcttcggggcgccggtgaagaccagacgcaccggatcggccttgccgccgatgccgagcggatgaatctccagtttcggcttggcgatggtgccaatggacggagaggtttcaagcatgtgggagcccatgatcttctcacggcccggcacgaagttgtaggagtagtcctccatgagggacgcgccaccgtcaaggccataccccatcacggcgccgatacgcacgagcacggcggtcttccaatcgccctcggcggaaaagccgaaaccgtactcggatgggaagcgctgcgggccgacgcccggcagctgcggcagggagccgaggtcctcgaagttgtcgacgccggcggtgcagccgttggcacgcatcatgttgaccatggcggcctcttccttggccgcgatgaacagggagtcgtacttggcgtcaagcagttccggatcgacgtcgtacttggccttgtagtcttcgatgatctccttgacctgatcgtccttgacggcgtcgtaggcggcgcacagttcgttgacggcccaagtgttgatggaggcgccgaacacgcgctcggcttcggtcttgtcgccttcggtgacagccacgttacgcatgttgtcgccccagcgcatgaccttcatgttgttggaggcatcccagccggcacaggcgcgggtccaggtggcgatctgctcggcgacttccggatcggtgtagtggccgacgacgatcttacgattgatgcccagacgggtcaggatgtaaccgaactcgcggtcgccgtgggcggcctggttcaggttcatgaagtccatgtcgatggtttcccacggaatctcgaagtgatgctgggtgttgagctgcagcagcggcttggtgagcacttcgaggccgcgaatccacatcttggccggagagaaggtgtggcaccaggtgatcacgccgatgacgttcggatttgcggaagcttcgaccatgaaggctttgacgccgtcggaggacttcagggtgggcttcagcacgatcttgaccggaatcttgccggtggcgttgagcgcgtcgacgatttcgccggactgttcggccacctggcgcagggcttcttcgccataaagatcctgggagccgacgccgaaccagacttccttgccttcgaacgggttttccattgtcatgttgtttcctttacttcgttgttgttgcgatcgttgattgtgctttgtcgattatgttgcgctgccatctctggcgaaggaacgtcgtcagtgctgtccgtaaacgttctggtagcggtcgttcagcttgtcgatgtcctcctgcggaatcggaatgatatcgcccagctgcttggccgcccacatggtgtgagccacctcctcggtcatggcggcggccttgacggcgccttccgcatccttgccgatggtgaacgggccatgattctgcatgagcacggccggagacttcggatacttcttcagagtctccaccacgccctcgccaatggcctcggaaccgatcagtcggaacggtccgaccggtaccggcccgccgaactcgtcacccatcatggtcaggccgcacggaatgttctggccggtcgccgcccatgcggtcgcataggtggagtgggtgtgcaccacaccatacacgtcgggcatgtggcggtagatgtaggcatgggaagcggtgtcggagctcggcgactcggagccgtcgaccacgttgccgtcgaggtcgcacacgaccatgctcgacggagtcaggtactcgtagcgcaggccggacggcttgatgaccatcaggtcggcggtgtgcagacgctgggacacgttgccggccgtccatacgaccagattccacttgattaactgctcgtgcagggttgcgacgacttcgcgcacctgcttgacttcggcgcggacctcggggccgtaatcagccagagttgccatgatgtgttttcctttcgtcaggtcttgatttgatttacgattacttggtttccagagggatgcttgcgattgcggcgtgctccatcggcagtcccttgcggaagcggtcgaagaattcctcgaaaccggccacgtcgtcgacatccggctcttccgtggtggagaccgcgtctgagaagacgcgcgaatcgaggtattcgtcaagcggctggtcggcatgccataggtagtcggcgagcacggccataccccacgctccgccttcagcggcggtggccatgaccttgatcggagtgtcgaacgcggccgcgaggattttctgcgcgaccttcggcgtggtgaagatgccaccatgcccgacgagtgaatcgactgcgacgccttcgtccttggtcatgacgtccatgccgatcttcaccggcgagaatgcgccgaacagttgggcccgcatgaaattgccaaggctcatccgagcttccggaccgcgggcgaacagcggtcggccttccgacaggccggccaggaattcgccggagcggaacggatagttgatgagtcctccgcaattggagtcgacgtcatccgcgatcgcggaacggaagagcgtgccatacagcgtgccggcgtcgagcggctgtccgatggcagccgcgaactggccgaacaggccgacccatgcattgagatcggaggtgaagttgttggcgtggctcataccggccaaatcaccggccggagtggtgacgagatccacttccggatgcagtcgtgccagcttgtgttcgagcaccaccatagcgaagatcgaagtgccggcggaaacgttgccggtgcgcacgcgcacggaattggtggccaccattccggtgccggcgtcaccttcaggcggggcgagggtgatgcccggctggagggtgccggtcgggtcgagcagcttggcgccttcggcggtgagttcgcctgccggagcaccggccaccagcggttcgggaagtaggtcttcaagcttccatggctgggccgcgacttccggcagcgcatcgaacttgtcgatgaacgtggtttcgtaggtgtgagtggtcgggtcgatggggaacatgccggaggcatctcccacgccgagcaccttcctgccggtgagcttccagtgcacatagccagcgagcgtggtgaaataagccaccttgccgacgtgctcctccttgttgagcacggactggtagaggtgggcgatggaccagcgttccggaatgttgtattggaagagttccgagagcttctcatgagcttcggatgtgttggtgttctgccaggtgcggaatgggacaagcagctcgccgttctcgtcaaaggcgaggtagccgtgcatcatggcggagaagccgatgtgccccacatgggtcagtttctcgccgtaagcggtttccacgtcgccggccattttggcgtatgcggtctgcaggcccgtccagatctcctcctgggtgtagctccacaggccgtcttccagatggctggcccagccgtaatcgccggcggcgatggtgtggtattcgtcatcgataagtaccgccttgattcgggtagatccgaattcgatgcccaagctcgtcttgcctgcgcggattttctcggcggtcaacgcaaccggctcttgcgacatagttccaaactccttgcgtccgagcgcctcgtaaccactctgtcaaccgaatgttagcgctcactgttaacgctcactattctaaacggaaagcatcgaccacacaagtccgtcgtgtcctgccactccatgcaattcgcctgatcccaggaaacgggggacatccaaatcatcctcggcagacctcatccgtccgattcaccaaaatcggacaaccagggaacggcaaacggcttgtgggtgtccgaatcttcaaattcggacacccacaagccaaagagtcacgggcaacggaactcagcggtggcgtacaggccccaaagaactgcgattcatgactttggcggggataagacccacaccatgctgcgaaatggagaacgagttctcgtcgccctccccaagcagatacagcgcctcacgcatggctgcggtaccaagtcgttcgaagtccgggtgaatcgtggtcaggggcgggaacatattgtccatcgccggcatgtcatcaaaaccgacgacgctgacatcctgcggaatgcgcacaccgtgctcgtgcaacgcgcgagccacgcccacggactggctgtcgttcgcgcacaccacacaggtcggcagttcaccgccggtgcgtccgatattgtcaagcacatgattcattttgccgtacgcttccgtggcatcccacgattcacattgcacggtcacggaactgatcgcgttcgccccgcatagcttgttccaagcgagcaaacgggtcgccgcatcccgccattccttcggaccggcgaaatacaacaccgaacggtggccatattcgctgaccattcgcatcacgtcagccatggcaccccactgatccacgcccaccacggaaacatgacggcggtcggcggacgtcatcagccgcaaaccgtcctgcacgcttacgcctccgtgagtggaagtgacgatcacacgcggctgcgaaatctgcgcacggcatgcggcggagaacatcacatcggtcggcgtcaggaaaatgaacgcgtccacgttctgttcgtcgaaggtgcggcataaatcgtcaaaatcaccttgcgtacacaacgcctcgtgcaccatgctcaccgacatgaacaaaccatgcgaccgagccatggactcgatggcggaaatcgcggaaatcggaccatagaaacgctggccgccggcaatcaatccgatggtgcgcgagcggcgcgaagccagagcgcgcgcggaattgctcggtcgatagccaagttcgtcaatggccttctgcactctctcccgcgtggcgtccgacacatcaggcgaatgattgatgacgcgcgacaccgtctgatgactcactccggcaagcttggcgacctcgaacatggaaggacgcttgttcgccgttttacgcctgactgccatgcctcattgccctccacacgcgaccattgttgccttcgaccattctacacgcaacttcagttagcgctaacaggcgttctctcgcgttcacttagtgcagcattcgtgcatgccggcaaccaccggcgaacttacttaccgagctgccagacgggcaagtcgagccgcaaaattcggccagtcggtacgcatggcggtcaggagcctgcgattggggacctcgtcgatcggaacccattcgacttccatgctttcgtcgtcattcgcggccggatgtacatgatgcccgggcttctcgaaggcgaagacggtggtatatgcccacggtccgtgatcctcacggtaggagccgaccacttcaatgtcttccggagtgatgttggcttcctcgtaggattcccgcaacgcaccttcgatcgggctctcgccgtcggcggtggcgcctcccggaatgccccacgtgccgccttccgcgctccagaccgcacgatgctgcatgacgatatgcgtcaccttgccggtctcttcatcgcgtcgggccagcagcacgccggaagcgccgttgatgccccaatgcttacgtccgcaggcgcagtccacccagccgtcgccaggctgatgcacattttctttgggcggcaacggtttcgccgctcccgttttcgcatcatgagtcacgcgcggatactggtcctcacgcgtcacattccacaaatcggtccattccacacccagtccggccgccagtcggcgcagcaacggcaggctcaatccgatgatgccgtgtggatcgccctcgatggaatcgatgaacgcgccaccgaaaccttccagcgtaaaggatccggcaacctccagcggctcaccggtggcaatgtaacgctcgatgtcaaggtcggaatattcgcagaaatgcaatgtggccttactcgcgccacggaccatgcgaccagtggcgaaatcaatcaggcagtggccggtccacagttcgccggtggcgcctcgcatggcgcgcaaccgctcacgagcgacggcttcgctgtgcggcttgccatagcattcgccatcaagcagaaacatggagtcgcagccgagaatcaacgggccgacggtggcgcgggtaagtcccggctgaccttcgaccgcatcggtaatcggctcggtgacggtcggaatggcgacatcggaaaaatcacgggtctgcacatcgtcggaatcctgcacgacttccggtcgcaacgtaacgacatcggccgcggatccggtctcaaaaccggcgacggccgtatctcccgcaatctcacgggacttcagcggatatccgatgatcctctcgcccgaagcggcggctgcggtcgccgcgacgttacggtacgcctcatgtacggcctcggccttggcggaagccaggatcatcactcgccgctcgaccgacagatcggcgacgcgaaccccggcttcggcggcggcacgttccagcgcagccggctcgtcgacgttcgaaacgcggatggtcgggcagatgccggctgagaacagcacgtcgcgacgtggcttggatttcgaggcgagaatcagcggaatggaagtactcatgcgcgctccacctgcacgcccttggtgtcgacgccgagatgcagcacgcgccaatggccggaggaaagctcttccgccgcaatccgttcgagttcctcgcgggcgtcgccatgatgcagcaccaacacgcacggtccggcgccggaaacggtggaggcgaacccgtaggagcgcatcttctcgatcagggcccaggacggttccatcagcgatgcacggtacggctggtgcaatcgatcctgcgtggcggcgtacagcaacgcattggcgttcttcttctggccaagggcgagcatgcccggattcatggcggccggcaacaggctcacacgggacacattgtgcacggcatccttgaaggcgaccttgcccggcagggcctgacgggccttttcggtggacagctcgtaatccggaacgaacacggcggcggtcaggtcatcggccacacggtagttgatggtgtggaagccattgtggagcggatcaccgcccgggatcggcacggagccgacaccttccgcggtctccatatcccacgacatggtcaggcctccgtacacggccggcgccacattgtcgggatggccttcgatggcggcggccagctcgaacacggcgtcacgattgagttcgtcatcctgcgcgaaagctgccgctgcggcgatgccggccacgatggcttcggcggaggatcccatgccccgtgcctgcggaatgcggttgttcgcctgaaggatgaagcccatgcgccccagtccgaaggtctggcatgcacggcggaaggtggagaccaccaagtgggtttcgtcgcgcggcagggtgtcggcgccctcgccttcgatcatcacctgcgccgcggtgttcaccgggtcggtgcacaacgtgaattcaagttcgtcgtggtagtccagggccagtccgaccgtatcgaagccggagccgaggttggcgctggtggccggaacgcttacacgcaccttgcgagtaactggagtcatgtctcgtcgtccttcgtcacatcttcattacaaatcatgcaccgtatacccgaaccggtacaacggtcaaatcatggcacgcaatcatcatcgaagtcggggcccacgtttgccttgcctgcaatcgtgggccccgcatcgcaatcagttcaatacgcgcagaatcgacggctcgccgaccacgcaatcgagttcacacacatcttcgacggtcttgcgcagggtgagctcgtcggtcatatgcgtgaccagacgcagctgctgcagctcgccgtcatagcccggatccttgagggtgggcttcagatcctgattcacaccgttgatggacacgccatgctcggcgaacttggccgcgatggcggcgagcacgcccggattgtcgtgaatcacgaaacgtacggcgaactcggccttggacgcttcgatcggcgccttcttcaagtcgttatacagcggaatgaccgggcccgtgcagccttgcgcgatatgacgcgcctcggtgaccacgtcgccgaccaccgcggaggcggtcggagcgccgcccgcgccacgaccgtagaacatgaggtcgtcggccgcctcggccttgacgaaaacggcgttgaaggaaccgtgaacggatgccagcggatggttgttggagatcagcgccggatacactcgcgcggaaacgccggcttcggtattctccacgacggccagcagtttgatgaccttgtcttcggcggtggccgcggcgatgtcatcggcggtgatcttggtgatgccttcgacggacacgtcgtcgatggtcacattggtgtggaagcccagggtggccatgatggcggccttgttggcggcgtcatggccttcgatgtcgccggtcgggtcggcttcggcatagcccttggcctgagcgtccttgagcacgtcgtcgaagtcgaggcccttggtggtcatctcgtcgagaatgtagttggtggtgccgttgacgatgccgagcatgctcgtcaccttgtcgcccaccagcgattcgcgcaacggcttgaggaacggaatggcaccgcctacggaggcctcgaagtagatgtcgacgcccttggcttcggcggccgcgtaaatctccggaccgtacttggcgagcagagccttgttggcggtgaccacggaagcaccggattcgatggcggcgagcacgaacttgcgggctacgccggtaccgccgatcaactcgatgacgatgtccgaaccggtggccacgctcatggtgtcggtggtgaccacggacttgtcgatccatgggaacgggtcggtttcggcggggtcgaggcaagcgacgccggtcagttcgatcggtcggccgatgcgcgctgcgagttcatccttctgctctaccagcagacgtgcggtctgggagccgacggtacctgcacccagcaatccaacgcgaatcggtgcaacatcttcctgtgccaaggcatcctccctcgaatgtgaaatattggtataacgttgctcattgtacggggccgatatgacgaacagcggcgaaattccaagaaagaaatcgctatttgcgacaattctgccgtgaacgtccccatacgtgacgtaccatgttcagtagaaggtaaccacgaacgcgttcgtgccggcttcaacgttgagcgcccgccgaacaaagtccacgaaaggacatgcaatggcaggattcttcgcctctctgttccacaagaaggccgacgcctccgtctcgaatcccgatgagggggcctttgtcgagtcgcccgccgacgattcccgcacggcatcggcgcaggaggaacatctgccgacgcgaatcgcactctgctcgcctgccgacggcgccgcgaaatcgttggaggaagtggccgacgacgtattctccacaaaggtgctcggcgacggtttcgccgtaacgccgagcaatgggctgatcgtggcaccggtcagcggcaccatctcgaccatcgccaatgcgaggcatgccgtgggcatcacgatggagaacggcattgaagcgctggtgcacatcggcatcgatacggtgcagctcaagggcgggccgttcaccttgctggtacagcccgggcagaaggtcaacgccggtgagccgatcgacgaagtcgatctggcggccgtgcatgcggccggaaagctcaccgacgtgatcgtggtgttcacgaacgccgacgacatcgatgcaatcgacatcaccgcccacggtgccgtacttgccggcggtccggtgggcacgttgattgcgcgctgacgttccgtcgatacgcgccgttaccggctgacgtcccagctgaggagatcgtcgatgctctgacggcgaatcatcacatgcgcatcggtctcgccgatgccgacgaccgccggaatcaacgcctgattgtagttgctggccatggtgcgcccatacgcgccggtgaccggcaccgcgagaatgtcgccgcgcgtgatgtcggccggcagccgcacttcgttcacgacgatgtcgccggattcgcagtgcatgcccaccacacgacacagtttggtgtcgtccgaacccttacggttggcaagccgtgcggtgtagtcggagccgtacagggcgggacggatgttgtcgctcatgccgccgtcgacggatacgtacacacgttcatgcaccggattgccggccttgtcggtggcgtcgccattcagccgcaccggtttgacggtgcctacacggtagagcgtcacgccggtcggcgcgaccgtccaacgacccggttcgaaggagatgaccggggcgggcatgccgagcgcacggttcacggtggtgaccgcgtcggcgagacggccgagttccacgtcgatgtccatggcatcctcgccatcggtgtaggccacggaatagccgccgcccagatcgacctccggcaacgtgtacgcatcggtggcgtagaaggtcttgcgtaggagcatcatgcgtttcgcggcctgaatgaaggcatccgcatcatggatgttggagccgatatgcgagtgcacgccgaccagttcaagtacgtcctgatggcgttggatatccttcagcacggcgagcgccggtccgtcggccaccatggtcatggcttcggcaagtttgcgatcgccttccgaaaccttctcgtggctcatgtcataggggtacttgatgtcataccgcagggcacggtcggaaccggcctcgcccgactgctcccccagccttgcattgcttcctgccggagtcacgtcggtcagatcgtccagcacgctcagcttgctcgcgtcggcgtccaccggcagcaacgccacgccgaatttctgatcctcgtgcgcggtcgaaacgaattcgtgaccgcccgcatggatgccggaggtgacgcgcagcatcacccgtgctcgcttgccaagacgtttggcgatgtcggcgatgcgagcgggctcgttcggctcgtccaccacgattttggcgaatccctgttcgatggcgagcgcgatttcctcatcggatttgttgttgccgtgcaatacgagcctacggcccggaacgcctgcggcgagcgcgatgcgcatctcgcccatggtgcaggtgtcgatgagcatgcctgcttcggtgacgatgcggcagatctccttggacagcaatgccttgccggcgaagcttacgtgcgtgacggtgttgttgaacgcattgcctgcggatgttacgaatttcgaggcgcgcgcacgcacttcatcggtgtcgatgacgtagagcggcgagccgaattcgtcgagcaggctttcggcggtgcgaccgtggaaggtgatttcaccgttgtcgttcacggccgacccggccggccaaatcggggtgatgggcatgttcggcctcacatcctgtcgggggcggtgacgccgagtaggtcaagaccttcggcgattacggtccggacggcgtcgttgagcttcaggcgtgcggcggcgcgagccggttccggagccttggcgatgcgcacggcctcggcgtcctctccgcgggcttccgggtcggtgagtgccatcggcaccacgcgttccacgttgtaccacttgtggtaggtggcggcaaggtcctcaaggtagtgggccacgcggtgcggcgcgcgcagatcgccggcttcccgaagcagggccggccactgggccaaggcggcgagcacttcgccatcggccacggtgtcgagcaggctcacgtcggcgccatcgtaggtgatgccggccgcggccgcgttgcggtccacgttgcaggaacgggcatgcgcatattgcacgtagtacaccggattttcgttggaatgcgatgcaagcaggttcaggtcgatgtcgaccggggagttgtagtcggtgcgggccagcgagtagcgggaggcgtccacgccgatggcctcggtcagatcgtcgatggtcacgacgttgccggcgcgcttcgacatacgtacggccttgccgtccttcatcacgttgacgagctggccgatgagaatctgcatgttcctgcccggttcgtcaccgaatgcggcgcacatggccatcatgcggccgatgtagccgtggtggtcggcgccgagcatgtagatggccacgtccgccggatcggcttcgcgatggcgcttgttgcgatagtaggcgatgtcggcggcgaagtaggcgtagttgccgtcggacttgatgatcacacgatccttgtcgtcgccatgcttggtggattcgaaccaggtggcgccgtccttttcgtagatgtcgccgcgttcgcgcaggtcggcgatggccttgtcgacctcgccgtccgagtacaggctgttctcgtggaaccacacgtcgaagttcacgcggaagttcttcatggatctgcggatttcgtcgaacatcatcggcactgcgcgcttgcggaattcctcacgctgttcggagtcaccttcgccgagcggttcgcccttgtcgtccttgccgccgtcgatgcgcggcagatcgaggatgtcgatgccgtcggacttggcttcatcgatgacgcgctgcgcgatttcatcgatataggcacccttgtagccgtcgatcggggtctcttcgccgtgggcggccgccacgagggatttggcgaaacggttgatctgctcgccatggtcattgaagtagtattcgcgcacgaccttggcgccattggcttcgagcacgcgggccatggagtcgccgacggcggcccagcgagtgccgccgatatggatggggccggtcgggttggcggagacgaattcgagattcagggtctcaccgccgagatggtcgttcttgccgtagacgttgccggcttcaagcacggcatcgaccacggccgctgcggaagcggagtcgagcacgatgttgatgaagccgggaccggccacttccacggacttgatgccgtcggactgggccagttcggccgcgaacagctcagccagatcgtgaggtttcataccggcttttttggccagctgcatggccgcattggaggcccagtcgccgtgtgcgcggtccttcgggcgcatcacggtgagcttggacaccggggggatcagctcgtcggtcagggtgcctgccttaccggcggcaacgagagcatgggcaatcttggaaatcagttcacttaacgcttctgggctcattctccccagtctaccgagcgcgccgacagaaccccggcccgagcccgcacgcctcttcctctcctagtcggaatcggaggaatcgaatctggtcttgaggtagtagccggcatagcagagggccacaaacggaatcatgtacagcagcgtggaacgctgggaagggtcgagtacgaccaatgccagagccccgacgcacatcacgatcgcggcgatcggcacgaacggatagccgggcgcccggtacctgagttcgtcaaccgcatgcccttccgccagccattgacggcggaagcgaatatggcacacggacaccgacgcccacaccaccagcgtagccagacccgacacggccaccaacgccagatacacggtggaggcggccactacggaggaaagcagcgccagcaggcttcccgccatgctgaacatcaccgcgaacaccggcacgccatggaagttcgttctgcccaacacacgtggaatcatgccctccctggccagagaccacaccatgcgcgaacacacatacagaccggaattcgcagcggacagcacggccgtcaacaccacgaaattcattacgtcaccggcaaacggcatgcctatcgactggaacaccagcacgaacggactggtgtcgacacccgacttgtgccacggaatcaacgcggccatcaccgcaatcgagccgatgaagaaaatcgccagacgcaacaccgtcgtatgcacggccttcggaatcgccttcgacggatctttcgtctctccggccgcaacaccgacgacttcggttcccgaaaacgcgaacacgaccgtcagcagcgtcgagaaaatcggcagtacgccgttcggcagccatccatcagccgcatagttcccgaacagcggcgcatgcgtatagccggcgatcggaatcacgccgaatatcgccagcagaccgatcacgatgaacgcaatgatcgcgaagaccttgatcgacgcgaaccagaattccgattcaccatacaaccgtaccgacagtacgttgagcagcaagacgaccgcgatgaacatggccgaccatgcccaagcgggagaatgcggaaaccaccgttgcatcaacaggccggcggccgtgaattccgaagcgagcgccaccgcccaattgagccagtacagcacggcgatggtgaaggcggtgccggggccgatgaactgcttcgcatacaggtggaagctgccggcatacggcatggccaccgacagttcgccgaggctgagcatgatgaaatatacgagcacggagccgatgccgtatgcgatgatcgcgccaagcggccccgcctgatgaatcgtgtagccggagctcaggaacaggcccgtgccgattacgccgcccagcgagatcatggtcagatgacgggtctccatcttgcgttcgagcccgccctgctcgcgttcgaccgcggtttcgtcgccgcttccggactgcatggtcattcgttccaactccttgcctgcctccgcatgtgcgccatggccgggcgcatccatcatgacattacacggcatgtctgaagtcggccgggacgaatcggcacgaacgaatggaagagtaagagcgccatacgccgttgtacggcacccgattggtgaggaatcccgccttacacgatgcctcgggcaatatgcgcgaggcattcccatgcggcgggattcggcataccgtctgatggatcagagaaccgcgatggcgtcgatctcaacaagagcgcccttcggaatcatattgttgccgaaggcgactcgtgccggcttcacggagccgatgaacgcctgcgcataaacggcgtcgacctctttgaagtcctcgacgtccttcaggtagatggtggcgcggcacacatgttcgatgccggttccggcggtgtcgagaatgtgcttgatgttcttcagggcctgtgccgcctgctcgcccgcggtgtcacccgccagttcgccagtggtcggatcgatgcccagctgaccggagacgaatacgaatccattggccttgaccgcctggctgtatgctcccagggcggcaggcgcttcggaagtcgccaccgcttccatcttctcgctcatattttctctcctttgaacccacaccgttgcgcggcgaacgcgagtgggcttgatggggatcgaacccacgaccttctgttccggagacagacgctctatccactgagctacaaacccgtgcgtcaccctactttacacgctcttttccgcaatatgcgcaatcgtgagcaaattccgttgaaaaaacctgtgattcggccgaaaaacattacgttctcgccgttttccaagaatgtcgacattacactggggctatgggagagcatatgaacgatttcgagtacacgcgccgtttcttctgccgcgcgatgcccaccgaattggatgatggggacaatcccactctgatcgtgcaaagctattacgtgcacgaaggcggctacgcgctgcgcgtacggctgaagacgcgttccgtgcgtcttgacatgtcgcctgacgttcaaccgttgcagattctggaacggtatcgcgacgactttcgttccggctcaatcagcgtgaagggcccttccgtcggcggcacgcgttatgaagccagccgcgacatcgacgcccgcatcgccggcgaactgatccgtcgtggcggcgaggtgaccatcaagaaccggttcagcgattggatcgacgaggatggctggaacatcgacgtattcggcggggccaacgctcccctgatcatcgccgaagcgcaacgcatcggaccggtcacgaacctggtgattccgaaattctgcaccaccgaaatcaccgatcagccccgcttcagcaacgagggactggccgtgaagccatactcgctgtggcagtcggagttcgagcgggaactggaggcgcaggggccccggttccttgaactgttcggcaagaaccgcatggaatagcggtccgaccgccattgagcgccggtcgcgatcagtacgatcagtacatgagcgtggccagacggcgccgcgcacgcttcagacgctcatcggacggttccggaatggtgaaatattcaagcagacgctggcgtaccggttcgatatcggccttgtgcccggcggccacgaaatccagcagacgatcgaaggcgtcctgaatctggccgccgatcatgtcgatgtcggccacggcaagctgcgcatccacatcattcggatgctcggcggccgcagcacgcacctcacgcacgttggcggagccggaacgggccagcagcagcgccttcgcgcgttcgcgagccgcgcgggagtcgttcggatcggattccagcacctttccgtatgcggccgcggcacctgcataatcgccttgctgggccaacatgtaggcctcctgatgttccggcggtatctggtcctgggcggaagcggcggatgcggaattggccgcatcggaatccggatcgcccgaatacggcgcggaaccggtcacaccggcctgctgggccgcagcgatcagcttcggcaccacgacttcggtgatctgctgcagctcctcatcggacggcaggccctgcagaatcggcatcggacgaccgccgatcagtgcgaaaagcgccggcgctccctgcacttggaaggcctgcgcaatcgaaggattggatgcgatgtcgatgcgggacaactggatctggccgctgagctggttcacggcatcgcccagtttgcgggccatgtcgaacagacggtcgtcggtcggcacccacagcaatagcagaatcgggaacgtggtcgaagtctgcaccatggcctggaacgtgccctccgtggtgtcgatcacgtagccgcccgcagccggagcaccgccggcctgcccgggctcggccttcacctgatgcttgagcgcctccaaatcaacggctccagccaatgaaactcccggattgaacggcctttgttctgccatgatgcctcccaagacacaaaaatcgttgctggcacccactataggtaccagcaacgatttcaacgtccgggggtagggccgttttcagttccggcccgtcatggcatcgttcagagcgcttcgaccttgatgggctggcgttccgagcccacggcggtaacctgcttgcctgtgttcgccttcggaatatacagcgccacgacgttcacatacgtggtcttcatgatgctggtggccttgccgtcgccgaacaacgccttttcggcgtcggaggccggctgcgattcgcggccttcgccggcggaacgcgtccattcggaattgatctgagccaccaccaggtcgccgccgtcggaggagcgcatcacgcatattgcgtcatccaccggggtgaaggtctgttcctgggtgcccttgttgagttccatggccttctgcacctgatcggtcagttctgatagcttcgtgcgcagatcatcgtcggcgaactgcgaggcatacttgctgttcgcgccgtgctgcaacacgtcggcgtactctttgaccgcttccttcggtgtcatcagcagaccggaatccttgtcggtgccctgctggctgccgaggctcgcgatctcgaacttcggcatcttcacaccggagaacagacgcgccacaccccatagcttgtagttctgatgcgcggaatcctgcttgagcaccagaagacgcttggactgctggtcctcggtggtggtggtgatggagaacaccgtacgcggccagccgctctcggtggagatgacggtctgcgccaaatcggtcggaatggtggtcttgcggtccagattgtcggtggcacgcgccacttcaagctcgctggtgcgaatggtcagttccggaccggacagaatcgtgccgagttcatcggtattgcgatcctgattgtactggtcgagtgttttgaggatctgcgtacggatcttcttttcctgttccgcagtcagattcggtgccgcagaggacgacgacgtggacgacgacgctttcggtaactggccttcgcagccgcccatgccgatcatcagtccgacggcgagtacggccgccgcgattttgctgaaacgcttactcatcacttggcctcttccgtttgatcgttgccgtcggcaccgtcgtcggtattcgactgtacctgctcctgcgcgagtcgcgcgaaatatgcctgcagctcatccgccgaaattacggaggtagcctcgccgtcactgttgccggcggtatccgtggttgcgccgccatcggacggcacggcgttcgcctgctgatcggcgaccagattgcgtgccgccggatcgatgatggtcggctgctgatcgtccggttcctgagcgcgtgcgccggaacgatgcgacgcatggcgacggcgcttgcgcttggccgtcgaggccttttcattacgggaggcgctggtttcggcgttcttcacccatgtcgacaccgcttcgctgtcgccctgttcggagccgacgccggcaacggccgcggccgcccgatgacggcgcttgtgcggaggcatggcgaagaccgaggcggcaagtatcgccaggatcacgaacagaccacccgcaaaatacaacggcatggcgaaatcgggaagcgtctgtctggtccaatccaatgaaacggtggcgttcttcgcatcaccgaaatcaatcagtgcaacggcattggtgccgtcatcggtcgaggtgcccttgatctgcagattggcggttccgtttccgcatgaggtcttcgtccacatatcggagtcctgcaccgccacctggttgtcggattggtccgcggttccctgggccgcggccttttgcgtggatagcgcggaccagtcggacagtccggtgatacgcgtgtatggcgtgcctgcaatccagccggcgacatcgcgggccgacccgatgacgatgcatacgttcgcggatgcatccgaggcctttgccgtgatgttcacgcgcttgtcgatcagggaaagcacaccaggatcggtcacgacatagcgtgaaccgttcaccgacgaactggcggtgatccgcgcgctcggcttccacatggtggcgttcaatacgccgagaacgatgcacgcgacggcgagcaaaccaagaatgggcgtaacgatgccacgcatgatcttggcatgacgcgtggggcctgccttgacctgtggctgttcttgttcttcttgcggtaaagtcatagcaccaaccattctacagtctccccatataaagccccctgaaccgaggaaaatcaaggtttgccggtatggttgaacccatgcgcagaactactttcctgaaagccgcagcggcagcctgcaccatgatcatgtgcctgggcgtctcagcctgcggcaatggctccgattcgaaggcctcgtcctcctcatcggcctcgtcatccgcgtcttcctccagctcatcatcgaccaaaatgcatcaggtcgcgggcgtgaccgccaccggcgagctcggcaagaagccgaccgtcgccttcaaaaccccgatgaccgtcgagaacaacagctacgccatcctgcagaagggtgacggcgccgtcatcgaagacggcgaccgcgtatgctcgcagggcatcgccatcaatgtaaaggacggctcggaactcatgagcacgtgggagaagaacactccggattgctccaccgtggtctcctccgacaccagccagatgaccgcggcctactacaatctgatcaagggccagaagctcaactccaccatcgccatcggcgtcaatgattcgaattcctcaggcacctcgtatctgatggtgctcaccttcgtgtccaaatcgaaggatctgacaaaggccgaaggcaccaaggtcatggatgtgccatccgacctgccgaaggtgacgctcgacaaggacggcaagccgtcgatcgacatgaacggctacaagggctccgattcgctggtgtcgcaggacctgatcaagggcaacggcgcggaggtcaaggacacgcagaccgttgtggcgaattacaccggctggctgcttgacggcacccagttcgattcctcctgggaccgtggcgaatccagctccttctcgctggacagcgtaatcaagggatggaagcaaggtctggcaggccataccgtaggctcgcaggtgctgctggtcgtgccgccggatctcggctatgggaacaagaagcaaagctccattccggccaactccacgctggtgttcgtggtcgacatcctcgccgcgtactgatccgccgttcaggtgcatcatccgatagtgggggccttcccgttttgccgggaagacccccactcgtcatccacgcactccgcacatacgtgcccctacccatacaccccatacatattcccgccccgtccatcgccagcgaatcagtcaccccaatctaccgacactcagcacacccccaccgtcggcagattgggagatacccaaacaagtacgggaatacccagacatacccgtgtagacagggatatacccaaactgccgacgctcacggggtactcaccgtcggcagattggggaacacccatgcagaaaagggacatacccaatctaccgacgctcacaggactcacaccatcgatagtttgggagaaatccaaaccaccgacgctcacagggtactcaccgtcggcagattgggaggtaaccgaacaaagtaggggaaataccagaaatacccgtgtagacagggacatacccaaactgccgacgctcacaggactctcaccgtcggcagattgggagataaccgagtaagtattaggagaaatcagaaatacccaaactaccgatgcttacggggtgctcagtgtcggtagtttgggaaaatgcccatacgatttgggaaatatccctacgaaaaggggataccggactggggatgttccggaatctccgtgagaacaatccgaaggagtcgtcgaatagggtctcacgacgtctgaagagcctcttcaaaggcagtggcggattcgttcgcagtcatattcccggcataaatcgaattccctcgattcctagtatggaacctgacacttatcctgaaagctccctagtcgtcaacgctcagcatgccttcacgcatcgtgtagatatggtcggcgatctggttgagctcgtcgctatggtgggatgcgatgatgacggtattgcccttgtcgcgctgatgccgcatctccgcaaggaacatcgccaccgattcctgatccaatccgttcgtcggctcatccagcacaatcagatgctgatgctccatcagcgcctgtacgatggccagtttctgacgcatgcccagcgaatacgatttcaccgtgctgtcggcatgctccaacaggtcgaacagtctcaacagccgttccgtttcctccgggtcgaaatccctgttgatgccggccagatacttcagattctgcataccggtctcctgcaacacgaacccgggattctcgatgatcacgcccacggaatccggcagtttccggttgaattccactgctttgccattgatggtcaccgtacccgcatcaagccggataaacccgcagatcgcacgaagcagcatggtcttgcctgacccgttcggccctaccacgccatagatccgcccacgctcgaaacctacgctcacatcacgcagcacggccttgcccttgatggttttcgacacgtgatcaagatcgacatacatgattgctctccttacgagatgaatgattcaaatgatttccagccgatcgaacagcacgtaattggccgtgaccagcacaatggtcagaatgcccagcaccgcaccccaattcggcacaagcagtgaggatttcacaagccaacgcatcaccggcgcgcaagacaacggcgcaaggaccatcatcaatgccgcaagatagccataggcgcgattcccaccgagatagccaagattgatggtcagaaccagcaccaacaacgtccaccccgcgcacacggcaccaagcgccaacggcgcacgcgacgcgtagaccacacgaaacgccacgatcagctgcacgcctgtgtaggcgagacagtacgccaacactatggcgcagtatccaaggaatcttgacagtccgcggcggcgacgcacatacaccatcgtctcgggaacgctgaggtacgtcgaaggctgttccagcagcaacgccacgccgaacaccatgaatccgatggcatacatgttgccttccaaatgggaggacgccaggtcaaaatcaggaacgcggaacatacccatgaagacccggtaatcctgaccgctcgtatagaagcggtacatcatcaccgcgtatacaagtgcaagcatcaggcgaatgccgttgccttcgcgcactatctggactatccgcttccaagccatcatgacagctccaatctgtcgctacggtcgaacgcggccacgtttgccatcgttagcagtatgcagtaaccgatgaaaggcgctacttgctggacaagcaccgccaccagggaatcgccgatcggataccagaagtagaaggcatatcgggtcaggtcgccgggcatcggcttcagacagaaatcggcgatgatgggtatggcgatgactggcggcagaatctgcccccacgctatacccaggttcatcaacagccataccagcagtgcgaccgatgcattcatcatgagcagttgcagcagcatgatcgtgcataacgaccattgcccaagatcgttcatgccctctttgagcatattcgccacgacaaaaagaccccaagcggctacggacacgacacctgaaacgaataccagccagaaggcgttcagatggaattcatctcgcgggttccgacgcacccgttcgaacgcgccgaaacgcgcgcaacccatgcagaacaatatgagattcgcaggcagaaccacacgctccgcaatctccaccatgcaaccccggtacaacaccggcaacggcatggactgctgcagcaccgacagatagtatgccgatccacaggccaccgcaatccacatgagacgtctcgcacgcacggaaacacgcctgatcggcacaaacaggtcgttaatcatggcgtttcctttgcaaccagcacaatgcggcgaccatcgccggaaggccgaccagggtcatggcgatgccgataagattcgcaacgttggctccgggtgtttcgaagccatcaaagccgagatagaggataggattcagctcctccacatggcttgagaaaggacatatggagggaagccggattatccccggaagcatccaccacagcagcaggaaggcgaccggcaccagcacttccacgttccgatgcctcacaaacggcgaaatagcaacggccatgcatgcgaacaagcctgacagcaccgtcatcagcagaccggcaacagctatacatagcaactggttgaaccggtatatcggatagatccagccttcagacgaaatcagaatgaattggaagctcgcgacatcgacgtccgtgctttccaccccatcgatgaatgagagatgagggttcccggcagcggcgagaagaacactcatgacgtagggaagcacccctccaagagctcccaagagaaagcccgagcacaaggaggtacgttccacgacgccgtagcttgaacgagcttgcaggaacgtcaatctgccgctgcgacgttccacggccagcgtgcttcctccggccaacgcagccaggaatgggaacagaaactgatatagcgtggtcccgctgccatatgtcgagaacaataatgtctcgtccaaaaacgtcggctgatgatatggcagcctgtatcccgcatgccgcatcgtccaccactggaacacggccatgaataccgccagcgccaacaccagcaggaaacggatgctcaataacccgcgtctgatctgcccacgaagcaaagcaccattgaccattctcacacaaccttctccaaccgtcgacttcagacagaatccgggctccaaacgccccaggcctgagtcacgtcgttgtacttagccgtattctgcagcctgaggtgaatctggcacggcttatatccattattttcaaaagcatactgactgatttttcttgactggccagttgtgaagttcaccgtactcgatttcacatcgttatttgaatagcctagtgcccaagcccgaatcgtacgattctttgtaacggagtcagctttgatatacgcataggatgaatcctgcttctgccgatttggagtatctgatgtctcccaatttttttaagtatgcgctccatgcggtatcgccatgattgttggccatggcaggagccgcgaaacagcacatagaggcaacagcagcgaaaagcgccacacagcatctcattattctgctcatacgtaacgatttcatcatcggaaccttccttctgcgatgtcttgcaaagccgagtgccttgcggaatccactgtagagaaactgcattgggagccataggtcgtctgcagataactgcagaaaccgctgcaccacgaaacggccgaccggcgcaccccgaacaacgcgatacactgcaaccatggcactcatggggaatacgaacattcgcagcatacgcatcggtgtgctcgacaacgatgcctgcgcattgaattacatcatgctgatgctcaagcggctggaccatcgaaatggcatgaagctggatctttggtctacgacctttccaacgcgtgcactgcaggaatgccggcatggcttgcagcacacagacatcctattgctcgacatggccttgaatggcgtcacaggtccgcagatcgcgcaattgctccgtcgcgcttcacccaccacagcggtcatcggcatgacctcatacgaaccggaactgtaccaggcagaggcaacgcaagccggcatcacaacgatattggacaagacgacgattgccgacgatcttcccgaggcaatcgccgccgtattgaatgctcccccggaatcttgcgaaacctcacccgcatcatacggaaccgaagctccgctgccgaaactcaccgacgccgagcagcggattcttatgctcagcgcatcgggcctgaatgcgaaacagatcgcggcacgtctgggcatctccgtcgacaccgtcttttcgcatcgacgaaacatcaagacgaaattccacatctccgattggcatgacgtcgtcgcgcaatgccggaacaggcatatcatctgaatgatgctgccagcggcccgaatcgaggaacctatgaagcaacccaccacgctccgccttccttgccgcactccaatgccacgtaccgcactcgccgcgttcacctgcctgttcggcctcgccgccgtcatcgttatgggcgtcgactggtctctcgatgccgcacaatggccgaaatacctgtgctgcgtcattatcgccgtcctaagtacggcatggttcgcgttcgtgccggatcatggctgctatctggtcatagccatgagcgtgggcgattttcttgtcggcggaacagctttcgctccggttctgctattggccttgctcgccatgggctcgatcggatatgcgaaccttatcgaaggcgttttggcgggcatcgcgctgctcgccgccgttttcttctccccctatgccgttgcttttcccacaatcgacaataatctgctctccttcccctgcctcatcgcgttgacgctatgcatcagcatgctcattcgcaggaatggggaacggcaacgccaactgcagcgggaacaggctctgctggccaacgcgggaatcgctcaacgcctgcacgactatacgacgaatgatctgggagatatcgtcatgatggccgatcaccagctcacaacatgtgacgacgggcaacgggaagtgtggacgaatgtcaggaagcttgcgcttgatgcgctggcgcataccagaaaagccatcctcacgctcgaaagcaacaggccggcggccgggcagaacgacggcaccaatcaagacgaccatgaatggcggactctgcaacaacaggccaacgacatgtctaccgaatccagtgggctctccgaactcgacgaactcatcaccgtatgccgaggcaatctggcggcgaacgggtgtgccggagaggtgctccgtctcggcgtggagcctacgtcaatcgatggcaagactgcaccgcttatcatcggtctcgcccgcgaactgttcggcaacatcgccaaacatgcccgggcatatgccggctataccatgctgatcagttggaccgacgccgctttcgtgatcgagctttccgacgttccgaaaccgagtgccgatgccggtctgcggtccggcctggaacgataccgtcggaccatcgagtcgatgcaggggcaatggaacgtcgaaagtgcggacgaccattggagcatccatgcagaggttccgtatcggcgcacaatctgttgacacccatagaacacgattgagaaagtcctggaagtcgcccgacactcaaactgggccaattgccccaatctaccgacgcttacggggcgctcaccgtcggtggtttgagaacgccggcttgggattggggaaacttcccggaatctttgtcagaacagacgcagggagtcgtcctccacgcccttcatctcctcgtaatcgaggatcaggcagcggaagccacggtcctcggcgagtacgcgggcctgcggggtgatggtctgcgcggcgaagatgccacggaccggagcaagcagcggatcgcggttgagcagttcgcaatatctggtgagctgctcgacgccgtcgataccgccgttgcgtttgatctcgatggccacatgcgtgccttcggcgtcggtggccatgatgtcgaccgggccgatggcggtcggatattcacgacgcacgagcttcgcccccttgccgatacgttcgatctgttcggccagatagcgttgcagatgatcctcgacgccatccttggtaagtcccgggtcctcgcccagatcgtaggattcgtcggaatagatgtgctgcaacgtcacctcgagcacgtcgttcgacttgtcggccgaggctcggatgactttctgtggcacggcggtgtcgacgtcatcgtcggcattgtcgggcgtgatgtccttgatggtgcagggcgcggccatccagttcagcggcttgtaggagccgagttcggagaagatcagcaggctgttgtccgccttgatcagcagcacgcgtttggcaagcggcaggaaggcgttcagtcgtccggaatattcggcggagcagtcagcaacaataattcgcacgaggcactaccctaccatgaccggatgtgggcgagcgggatcccgtatacgcaaagcggcctcccgcctcgaatgaggaggaaggccgcttgcaatcacgctgcctgaaagggattactcggcgcgcttgacgtcacgtccacgctcgaccgcaacggtgagcttgttcgagtcgaaggagatgaagccgtcggtcacttcgaaggagtgacgttcgccttccggatccaccactacgatggttccttccttgatcacggtcagcacaggctcgtggtcgggcaggatgcccattccgccctcagaggccggaatggtaacggacttcgccgtaccgtgccacacggggtggtcggcggcgacgatgttcacctgcatgatcgatccggccatcacgcaccgaattccttctgcatgtcgtgccacttcttctcgagatcctcgatgccgccgatgccggagaacgcctgctccggaacgtcgtcatacacaccgtcgcagatgcgggtgaaggcttcgatggtctcgtcagccggcacgtaggagcccggacgaccggtgaacttttcggcgacgtagaagttctggccaaggaactgctcgatcttacgggcacggttcacggtggtcttgtcttcttcgccgagctcgtcgatgccgatcagggcgatgatgtcctgcagctccttgttacgctgcagaatcgccttgacgcggttcgcgcagtcgtagtgggcctggcccacgtaacgcggatcgaggattcgcgaggtggagctcagcgggtccactgccggatagatacccttggaggcgatgtcacgggacagctcggtggttgcatccagatgggcgaaggtcgttgcaggggccgggtcggtgtaatcatcggccggcacgtagatggcctgcagcgaggtgatggagtggccgcgggtcgacgtgattcgctcctgcagcgagcccatctcatcggccaggttcggctggtagcccactgcggacggcatacggccgagcagggtggacacctcggaaccagcctgggtgaagcggaagatgttgtcgatgaacagcagcacgtcctggttctgcacgtcacggaagtactccgccatggtcagtgcggtcagcggcacacgcagacgggtgcccggctgctcatccatctggccgaagaccagtgcggtcttctcgagtacgccggcctcgtccatttcgccgatcagatcgttgccctcacgggtacgctcgccgacgccggcgaacacggacacgccgccgtggttctgggcgactcgctggatcatttcctgaatcagcacggtctttcccacgcctgcgccaccgaacagaccgatcttgccgccctgcacgtacggggtcagcaggtcgatgaccttgatgccggtctcgaacatctgggtcttggactccagctggtcgaatgccggcgggttgcggtgaatcggccagcgctcggacacggtgatggtctcgccgggcttcttgttgaggatgttgccggacacgtcgaacacgtggcccttggtgacgtcaccgaccggcacggagatcggaccgccggtgtcgtgtacggtggcgccgcgcaccaggccatcggtcggcttgagtgccacggtgcgcacggtggagtcgccgaggtgctgttcgacctcgagggtgatcttgtgcgtggtctcgccctcttcgtgagcgccggtgttggtcagctcaacggtaagtgcgttgtaaatgtcgggcaggtggcccaccgggaattcgacgtcgatgaccgagccctggatgcgcgtaacgcgtccagcggtcggctctgcagccgtctcgggagccgctgtggtctgattgtcagccatatgcgttcctactcttccttcttattcagcgcgtcggcgctgccgatgatttcggtaagttcctgggtaatcgaagcctggcgggaagcgttgagcttgcgggtcaggtcgtcgatcaggctgcgggcgttgtctgtggccgtatgcatggcgttctgtcggcttgcagtctcggatgccgccgcggtgagcaggcattcatggatgcgggactgaatgtacttcggcaggatcgcgtcaagtacttcgtcgacgttcggttcgaacgcatagagcggggtcgcggcgtcggcatcggattcggacacaggaccggagccctgctgttccggaagcacgagctcaacgggcagcatacgcagcacacgcaccttctggaccaccatattcacgaattcggtgaacacgatgtagagttcggaaaccccaccctggtccgccggcttcatataggcgtccatcagtgccttcgagatggattctgcgacttccacgccgggctggtcggtatcgccctcccaagtaccggcaacatcacggttgcggtacttgtagtacgtcacaccgcggcgaccatacacatacagttccggctgcttgcctgccgcgtcgaggcgggcgagcagcgattccgtttcgcggatgatcgaggaggtgtacgggcctgccataccacggtccgaggtgagggcgaggacagccacgcgagggttgtcctcgtccttcttcacgatcggatgatcgatatgggtgtgcgccaccagcgcttgcacggcgtcgaaaatcgcatcggtatacggcttcgcgttcagggccacgtcacgtgccttggcgatatgcgaagacgcgatcatctcctgcgcgttgaagattttctccagcgacgcagtggaggcgatcctagatttcaatgcgagttgcgagcccatgaatcacttctctcctgcgacgatcttttcctgctcaaccggagtggcgttcttgacgtcaggcttcttctcgaccagcggtttgcccgcgctggtcacgaaggtctcacggaacgcttccacggccttgtcgagggctgcctcggtgtcggcggtgaagtcttcggtctcacggatggtcttgaggatatcggtgttgtgatccagataatccagcatggccttctcgaacggcagcacgtcgcccaacggcaggtcatccatcttgccatgggtgccggcccacacggagacgacctcctgctccatcgagtacggggagaactgaggctgcttcaacagctcggtcagatgcgaaccacggttcagctgagccttcgaagccgcatccagatcggaggcgaacatggcgaaggattccagcgaacggtactgtgccagcgaaatcttcagcgtgccggagaccttcttcaaagccttggtctgagcggcgccaccgactcgagacacggagatgccgacgtccactgcaggacgctggttcgcgttgaacaggtcggactgcaggaagatctggccatccgtgatggagatgacgttggtcggaatgtacgcggacacgtcgttcgccttggtctcgacgatcggcagaccggtcatcgagccgccgccgaggtcatcggaaaccttggcgcaacgttcgagcagacgggagtgcaggtagaacacatcgcccgggtaagcctcacgtcccggcgggcggcgcagcagcagggagatcgaacggtaggcttcggcctgcttcgacagatcgtcgaaaacgatgagcacgtgcttgccgttgtacatccagtgctgtccgatggcggaaccggtgtacggtgcgatgtacttgaagcctgcggaatcggatgccggggaggccacgatggtggtgtactccatggcgccggcctcttcgagggactgcttcaccgatgcgatggtggagcccttctggccgatggcgacgtagatgcagcggacctgcttcttcggatcgccggattcccagttacgcttctggttgatgatcgtatcgattgcgatagcggtcttaccggtctggcggtcgccgatgatgagctggcgctggccacggccgatcggcgtcattgcgtcgatggccttcaggccggtggacataggctcgtcaaccggatgacgatgcataacgtcaggtgcctgggcctcgagaatacgacggccttcggtcttgatttcgccaagaccgtcaatcgggttgcctagcgggtccacgacgcggccgagatagccgtcgccgacgggcacggagagcacttcgccggtacgacgcacttcctggccctcctcgatacctgcgaaatcgccgaggataaccacaccgatctcgcgggcgtcaaggttgaacgccaggccaagcgtgccgtcttcgaaggtcagcagctcattggccatgcaaccaggcagtcccgtcacgtgcgcaatgccgtcgccagcagtcgcgacgtaaccgacctcctgggtcggcgtatccgacggcttgtacgactcgacgaaatcatcgagcgccttgcgtatcgtggtgggatcaatggtaagttctgccatgatcactccttattgttgtttttaaattcagtcaagtcttgtttcaggcttgttcaccgtgcggcgaaccgcgtcaggcggttgccttcaccgtgcgctgaagatgctgcagttgtgcgaccaccgtgttgtcggtgacctcgtcgcccacctggatgcgcataccacccatgacggtcggatcgaccaccgagttgatatgcaccggatggccggtcttggccgagtagacggcgacgagcttgtcgacctgctcatcggtcagtggctttgccgtggtgacggtgaccatggactcgcccatatgacgggagagcttgttgatcagccactgaatggtctgcagatagcgacgattgcgcagattgcaggtcgcatgctccgccagacgcttggtcacctgattgaagtccgcatcgccaatcaggctgtacagcagcttgatgcgggcttcggcggggacggttgcgtcatagagcttggatcgtacgaccggaaggttgagcagtgcggaatgcagctgggcaagttcaatggaaacctgcagcgtggcattggtgtaatccgcgtagtacatcatgccgtcaacgccgaaatcctccacggcgttggcgatgtcggacacgcggctccaacggcgggataccaaatcgctcatgatctccatcgtgagcggatgggactgttcgccgatcagggtcttcagcactgcgaccttgtcttcgacagggcgcgacgggtcggtgagggcacgttcaagctggatgttgtggtcgagcacgctggtgatcgtgaacagctcgttcccgatacgccatgcatcctcgccggagccacgcagcttgggggccagcgagtcacgcgaaacgcgatctgcgatgcgcgatgcctctcctcgcattggtcacctccctttcttgaaggtcttcaatcacttcttgtcgctgtccatgtcggcgatcatccggtcgatcatcgacgactgcacatcatcattctcgagcttgctgcccaggatcttgccggccagtgccgttgccagcacgccgacctcacccttcaggctgaccagcgcctgctgctgctgagattcgatggagcgctgggcggtggcggtgatctgcgcggcgtcgctctcggcacgggagcgtgcgtcagcgatgatgtgcgatgcctccgcacgtgcatcatcacggatcttggaagcctcgacgcgggcggtgctcagctgggcctcgtacttcgccttggcttcatcggcatccttctgggcctgctcggccttggcgatgccaccctcgatcttcgcggcgcgctcatcgaacacggcctggaacttcggcaggaagaacttgtagaagaacacggcgacgatgatcagaatgaccaacgaccagaaaatgtcgtagcttttcggaaggaacagttccatctcgctagctgcggtcaccatagtgtcttcctcctttcacgttcgtttgcgtcttcggtgttaccttgggtcaaggcttacttgatgaaggcgagcacgaagccgagcagtgccagcacctcgacgaatgccagacccaggaacatgagggtctgcagacggctaccgagctcaggctgacgggcggtgccttcgatggtcttgccgatcaggatgcccagaccgatgccagggccgattgcggcgaggccgtagccaacgacgttcaggttgccggcaacctcagcgagggtaacgatatccatgattgtttcctttctggttattgcttagcaaagcaacacttacaaagccggcgatcagtcaatctccggatagctcatattgatgtaggcggtggtcaggatggcaaagatgtaagcctgcaggcaggcgaccagcgcctcgaacaggaacatgaacatgccagcggcaaacgtgatgatgccgaacggcatcatgagcttgttcaccacatcaataaggaagaactgcgtggccgagaggcacagcgcaaggatcaaatggcccgaaaccatgttggcgaacagtcggatcgtcaacgagaacgggcggataatcagcagctcaagcagctgaatcggggacagcagaatgtagatcggagccggcacgcccttcgggaagatctcatccctcaggaagtggccaaggcccttttcacggatgccggcaatccagtactggcagaagcaccacatggcaaacaccaacggcaacgtgatggacgcgcttgccgcgatattgaagcccggaatgatgccgcacagattgaagatcagcagcgtgcagaacacggtggtgatcatcggcacataacgtttgccgcgcaactcgcccatcacctgatagacgatgttgtcgcggacgaattcgatcagccattcgactgcgccctgccagcggccgggaatgagctttgcacggctagccgtgataccgagaaccagcatcatgatgacggtcgcgagaatacggaccagaatgatgcggttgatggcgaacggcgtgccctggaatacgaacggatcgggaaggaagtcattgatactcggcatctcgggaccatcagcaatggtcagcatgccctctcccaatgcaccaatcattcacgcctcctgctcttgtgtcagctgttagtttagcccaacaaccgagtcgaatgtgacgttctggttactaaaccagttcgtccttcgaagcatgtgccaacgtgaccggagccgcatcgacacattcaactccgaatggctggaaaggattattagcctgtgtctcgacaacatctccacgcacggcccctcctttactgccatctgacgtttccggcgtttcgcacggagctgcgacaactagacacggcttcatgttctgtcggtggcgccaacgtttcgtcgttaaccatcattaatgataaaacgctttatcgaagtctatcccacctttggaataccaagataaacactagcagacgtatcgcaatcggaaaaattccgaatgcgacatggccggcctggaagacgcgacctgaatcagccccgaatcacaccgtatccatcgcgcgagaacggcgtgaacgcgtcgacgcgcggacttccgggctcatgccgaatggagcgatccgtaccaaggcgtttctcggcgcgcaactgcggcacctcgcccaaatcgtacggcgtggtctgataaacccaattcagccagttgcgccacagcagattcgcatgggcgcgccaggcgaacaccggctcgagctgcggatcgtcatgcgggaagtagttctcggggaatggcacattggtcatgcccttcttcatatcacgctcatactcttcggagagcgtatatttaccgtattcccagtgacccagcgcgaacacctcggagaaatctcgcgtggcgatcagccccggaccggacttcggcccccaggtaagcacctgcagatccggattgcgcgcgatgtcgccctcatccacaccggcaagacgagaatgcggctgcaggctgatctcatcgaaaccgttcgtcagaaagcagtactcatcctgcagatactgcgggaacactccgaagatcttctcgggaagattcaccttgcgcacgccgtaacggtagttgagcgcacccatcgcaccccagcacagatacatggtggagaagacgtgactgcccgcccagtcaagaatccgcttgaactcgtcccaataatcaacctgttcgaagtcaagatgctccaccggcgcgcccgtcaccacgaagccgtcataataattgtcttcgaaagtatcgagcgtctcgtagaacttcaccagatgatcggcgctcacgtgcgtggcctcatgcgtagaggtcttcatgaagtcgatctcaacctgcagcggactcttcgaaatcaggcgcagcagctgcgtctccgtctcgatcttcttcggcatgagattcaggatcaccagtttcagcgggcgcacacgctgacgctccgcttctggcttttcaagcgcgaagattcgttccgaatcgaggatggctctggccggcaggccgctggggatcttgataggcatagtccctattatggtgcgggcacggatatggaacgctcccctaacgggcctaccgatataggaaatattgataatgcgttatccgacgggggttcacgacatcaaccaatcacgacacgccgacttgacatttattcgttcattcgtaaagtagataaagctgtcacgaagacaagccgtcgcggggtggagcagctcggtagctcgctgggctcataacccagaggtccatggttcaaatccatgccccgctaccaacgcctccggattcacattaaagaattcggaggctttttctatatcgtccaagctccacggatgtttcccagagaacttctgcgaaactgctggccttgtaacaccaaggacatccgccatatcctgctggttcatgcttcttgcggccatcatcattcgcagattaaaactaacgaggtcttgcaaaccgcgtttcttcgtcgccactggtttcttttcgactgttttcacattacatatggtaaccaggaattccctaaattagcaagacgacactccgatgatctcagaaataaccaatggtgactattatatgtgaccatgagttacataaagttatcatcagatacgataggtaaaactatcagacttctactaattgcaaataacatgtcacaatccgacttagctagagcactcaatatatctagaccagcagtaacaagaaaaatcaataatcagactgcatttacaacagcggaaataaacatcattgcagatttatttcagatttctacagattcactattaggtcgctcacaggatatgaaaaatgcgtgatcagcttgcatatggaagctccctcccggggttaggcaggagggagagttttcaatgttttggccatgggcccaaagcgaggaaacccatgaaccgcttctcactatacacgattctagggccgaagtggttcattgcggacgatggtcgatgaataccggaacttttatggttaggaagcactaatgagtgttgcggcagttgattgggcgttgaggcgagcccctgtaggtgcggatgcgtccgcgcgtctggtactcgtgtatcttgcggaccgtgcggacgatgaagggcgggatgctttcccgagcattgccactcttgtcgagcagtctcacttgtccagaagcaccatcaagcgtattttaaggcgccttgaagagcaggggctcatcagtcgtggtgaccagttaaaggtcgcccattatcgtatcgaccgtcgtcccgtggtctgggatctgcatgtggaattgaccgtggataactcacgggaggggcgggggctcaaaatgacccctcgtgaagaatcgcatgattccgcggtttccgcgggggttcaaaatgagcccccgctcagtgaggaaatgtgtgagaatcgtgagcgagggttcaccggtgcacggagcgggggttcactggtggaccacaaaccatccattaaaccatccattaaacctctttatccccttgaaggggatgaaggcgatgtggtggcgatttccgacggtggtttcccggatgggcctgacgaacggatgcccgatgccatccgtggggacgatgctcctaccgctcaggatgagggtggggatgcgcagcgggttgtttcgttgatggcttcgctgcgtgagtccgctcgtgttgagctcgcgccgttcaaatccgaggagtcccgcacgaggtttgagcgcaggcagcttgcagcggctgcccgtcttgtggccgcgtttggcgtggagcgggtggagcgtaccgctcggtgggcgttggatgccggccagccgttttggaggtccgtggcgttcactcctgaacggttggagcgtaactggacacaggttacgagccagatgagtgttccacggccttccacaggggctttcgcggattctttcccggtctcccatgttcatgtgcattctcgtggttgcgagcatgtgcagcaggttctgggatacacgaatcctggggattgtgtggtggattcacgcgcagcgcgcgtcctggatttgcttcgatccggctatggcgtcgaacggattcgtgagacccttgccgcgcgcgaagccactcccatggctcgataagcccatgttttcaatgtttttccaaggtttaaggggttaatgatggaaggatttagatcaaccggttcaacgcagtcgtggcgttcggcatcgaagtgttcgacactctcaccggctcgtgccgatgagttgtttttcgcggatggcgcgcatcccgacacggtggcgcatgcgaaaacgtattgctccacgtgtcccgtcaaggctcagtgcgccgcgtggggcgcggccatcaatgccgagtttggcgtctatggcggcgtgccgtcgtatgcgcgtaaaagtctggtgagtctgtaccgccaggctcatcccgatgaggatacggccgcattgagcgaagacgaacatttcacgagattcgctgaatggatagaaaaggatcccagtgtgatcggtcgggccattcatcatgccagccactcgcataatcgcgcgtactggcagaggaagcgtgcacgcatggtcagtgtccaggctggggatatcgaacttaacgggatcattcgcgtagccgacattgagcctgttccaggccgttgtgtccagccggctcttttctaaggtttttaagttttaccaccaatcaatctaaggagaaaataaggatgatcaagaatcattcacgtgttgccgctgccgtcgcagcgggtgcgtgcgcgttggggttggccgtcccgcctgcatttgcggaagataccgctcctcttccaacgccgtcaacctcaacgacgaagcctgctgagcagtcatccgaaacggctcctggcacgaagccttccgatccgcttccagcaccaacgacagcgccgaccacgacgcctattccaaagccacaggatacaacgcctaccgagacggccccggcaccagcccctgttccaacgacgaagccttcccggccatcggcaacaactcccgagccaactcagtcggtaaccgacgatgtgaccgttcccgctcctggcaccgcatcaaccacggtcggcaaggcgcctagtgcttccctgccggttcgtcgctcgtatacgtctgtgcgttctcggtatcgttatgctacgcgtagcggcgcagcgtccgctcctcgcctcgcgcagaccggtgcgtccattgttccacttgctgttgtttcggccggtttgatggtcctggccggggcgggtctcatggctcgtcgaacgttcgaccgctgaaaaattcatcgttgtccttatgtccttcatccccggaacgtttcggggatgatgaatgagcaggccgtgagcgcacccatgtgcgctcacgggtattggaaaaagatcgctaaggagaagataatgtttaccactacggttattgaggcgggttcggcggttcttgccgccgacgcgaatggtgtcgtgacgaacgtgttgagcacgcttgcgacctgggtcgttgtcggtggcggtttctgggcggtgtggggtgccgtcaccttgggtggcggtctgtccgaccataactctccccagattcaaaatggcgtgtggaagatcgtcggcggcgcgatcatcattgccgccgccgccttgttcaagactcttgtgtaacgaaggtccgaccgtatcatgtttgatttcaaggatgggttaagatccctgctgaaccagatcagccaggggatggatccgacaatatcaagcctgttgactcagactccggcgggtaaatatcccgatgcctatcggacggtgacgaatatcgctaccaccgcggtcaagcccgtcgccatgaccgtgttggcggtggtgttcagtctggaaatccttcatgccagccagggcatcgatcaggatggtacgcagggtgtacacacgattacgaagtcgttattcaaaatcattatcgtgtatatggctgcaatgaacgcgtcatggctgtgtgagcttatcacgtatctgattcagcagatcggcacgggggtcagcaggctcataacgcttcctggaacatcatccgatgctcccaagcacctgttgggaaatgctcttgagtcgagcggcgctcttggccaagcaaatcttggccaacaattagtcgcaatcattatgctgcttattcccttcttgatttccaagctggcgacgcaggcggtgcaaatccttatcatcgcgcgttttgttgagctcttgattctcacgacgtttggcgctcttcccatcgctttcctgtcgtatgacgggacgaaaagttggggtgaggcgtatatccgcgagtatgcgtcgtgtgcgtttagcaatatcacgctcctgataggcctagccgtatatcagcctgttgccaacagcatgcttacccgcaatcaagatctgatgaagatgaatcttaatcaggtggttttcgataattggggacagctcatcacggtgagcgtgttgatggttgcactcgtcctcatcagccagaaggcatctaaggcattgttcggtcaagcctaaatgaacaggagaagtttcatgcttgtgatggatgttcccacggatatcaaccagattgatccgaagcaatggttcgggcttactggtcgccagttcctgtgcgtgtccggtgtcgtcgtatgcgccgtgggcgcgatcgtctgccagttcctcgcccccagccaggtgagtcaggctgttaatcaggtcatcatcattcccatcgtgcttttggtattggtgggctggttcaaaaaatccggactgcctgtagaggattttcttgtccggtattggcagtggcgcatcgtgttgacgcgtaagcctctcatccgtgagggagagatccctcatgacaggcatgccacgcggcgcgaactcaagatcgtcaacgagcacgtcgaaatagcgcctaacgtccaggacgcttgaacgttcatcagtcaatggttaaaaagatatggttcttaaggagttttcaatgtttggattgagtgggaatcgtgggtctcatgtggatcaggggcatgcgcggaaggcgaagaaggaagctttgactgcggcatccatggtgtttctgcatggtatccgtaaggatggcatcgcctatgtcggggctggctggtggagcgcgacggcactgattagcgacgtcaattatcagcttgcctccgtagatacgcggaagaagatcttgaacgcatggatgagtacgttgaacatgtttgatgagaatacgcgtattcaggtgacgagtgcgaatcgtatgctcaacgggcgtagcgtcacgcgtggcgtgtacatggatgccgagggtcgtgatggtctggattcgtatcgccggtcgtttaatgagctcgccgccgaccaactcaaaggcctggcgtcaagcacggtgacggacaagtatattaccgtgagcgtcaaggagatcggccaggacaaggcagtcgtcaggctcaatcgtctcctgtcggggttgaagacgcagcttgcttccatgagtggctgcacgacacatcgtcttgaccgcggtgagcgccttcgtgtcctgggctcgatgctgcaaccggatgagcccttcacctttagcgaggagctcttcgagcaagcgccgaagaatatgcgggcgaaggatttcgtcactccatggagcatggatttcaggaataaggatcagatcactctatcgtcccgaagtgagacgttcatgacccatgtgtggttggaggcatggccggcacagttaacggatacccttatctccgatctggccgatatcaccgctccgatagtggtcaacgtgcatatcgcgccatgggaccgcgcatccggcttggaaaaggtcaagacgaagcaggcaggcgtcaagggcgaatatgacaggaccgttcaaaagctcgccaggcaaggattgggcgcggagagcgtgcctgattccattaccgagcgtgtggatgaaatgactacgttgcttgatcagcttcgtacgtcgaaccagcgtatactggacacgcttgttttggtgagcatgagcgccgatagtgaggacgagctcaagcaaacgcttctggaagtggaacgtgtcgcacgtcgactgtcatgcaagatgagcgtgacgcgttacatgatgcccgaagccctgaacgccatgctgccattgggcgtcgatagactgccgatgaggcgagcattgacaacggatagtgcgtcgattctcatccctttcaccgctcaggaaatcatggagcctcacggccagttctatggggtcaacgaacgcagtggcaaccccgtaatcgtgaatcgtagcgagcatatgaattccaacgggttcatcctgggaacgaccggctcaggtaagagccagtccgctaaggccgagatcgcgcagcgtgtattgaattccgccgatcgcgtggtcatcatcgatcccgaacatgagtatgtgccgctggcacgggctttgggcggacaggtcatcaccgtttccgcggactcgacgcaacatatgaatccgatggatattaatctgacgggtagcgatgataccgaccccgtacgctccaaggtatcggtcgtcttggatctgttaggtgccctgatgggcggcacgacaggtttaagccagctcaaacgaagcatgatcgacacggccgcgatgaacgtgtacagggacacgcgcgctcaattggattcgaccggatcgtatacgcaaccaaccttggtggatctgaaggagcagatcaaacgcgtgtatgtggacgtggaaaacccttctcctgaagcacaggatctcgtcaccgagctggagatgtttacgactggttcctcttccggtttcgcacacctgacgaatgttgatctttccggacagttcattgtttttgacgtgtccgctttggctggtcagattcaaacgttcggcatgatggtcattctcgaccagatttggagcctggtacgtgcaaaccgtgataccggtttgcgcacatggttgtatgtggatgagttccaccgtttcttccataacgagtattccattcgcactttcctggacatttataagcgcgcccgcaaatacggcctgggcgttaccggtatcactcagaacatcgatgagctcttgggcaatgatcaagcacgtttgatgctgtcgaacgcggatttccttctgctgatgaatcagaagacaacggatgcggaaatgctccaggatctcctcgaactgtcagatgaacaggtgcggttgatgacgaccgcgcaagcgggatgtggtctgctcaacacgaacggtgtttccctcggttttaataatcgcatgaatcaaaggaatcttttagcgaaattgtattcgaccaagttcggcgacagcctaccacaagcgggaggtgtgctctgatgcctgcgtatgagcccggagggcatcaggcatccgacagcctgtatgatcaggcgacgagcgcaacccaagtcactcgaataggtgcgaaaacgagtgtgaaagccgtccaaggggtcgccggtgctgtgggtggtactgccgctcacacatatcagggtatcaggaccgtggtcggaagagtgaaatacggtaaacctctcggccctaagatgacatttaagggccgcgtgtctcgtcgtgttttcctgttgagaaaagggttgaaggagtctcctcgatccatactcaagggcgtaggcacaggactgaagaagtctcccggagcgtatggaaaaggcgtatcgaacacggtaggcgcttccatgcatggcatggagtcgggtgcggatgatgagcttactcggctgtctgcatcctcatcccgtcttgtttcccaggctccacgcgcaggggtgaaaaccatccgctcaggcgcaaaggctctcaggaaagcccatgggtcagtcaagcgtgcccagcttgctgcaaaacagttgaagtatgcgcgctctaccatgcaaacggtcaaggcggtcgcccggatggccgcttctggcttgagtggtatcggtttagcgcttcttccgcttgccggcattattgttgcgcttattgccgccattggtttactgatgagtttctttagtggccaatcgggatgcgatgccgggaatgccgttgcggcgggtggttttggcgctaccagcggcaagcttgaggggttaaagaccacacaggttcgcggcgtgaccgcggtagattatcaggccttaggtatcaagccttcatggttcgaggatgatacttccgcgtaccagtttcagcagtgcacgtggtgggtcgctaaccggtggaagatgctgggcttgcatgtcgaccatcacatgggcaatggtgtcgactgggccgcgtccgcgaaaagacacgggtatccgacgggagatacgccacgtcttggcgctatcgtgagtatgtcaggtggcgtccttggcgcttccgccggcccttacgggcatgtcgctgtcgttgagcagattgattcggatggtagcatctgggtgtctgagtcaggcaccggattctttaatacgtatggcgctcccgttgtcgatcagtattccaaagcggccttagatgcagctcggggtaagtacacgtacgtttattcgactggctccgatccctcaatccctgctggtgcgtcggatacgagtgaggtttcatatgcgtctatgggctgccctgtaggagacggtagtggaaatacgggtgcggcgtccgcggatgcgaagaccgctcaagagtatgcgaagaagaccatgaaggagcagtacgggtggggcgatgatgagtatcaagcactcctgaagctgtggaataaggagtccggatggaattacacggcagaaaataagtcttctggcgcgtatggtattccacagagcttaccgggcgataagatggcgagtatgggcgcggattggcgtaccaatcctcgcacccagatcaattggggattgaagtatattaaggacaggtacggtacgccatcgggggcatggaggcatagccagcaaaccaactggtattgaacatcacagtataaggagtttatgatgagtgattcacgtcggaggaatcgcattattctctacggtattatcgcggttcttgtcctgctcatagcaggtatcggtgcgggtgtgatgattggcgctcacatggccgcttcgcagcagcaggcggcgtctactacccaggcgtcaggttccagttcagctaattcgccgtctacgggcatgagcggcacgacgggtgattccgcggatttgtggcatggaaaggatattcgcaaatccggcgagggcgtgtatccgggcatggataaggaacgcgcatgcacgcaggcaggcgtggaagcggcatactggctcatcagtggttcaggcagtcagcgtgaggaagagctgtataagcggttcttcctgcctaaccttgtcagcgcggatgtcgatccggagtccaccgctcactggatcaaccatggtgatccgccctttacggcagtacccgtggatgttgctgccgatatgttgggtacgaagatagacgataatgctatcggctgcgtggtctctttggacggcaaggaacatggtaaggaaaatattcccaacagttctgacccgtatccggattccggtgttctctatttgcaactgaaccgtaaagataaggattccgcatggttcgtgatgtccacgatttataaccctagtgattatcagcgggatattaagcagcaaggaaataattaactaaaacttcccaaccctaattcatccctttctgattccattcaaataaagtatccaaccaatcaaaaacgacattatgggcaagtctcaaattgttgacctgacaatgggcgtctgcaccactttccgcctcaaatatttgaagtttagtttgcggatttttagacttaagcgcttcgtaaatcgtcctggtctggcgctgcaattcgacgctttcaccttctcccatgataaataagcaagggcacagaattttttgatagtctacaacctttgcacggctaaacacctcagtaatagcgctcttaaaatcagaagcgccaaactgccaggcatatttttttagatttaaatccgcagactcattcaaatctccagctaaccttaaaacgacattcattaaccaacttggagcttttaagcttgacccaaattcttttctaaagagttccgcaatgtcataaatggctgtactcgcaatccatgcatgaattctcgaatcctcttcggcagcttgtgcggtaaaatacccccctccgctgacaccataaatggctaaatcattcagctcgggattcctgccttccaaccagtctatgcacagtgaaattggaatagcggcattcacatcaaaagttaaccctctaccagggttagtcccctgaccaggaaggtcaaccattaaaacattgtaacttcgcctccatccaggatagccagcaaagtaaaataaatcttcgcgataagtatccccgccaccaaccataatcaaggttggacaattattgccgctgtgaagataataacccggtaaataggaatcctgataatcaatcgctagtttttcgactggggctcccagcgaatggactgcgtcagaaaacgctctctccatttgatgaacggtagacagatattcgtcagaatatggattgataaactggattgctgaacgaaatgaataggcctgtgccagataatactgtgcttctgtttgcccactcaaatccgaattgcttactttttgttcaagatagtccccatgtgataaaaagacatttttccagtcatcgggctttggtgattttcccaacttttgggcaagataataaagttctccgtgagagaagccaaaaacttcgccaatacctaacaaccaattaaagaaaaaatccgtatcaccattcttgaaaaatattcgggtggattgcctttttaaaatgacctcattttccttcatcacttacctcctattttctggatttttcatacgggaaatttcagtaattaaatggttgccatccagtatatcaagtgtggcactataataagtgaggggactcttttctgcccatcccgccaagcacctctgtccctgtctccttcaatcagcgacgtagcggatacacctcacctcggagaggtggaagacggctctcggattcaggatgaacgagctggcgatgcgacgctatcgtctccctgggaagcggggccctcgattccggcgtggccggtttggctacaatttgcttgcgtagtttcgtaccttggtgaggaatcgtgtgcgcttgcgtggggttgatctacgtaagtaggacatctggtggtgtttgatggtcgtgacgccgcacatgattttgagaatctggtgatggaggaccttaccatagtcgggctcgaataagcgtgcgtagaaccccggagtatcgttcgtggtgatgatccatgccttcttgcccttgagcagccccttgggaagcactccccgatacacgtaggcgaaccctttggagaagacacgatcgatgaaacccttaaggatggcgggcatgccggaccaccagatcgggtagatgaatacgagcaggtccgcgtcggtaatgatccggcggtaccgctcggtatccgggtcgatgttcaggttgcggcgcagatggttttcatcgaagcgcaggaccggatcgaagttctccttgtacagatcaaccacggttaccgagtgtctggcggggttatcttccagcccctgcatgacggagttcaggatggcgtggttgtatccgttgtcattgggataagcgtaaagcactgcgatattcatgaacccattgtatgaatcgggacgcacctgttgtcatggacatgtcccgatagcttaatccttgatgagcaaggccgtatcattgagataccgtctccctgggaagcaaggccctcgattactgccaaggcatcgcctttcgccccaccctaggggatttagcctagttttcgactgtagaacggtttgagaccgcgcaaaatatagacgcacatcgcattatccaatcgtccgagctcgtccgcagtgaggagttctcgcttctgtgcggattgttggatgctgtaggagccgttcattcccttgttctccgttgttgatgttgtccaaatggtttgattgcccagtattgtgctataccatttcgtggttgtctcatcattgccgcccaggaagagcttgctgtcgcagttggcggtgatggtttcccactcgtccttgtagagcgccttgatttggctgatcgtctggaggatgaccgacacgctcatgtttctgccgcgcatggtggagatgaggatcgggaatcccggtatcttgccaatgttggcaaactcatccagcatgcaatgcaacggaatggttaatgcgccgctcgcattatggtctgctttatacatggtggtttcgaacaagcattgatagaagatggatgccagatacgtgaatgtctggttcgtgtcactgatgataatgtagatgacggtgggcttgtcccctacctggtcgagctgcatggtgtcattatccaggatggttttaatacgcctcgcgtgcagtcctgctgtttggttcgcaagtgtcgtgataatggaggcgcgggtctctgcggggccttgctcgtaggttcggtattggctgcaggcgaagtcgaggccttcaagcatggcaaggctttccccgtcataatcatccgcggatttctcggcgtcctcgatgaaggcgcgcgtttccgccataaggtcatcgatggggcttgcctggtcaggatcggattcactggcgctcatctggccgagcatattcatgacggtgttcatgttgcgcgtttccggatcctccgcaaaatacgtgtaggcaagcaggccggtcagcaggcttttggacgctttatcccagaagtcgccatggtttttggtgttcgctcctgtgttggtgatgatgttatcagcaagccttatgaggcttccttccggatcatcgggattcatatagttcagcgggttgaagtggtctgaggtggccatgtcgatgaggttgaaggttttgatccgccacccggccttacgcatcttttcggccgtttggtggtggatttcgcctttcgtatcagtgatggcaagactgattggagtgtgatgggtggccatgttggtcatgtttggcaggacatagccgcgcgtcttgcccgaacccgatgccccggtgaccaggacgttgaggttacgcctcgtcttatatgtatccagggcgagggcttcactgtgggtcatgaggagtgtgttacccgggttcttgtcactgtagggtcgcatgtccgtgctgcttgcccaagcggcgctgccgtgttcctcaccgtctcttgtgacgtgttgcccgctgtagtggtagagcaaagccaggagcacaatggctgctatggcggcgcctgcgatgaggtccatgcgattcatactggggaccgggtttttatacgcctccaagcttgcatttatcgcggctggaacatcgtgggacgctatgtaggatacgcgtactggcctgctgacgatattgcccgcataaaagcccatgagagtaaggatgagccatatgatggggctcattttcctattcgatgtcattagtgcctccttgatcgtcgtccgtcatcacggtggccaggtccgcccatggattcatggaggatagtggcgtggttttcgcacgttggcgccgctgtgcctcatgtttgattttctcgatgagacttgttttcgtccattgcccttctggcggttggaatttgccgcgcgctcctggagcgcagggttcatgtgcatcctcttgtgcggcatcatcgactatgggggtcccgtccctgagctgaccgtggatgagagcatggcttggctcctcaggctgcacatgatgctcgctcatacatacgatatgcgggttggccaggccgtctgcgatggtgatgctcatgcctgtcccgcttgtctgctggtgtgggtggccatgttcaggatacgaattttcatgttttcgcttctaccgtcgaggccgacggtttctgggccggtcacgacgcctttgatgatgacatcttgacctttcacccattcctggaggctgacccattgggctgtctttttgacggcttttgcatccacatatgttgtatttccccgctcgtcatggcatgcaagagtgagataatagacgactgtcgaatcatctggagtgtatttggtcggcaccgtcacgattttgccgtcacaccataccatgtcaccgacatgcgcttgcatcacgcactgctcctttcgctgttacttttttattgttgcgggtttcttcatggtgtggcgttgtgcgttgccggttgcgcggcgtgcttgcgagcgggcctgggcacccttctttaccgctttttgcacgtcttttttcgtgagcttgtgccctttcttccgggctttgacctggccgatgttgtcttggccgtacaggtcgagatggtctaccgtctgtggatgctgattcaaaaactcgttcgcttggctgatggtcggctcgccttggaggaattcccgcgcctctttttctgggatgaatccttgggctacttgctcaccgataagctctttctgccgcgaggtggcgggagttgcgtgccagtaatccggctgttcggccgacacggttgcactctccacttccacggggattcctgcttctttcagctcagcctcttcgcgggcaagggactgttcatcgaccttttccatatcgggatcattcagttccctgactgtttcttgggcgtcggcgatcgtttggttgatgtcgtccgcgctcatggtcgggtgtatgcgcgagagtgtatcttgcacgaattgcgatgcttgcagcgggaaatcaacaagagccgtaccgtttttcttgttctggctgatatgaaaatcaatcccgctcttttccagctcagctgcgagtttattgccttgctcgaggtcaaagtcaaggcgtgcggtggctccgcctgttttccgattcaggtttttcaggctcatctttcctgtcgtctgatgctccttgattgcctgatgggtcttatggaccgctgctttcgagattccaaaaactgcttggataagtgcctgggcaccatgggctgtcagtcttaccgctacgcgtgccacggcctcggttccttccttgatggcctgggtcgtttgttcctccaacggcatttgtgactccttagcgttaatttccttggttctcttttactttttatcgtcctcgttttttcatgattttagggtcataggacatctgcctgtggacacggattttttagcgggagaatcccggtctttgcctctgatcgtgttcacgtattgactcgtcgacggcttgaatccgtgtccggagtgtgctgatggtgtcttccagtctgtccatgtgctcatcgatttcaaagagttgcatttcactatcctcgttatcctcatccaacgcgatcctgctgatgacgtcttggcgcgcaatcatcaaactggtcagtgtttcatcagcctgttggagcgtaccggtcaattcctgtatcacgttattcgcactgccaccattgcgtgcgatcagggatagcgctgttgcctgcctggaaatctcacctgccatacgcatctgattcttcatccatccgttctgttttgcgcttccatgcaattcgatccgtggcatatggcgtcgcacgtctttaaggtcattccaggtttgcgcgggctgtccgaatgccgcgtacaagtcacgcatactcatttttcccatgcccttcccctgccggtcggagacaggaatcccggtgtcctggccgaaatagatacggatggtcgtaccggttcttgtcgccatggtctttggcacggtgatacgtttgttgcccttggtgtgcgggatgatgatgcggattttttcggggtcttcgtagtctatgagtttctgattgacactgacatgcttcaaggcttgatggttcagtttcatcatcacagcactctcatcgtaggccatgccgaggcgattatcacggtactttctccccgttgccaggtcagtataggtgatgtgcgcgccacgaatgttcgcctccacctgatattttttgagcgtattgctgaactcagtaaaggttttggattccgtgcatgcacggtcaatcatgtcacgaatacgttgcttctgcccttccccacgaaggctcgcgtaatagtcgccactacgcaaccacaaggttgggttctggctcgtcttcatgtcctgtccgtgacgtggactgacactgaacccgtattcctggcacagttcatcactgataggtgtccaccttttcatgagtgtgttcttatccaagcgcatcttgtaatgcgtcttgccattcgtattgcagatgatgatgtgattatggatatggttcctatcaatgtgcgtggcaatcacatacttgtaggctccattgtccgtgattctgttggcgaattccattcccagcccatgcgccgtgaccgggtcgacatcgtctttggggtcaaaggattggatcacgtgacgagctaaggtcgtgttcttcttcacgcctgccatgctgtttttatcgtccgtcatcatcgcctcggcaagattgcttggattccgaatatcggggtcatcggggaataaccaggaaacggtcacgtagtatttgtcttgtgttttgtcatctctggtgatgtaggcaatagctttattcagactcgtttttatctgcccgaccttgacaattgccatgattattccgcctgttttccgtacgcgtgggctgcttgtttttcgatgagaatgagattctcttcatggagtctatcgagtttttcctgtacgagtcggagtaggagtgtggcctcgcgtatcgtttcttgactgatgtttctcctcgcattggcgatgtgcgcgatttgattaatattgtttgccattcccctgatttgttcgtggagcttgtcggtgtcagcgttgatctctaccgtgatggcaaaaggctccgagagagtagagcgcgcccatttactaaaggattggccgtcccccgcttcaacttggtagcgctcataaacatgattccactcctcgtcagtgaagagaaccgttctccgaatatttctggttcggctgcctttccaactcattcatgtgcccctattcatgtgtagctacattctcatcatgcacacgatcgcacacgtataaggaacataaaatacgaagggattgttcatcttctttcattgctggcaatgaaagactgcgaggggtgtgggtctcccacaaggacaacgatttttatcgttgcgcctagagtacgtactctaggctatccttgctattcccacacggccgaaggctgtcgtgggatgaccggacggcaaccggtcaattttatgggaatggcacggagtgaaaaagcaagaggtttcacgcgttgccttgtgcaaaatgagtatggaaaagagagccagaccggttagggtctgcccctcctataagagtcgtgcgtggttagtgtccacggtaaagatttgccgcgagggagcttgcttcgtgtccgcgagttttcaatccttacgggtcggctcgggcaagacgcgcggcatctcttcaagcgatcgtcttgtttcttccatattgacgtgtttcataatcaaaggcgttccaacggtcatgccgcctaaacaaaaaggcaacaacgaaccatacatggaccatattcatggagctaatccgtatcttgctcggcgatggggaatcatatgcttttatgcccctgtctctgtgtggtccgtgattgaatggatgatgtcacatgcgataggcaattttgaggaaggggaagccatgttggctgatgatttgaaggccgtacagcgcaagatcgttaaggattctttcgcggataagatggccgcgttaaagaaacaggaggctgagttttccgacttggtcagtgacttattcgcgttgcgttctctgcatgattctttacaggaaaaaatgaacgcataccgggatacgtatttgaatgggaataaggcacgcttggttttggaggccggagtcactactgctgagttgcgttatattatgtccgcttcgaccagcctcgaagcacaggcaggcgaggaagctcagcacagtgaagaaaacgaaacaccgcaatcagacatggtccaagagtgaatcgggaaatacaaaagaagcaagggaaagataggaggttatcatgacgatggattggggcgataccgtcgcgttactgcttctcatatctcctcttatcattgtcttgctcgctctcgtcatcggtgccattgccctcgcttttgcagcgggtgccgggattctcgccggcatcatgaatctgatcactcgccctattcaatcgatcttgtgggtggtcaagtggctgcttcttatcgccgcatcgtttgcggcgttgtggggtttcatctggctgttcttccccgggcatcgtcttcacggtgggcttattcttgcgggggcggttctcgctggttttaccagcgcatcgtgcgaagtgggacgtgactggctcaaacagaaagccattgagcgtgcgcagcatcgtcaggtcaggcgtgagcttaaacaagccgcccgccagcatgaggacactgtagaatagtggaaaagttttcaatgggtttacggaggctatgatgcaggcagtaatggaaaagacacgcgccacggaagatgtacggcatttcattgacacgcatccttatgcgagtgaatatttcattgatgctgatgcgctgcacgcggacggggccaccgtggaggcgttcaagacttacttggataggaagctcctgaacgcacgcgtcgacaggtttgaggatgacattcatcttttttatggcattcagaccgagaatgctcaactcgcaggagaaagtctgggctggaatgctgttgatctggaatatcagccatggttccgacgctacttcagcagtgttatttcctacgaaccaggttccagcgtggaagatgtattccattcactagatgaatgggacgctaaaggctggaaccacgagtcggacctcgatgatttcttcccaaaaaactagacgctgatgatcatggccggcacttcatcgcgaaaactcatccattttgatctgctccaagaaggcttggaatattttcatatagactcctccgctgcctatcgtcgcatccgttcctggatggatgggcatggttttgaccatgaccaattatctgggtatctttcccgctcaccactaaccgatcgtgaaatctacaggctccacgatcagttcatacgtgaaaatccagagatcgctgcatgcatcgaagggttccaggtttccacgatcactcaaaatatggaactcagcgcacgcacaaccagaaaagtcaggcatttcggttccgactacgagaaggtttctcgcatggcacgagccaccagggaggcacgcaacaggagccggccaaaatcaacggagccgaagacctcccaccatcataggtagaattcatctactccgtacactgctctggaggtgtgtagcaaacgaacgtttactgcacacttttttatgttccgtagccaccgcccaacacgccgggaaaagtgtgaaacaacccatgtaaaaaacagcgaggagaaacacccatctgtcccaccagtttttacactgagcaatatgagaatcggttatgcacgagtaagcacactcggccaagacgagtcccttcagaccgtcgcactccaagcgacaggatgtgagaaaatctttatcgaccatgcgtcaggcgcgaagacaagcaggcctgaacttgaccgcatgctcgatcttctacgcgccggggatacggtggtggtatggaagctcgacaggttggggcgttccacccagcacctcgtttccttgattaaccacttcaaagacaatggcgtagagttcgtgtcactgacagagaatatggatacctctacccctggaggaattctgatctttaccgttttcgctgccatggcgcaatttgagcgtgatcttatccgcgaacgtacccaagccggtctcacggcggccagggcacgcggtagaaaaggtggtagacccgccaaactcgccccggaccagatcagagccattcaaagcctctacaccagccgaacactgaccgtcacccagatggctcagcaatatcacgtgtcgagaaagacgatttacaacgttttaagacagtaccgtattactgtagtacggtagtaatgtagtatttctttactgtggtggtatctcaagttgtgcgcgcatggccacatccctcaaatgggcatcgtcaagctgcgcatacacctgtgttgtttccacgcttttatggccgagcaaggccgccacagcgtaaatgtcatggctcgtttgataggcacgagtagcgtatctatgccttagactatgcgcggaataccccttcgggaggatccttttcagatggcgcgatatgtagcttgcttcgacatgtctgccaaagcgtccagggaaaacataaccatgggcttgcaggaccgaagcggcgagtcgttgggtgacgggaacgatcctttcctttccacctttaccatggaccagcaaggagtactgcccggcggtctcgctcacatcagcactgtgtacggcagccatttcgctgcgtctcagccccgcgtccgctcctagaaggagcataaggcgctcttgaccgtttgctttcataaaggcctcacgtaatgccatgtcgccaatgggatgcggaacgccctggctgcgttttaccgtgggaagattcgccgtggggtcactattccggccaatgttatgggataggacgaggtaacggtaaaaattgatgatggtttccttgtacgagtatcgcgtctccgccgcccaatttttacgggcgaggacagagacgatgtcatcaaaaccgacctggctgaagggcttgcccatcgtactggcgaaatagtgtagcttatagatacggcttttaatggtttcttggcttttgcctgcggcgcgtaagtacttttcccactttgtaactctgtatgcccatccgcgtggccatacgagtgtctttcgttgcgttgtgcacatacctttccacgctagggaacaaggcagcacgccataacatccattacgccattcaaccgaaacgcgaagcgacggccggtccaggtaacgtacgggaacgatcatgcgaatcgggatccataggccgcctgcgaagcgatacccggaccggttccccgctccttcggggtgagatacgcttattggtcaagccacgcttctaatgcttgatggacaaattcctgcacggtgagatcccgttcgaacgcctcacgcttcacccttttccattgctcaggatccactttgatactcgtcgtctgccagtacgcagaggaacgtgtgttatctggcacgttcgcaagctgtgccactgttgtccttttctgcgactgtggggtcaggttcatgtttttcatgtcttattcgcctttcatcataagctctatttcttgccacgcttgtgcatattcccacagctttctgggattatgccccatcgaggtcttgatgtcctggcgcttgtgaatctgcgcatcgaacaatggcgtcgcccaccggttaaaggcttccataacggctttcatggcacgtgtgccggactctacgcgtacgagaagcaccgctgccggcctgtccgtggccgatagtgtactccatgcctgctggacatcaagtgggctatctgagcttggaacaataacgaagtcagcggtttccaatgccgcctgcaatccttgccccgttggcgcggcatccacgatttccatcacgttttctttttgcggacggcgtagtgttgctgggttcgctgcctgaacctcgaaaccaagaggatcgttttcgttttccgccatgaacgcccattgactcgcggatccctggggatccgcatcaaggagcacaacctcgtggcctcgcgctgttgccgtagccgcgaggtagatacttgatgtggtcttaccgacgccacccttggcgtttgctattgtgattctcatatttttcccttgcacggtattagagtaatagagtaaagaagtaaagaagtactgtagtgcggtagtgttgtagtactactattaaggaaaagaaaaggttcttctgaatactcgtaagacattggaaataaaagcaaatccagaggtccatggttcaaatccatgccccgctaccaattgagataagccgtcagatgaataatctggcggctttttcgttcacggcaatggcagtttcacactacgaccgggtactgcacactccagcaccacatagcgccgttatcaccgcacaaattggcccattcccacggaaaaccgatccgtttccacaaaaaccgacctgtctatgacatcaaacgctggaatcagaccgctttttatgggaatgggccactcaatcacggaaaacggaaaccaggtggtttcccacgctttttgcaagatccagccgcgtgacgcgcctcagcaatccgcccaaagccaaaggttgttcctactggctgaaaatcccgcaatctccaaggttaaacgggatacattgacctcgttgactacaacaaggaggtcacaaatgacacaagataccgctcccctcaagggaatcaaggtcatcgactggactcaggtgcagtccggtccttcctgcacgcagatgctcgcctggatgggcgctgaagtcatcaaggtggagaaggttcagggcggagacccgacgcgtaacgaaatgaacgacgtggacggatcgtattccctgtacttccttcagctcaatgccaacaagaagtccatcacactgaacatgaaggatccagaaggcaagaagatcctcaccgatctgctgaaggatgccgacgtattcgtcgagaacatcggcccgggcgatgtcgaaaagctcggcttcggctgggacgaagtgcacaagatcaatcctcgctgcatcatggcatccctcaaaggattcaacaagggcagccgcttcgagcatgtgaaggcattcgagcccgtcgcccaaagcgccggcggtgcggcttcgaccaccggctggtatgacggcgagcgcaatgtgccaacccagtccggtgcggctttgggcgattccaacagcggcatgcatctgctgatcgccatcctgtccgcactgctgcagcgccagcgcaccggcgagggctgctacgtctaccagtccatgcagaacgccgtgctgaatctgtgccgtgtcaagctgcgtgatcagctgattctcgatcgtctcggcaagctctcctattatgactgctatccgaactacaagtggggcaaggccattccgcgtgcggccaatgccgagggcggtctggtgctcggctggtgctatcgcgccaagggctgggagaccgatcagaacgcctatgtgtatatcgtgatccagcagtccaagaagggcttcgagaacttctgccacgccatgggcttcgaggattggatcaccgatccgcgtttcaacaccgccaacgcccgcgatgagcataaggaagaggtgtacaagcgcgtcgaggaatacaccatgcagtacgacaagtacacgctgaccaaggagctgggcgccaagggcgttccggtcggcccggtgctggactggaacgagctggagaacgatccggatctgaatgatgacggtaccatcgtcaccatcgatcagcaggatgcccgtggtgacttcaagaccatcggcatgccgttcaccatgagcaacttcacgcctgattaccagcgtgcgccgaagcttggcgagaacaacgaggagatcctcaagggtctgggctatagcgacgaccagatctccgagctgctttccaatggtgtcatcggtggcaatgatggcgtgaaggctgatctgaagtagcctttgccgctcgtcgcgactttcctcaggggtcgaatccttccggttcggccccttcttatgttttggcacagactggcgccccatacgccgcgtggctttttcatatcgattcgaatgcagtgggcattcactggcatctgatgcaaccaccatatgatcggcatgcactgcgttatgcgcgttgctcacacatgcagcaaaaagccccgcacctttcggtacagggctcatcaaacctatggaaacggttcagtgcacgcagaacggtacgagccagatccacagcaggcaggtggctgcgaacacgacggtcgaaacggccgtggtcgaagcgccttccttgacatagatgttgtagcggctggaaatgatgattccggagaatgccggcggcaatgccaccgccatgaccagcatggagatcttgtcgatgtcgccgcccatgccacatagcagacccacgcccaggaacacggccggggtgagaatcaggcggaagaacgtgttccaaatggtttcccagccgagagagaacttcacggtggacagtgccaagcctgcggcgagcacggccacaccggagttggccttggcgatcaggtcgaaggtcggcgccacctgatccggcacgtggacgcccagcagcaccaggatgatggccagcaacggcgcccagcagaccggctgcttcagtgcattgagcagagcctgaaggttgccgttcttattcttgcccgcattcgaggagccgtgtaccagaagttcagccgtcttatccgccttggcatccttggacggatcgaccgtgacatcaccctttgcgtcgaccacggtttcggcggacagtttcgcacggtccttggcctggccgagattgatcagatacatgccgataggaatggtcacggcgttgacgacgatggagatgatggcgataaccagattcgtgctcacggtgtcgccgtaaatcgggtcgagcactgcgaatccgaggaatccgatggtcggagagcctgcgatcagcgcactgacggccgcttcctggatgctgcggtgaaacagcagacggcacaggtagtagcagaccatgaacatgacgatgacgccgatgaagccgatggcggtcagcgttgcgtcctgtgcgagcatttcgcgggtggccttgatgatggatacgaacaatgccgcaggaagggcgatgttgagcaccactttattgagaccttgacgctgatcatcgtcaaagtagctgaatttgccacagatatagcccagtgccatgatgacgatgatcggcacaatatcgtttatcagaatatttaccattattcagttctttcgatctggagcacagacccgcgggcgcacgcatcccaccgttcgcacgcccgcggactcgcactcacctggttacatgcgtgcaccggagacgtaatcgtgcgaggtgacttcggaatcaaccagaggaccgaccactggcttcgggttcagcgcgccgatgttgccggattccttgcccgcatattgcgcgatctgcacgtgcacgaagctcggacgcccggatttgaccgcttcctcgaccatcttttcgacatcttcaggggttgtggcgtaatagcccttgccgccaaaggcttcgatcatcttctcgtagtgtgcctcataggtcaaggtcagcggcgatgggtcgccatcattgccgaggttttcgaagtcgccacggtagatgccgccgttgttgagcaccacgaaggtgattggcaagttatagcggcaagccacttccacttccatgccgtcgaagccaaaggcggagtcgccgcctacgtacagcaccttcttgcccgtggagaccgcagcgccgatggcgtagccggtgccgcagcccatcacgccccacgtgccgcaatccagacgatgacgtggctcgtacatattgatgatgttgcggcagtcatccaacgagttggctccctcattggtgaggatgagatcctcatggtgacggtcgtagaccttcttgatggcgccaagcgcgttgtagtgccccatcggcacctgatcagagttctccttcgccgcgaacttggccacgttcttggcaccggcttccttcagcatgccgagccattcctcagaagccttgaacgggaactcagccagcgagccgttgagcatggtcatggcggacctgatgtctccgaccaccggaacggcgatctcacgggcgttctcgatctcttccggattgatgtcgatctggatgaacttcacatccttgttccacagcttgccctggccgaaggaaagcatccagttgaggcgtgcgcccaccagcagcaccacatcggcgctgcccagggccagggagcggcagctggcggtgctgtgcggatcatcgtccggaatcacgcccttggccatggacatcggctggaacggaatgtcggtcttcttgacgaattcgcgcacttcctcttcggcgcgggccatcgccgcacccttgccgacgaccatcagcggacgcttggcctgatggagcagttccaacgccgcatcaacggattcgcgtgccggcggcatggacggagccggatcggtggcggtccacagcagcctgtcggcatcatcctggctcagcgtctgggcgacggtatcgtccgggaaatcgatgtacacggcacccgggcgaccggaggaagcgacatgcatggcgcgcgccacaaccagcggaatgtcctcgatcctgtccacgcggaacgacgccttgcagaactgcttggcatagctcatctggtcaagaccctcatattcgccttcggaaagatccacgacgtggcgggtggacgatccgccgatcatgatgaccggataaccgttcgtagtcgcctcaagcaatgccggcaatccgttgaggaaaccgggggcggatacggtcagggccaccgatggcctgccggtaatgaatccatcggccgcggccgcgttgaccgcatcctcctcatggcgcataccgatgtagcgcatgcccatgccttgggcgatgcgggcgaaatcggtgaccgggatgccgaccacgccgtacatgttcctgatgccgttctccatcagaacccttgcaaggtagtgaggggaatcggtcagattctgacgctgcacgttctcgttttcgtctgtcattgttacctccaatcaaaacgacaacgtcatgattgtagataggcaaaaatgtgaattcgtcggtagtaaaaaccgttcgtcagtggcttaaaatcaacgatttcccggtatcgaagtcatatgcttgatttttttggagggggctccccgaagtctttcgacagcaccccctatcacatggatcgaaacacccttcatcgacgttgcacggcaaacagcatgaatgcccccgtcgccagcgcggcgatcactataccaagcgccagcatgaacgagcttcccgttttcggcatctgcatctcgtcggccgccaccaccctgacgcgctcacgctcatcggcatatgagctgaccgccgccccgacacgactgtcgccttcatatttccagacgaatacgtaccaacccgactgctgtgcgctgatgtgcaccggattgccatgggcatccttttcaccgtcgcccacacgaaaggtgccgctgacggccgggtagtcccaagtgccgatcaaccggtgattgtcatcctcctcaggctcttcatgggtgtccggctcgcaatcatcggcggcccaccacacacttacctgcgcatatggcgtatccgcaccgaatccatagtcttcgttgccggagaatgtcccatgatcgtccggaaagccagatacggtgatgctgtcggaaatctcctgccctatcgttgcggtttgccgatccgccttggatcgcacctcgagccgtgcacgattcacgttcgtctcctcggcgtcgaggaacgcactgaccacatcgccttccaacgtccgtttgaccgcatccgtctgcaggtcgcgttcgatggcccacacccatgtaccgaagccgccatcacctcgcgccgcatatgccgttgatccagacggctgggtgaccgcgagcgcctcccgctgcggttgttgggcattcaacgtgattgaaccgtatgccgaaggggtgtatccggccaccacaagccgtgctataaacgtctgcgcgtcttcgccatcatcgggtacgatgcgctgaccgagccgctcgccttccagcccatcgaaataccagccagtggcctgatatgcggcgccttccggccatgtttggccttcaggcatgtcgagacgtacggtgtcgcgcacctcctgacctgcatcgacctgcttcgaggcgaccgtcgtcgaaatccgcggatgcgtcggcatgacgacgtcgaaggtcagcaggtcggcactgtattgcgtctgatcgtcgaaggtgaccatctgctgtgcggtggtggcctgttccaaagcaagccgtttataggtcacctgaacattgacgccgccgctgccggtcgctttccaatgcagtctctgcgcctccttggccgtgacacccgtcactttggccttgtcattgtcgaatacggcgggtccgctgatgacggcggtgaaacgaatgcccgccaaggaatcaccgttggcattgcgggccatgatattgacgtcgccctcactcagtcctttcgtgttctcccgtgtgacgaccatggaatcacagacgttggccgcggcttccttccagagttcgttcactttctgttccagcccggcgtagatgccgaacaggtatgtctcatgacggctccagacggtctgatcatcgtaggcgcgatgtacgagtacgccgatggcggcatgcagcaatgcatcggttttcagacggttgccgttaatcaaccatgccagacgacgtgaggtgtcgtctgaggccatgacgacggaatcggtggtgatgtagtccgtttccattgcgatttgccgacaatagtagttgtgcccttgtgtgcctcgggcacttaccccaatggtgtattccctgccatcgagcgtatatgggtagtaggttcccgccctggctttttccagctgagcggcttgcgccgtcgggcatcccgcggccacgaccattatcagcgccagcaccatgctgacgaggatggcgaggctccgttgcttcatcgcattcatgacatttccttcgtgaagatgttgtcgcacgtttttcgtgaggtgagtcgagggtgccatatgagcgttgcgatgatggcgattttcggaggttgtggacgcctcagcgtctgcttcggcgtgttgtggataacttggtggccgaaacaacgcaagttatccacaaaaaacgattcacccgacgcaatcgtcgaagttatccaccgaaaaaatggatttagggtgcatcaagttcccttcgggagcgtcacgcctctataatcggcggtatggcagtagaaaagagcgcatccgcgcacaccagcaaagcagcaccggcaaccgacaagaagccggtccgcaaacgtcgtacgaccaaggccaaggccgcggtaccacaggtggtcggagaggctcctgcgcccattatcgaacgcactacaccggaacagttcggtcgtgtcaatatcattgatatcaccccggccgccgacaacggcctgttccccgctagggtggagctcggggaagcattcacggtgactgcccaggtattcatcgaaggccgcaccaaggccggcgccaccgtgtcggtacgcagcgcccgcggccgtgaagtgagccacaccccgatgatctgctcgaaccctggtctggaccgttggaccgcgatggtcagcatcggtgaacacagtgaccttaagccttgggacgccgactacgcgtccgtcaaacgccagctgggcgattggaatgtcgtgatcgaaggctgggaggacacgtatcagtcctggctgcatgacgccgccatcaaggtcgaggtgggcgatgatgtggagaacgcgctggaaagcggcgcgcaactgctcgcccgttgggccggcgccaaggattccaaactctctgcggccgacaagaagattctgcagacggccgccaagaccatagccgacaagtcactgtctccggccgaccgtctcgccgccgccgaaacagctgatatccagcgcctgcatgagaccaatccgctacgagacggcctgtccgaatcgaatccgcaacggttccgcgtggaacgtccgaagtccagcttcgccgcatggtaccagttcttcccgcgttcggaaggcgcctactacggcgaagacggcaaaatcgtgcagggcaatctcaagacctctctggccggcttggagcgtgcggccgctgaagggttcaacatcgtgtatctgccaccgatcttccccatcggtgtgaccaatcgcaagggacgcaacaattcgctgatcgcaggcccgaacgatccgggctccccgttcggcatcggttccgaattgggtggccacgacaccgtggatccgttgctcggcaccatggatgatttcaaggcgttctgcgagcgcgcccatgagttgggccttgagatcgcgcttgatttcgctctgcagtgctcgccggaccacccgtgggtcaagcaacatccgaactggttccgcaccaagccggacggcaccatcgcgttcgccgagaacccgccgaagaagtatcaggacatctacccgatcgacttcaacgccgacatggaaggcatcgagaaggaagtcgaacgcatcatgaacctgtggatcgaggcgggcgtgaccatcttccgcgtcgacaatccgcacaccaagccggtacgtttctggcaggatgtgattgccgccgtgaccaaaaagcatccggaggtgctgttcctggccgaggcattcacccgtccgggcatgatgcgcgccctgagctacgtcggattcacgcagtcgcactgctacttcccatggcgtaacggcaagggcgaacttgaggagtacctcgaggagaccaacggcgacggcggtttctaccagcacaacaccttctggcccaccacgcccgacattcttaccgcctacgtgcgggacaacggcatcgccggccatgcggtgcgtgcggtgctcgccgcgatgggaagcccaagctggggcatctacaacggctttgagctgatcgagaacaagcagcgcccgggcttcgaggagcagatcgacaacgagaagtacgaaatcaaggttcgtgattgggccgaaaccgacaagtacggcattgcggagctgctgggttcgctcaacaagatccgcggcgagcacccggcatgccgcagctatcacaatctgcatgttctgccgagcgacgatgcgaacatcatcgcattcctgcgccagaccccggccgaactgaccggcaccggcaaggcggataccgtgatcgtggtggtcaatcttgacggacacaacgcacatcaggccatcgtgcacttggagcgtggcgaattcggtctgccgaccgacaagccggtgaaggtacgcgacgaactgaccggccgcgagttcgagtggggttgggacaacttcgtctcactcgcaccgtgggccgacgtggcgcacgtgctgacggtggtcgaggactgattccgctcagcccgtcgcacctgattgaacaaggtcccccaagcgaaaggcgtcgtggtacgttcagcatcggagaggccggcaggccgtccgagatgccgattgcagcaacaaactccattacgcaacatatcgaatgaacaacaccgatgatgcccggaagcgggtatcctaagtaacgaactactgctgatcacaccgatcaaggagaaaacaatggcagaaaccttcaacgtcgtggtggagatcccgcgtggatccaagaacaagtacgaagtggatcacgagaccggtcgcgtgttcctggaccgcaccctgttcacctctatgggttatccggatgattacggctacatcgagggcactctgggcgaggacggcgatccgctcgacgccctggtcatgattccgaattccgtgttcccgggctgcgtggtcgagtgccgcgccgtcggtctgtaccacatggtcgacgaagccggtggagatgacaaggtgctgtgcgtgccggccgatgtgcgtttcgatgacattaaggacgttgatgacgtttccgagtaccacaaggctgaaatcaagcacttcttcgagcagtacaaggctctggagccgggcaaggaggtcctgccgggcgattactggaccggtgtcgccaaggccgaggaggagatcgtggccgcccgcaagcgcctcgaagaatccgagaagtgattcttttccacaatgagtaaggctcgccgatatcaatcggcgagccttttctgttcccatagcggcccaaaacctccatatactggaggaatcaccccgctcagggccagatctgcggctcaaaacctccagtgattggaggaatttggccgctcaaaccccgcccggcgtccagattcatccagtgactggagaaattatctcgcctagacttccctaagcgggataattcgcccatacgctggaggaatcaccccgctcaaggccctttcagcggcccaaatcagccagccactggaacaatccacccgttcaaggcccactcagcaaccagattcatccagtcactggaggaattatcccactcaaagcccgcccagtgacccaaaacctccagccggtggaggaatcaccccgctcagaacccatgcaacgacccgaatcatccagcgactggaggattcgccccgccacatggccatattttcgcgagatgcgctatagtggggtcttgtaattcacggcatgcgaacagtattcgctgaattcaaagcccgctggaagccattggcccgcgtgcggcagttctatgtcggtacccctaggcgtaggcggaaataacgaaccgtcgaggcccatcccgtggggagaccggcgggatgaacctatctaccagctatgttgattcaaaccctacttatcgccgtttccgtgtccatggacgcttttgccgtctccatcggcaaaggcctgaccgtcaagaagctgcgcggcattgacgcatgcaaaaccgcgctgtggttcggcggattccaagcgcttttccctctactcggctattttgcggcctccaccttcagtaaatacgtaaccgccgtggaccattggatcattttcggactgctcgccctgattggcggcaacatggtgcgcgaagcgttcggcgaggatgaagagaacgccaaggagactgcggaattcgattggcgccacatgctgccgctcgccgtggcatgcagcatcgacgcgtttgcggtcggcgtgagcttcgccttcatgacgctcaacatttggatttccgtaatcatcattggcgtgaccaccggcctgttctccgccgcgggactgtatatcggccgcgcattcggattgcgttggcagaagccggcacagatcgcaggcggcgtagtgctgattctgattggcgtgaaggtgctgctggaacatctgggaatgctggcattctaagggcatccttcctcggatgcgtttcccacgacggccagctcactggcactcatggtgaaggggtccgcaatcgcaacgattgcggaccccttcaccatgtattcggcttcagaacatatttcagaacatgacggtggcgagagaagcgatgcccaccgcagcaccggcaagcatgaccggcaccagcgcaagtccgatccatggtttgttggctttcggatctggatccgcatcgcgccgccacaaataggagcacacgccgaacgctacgatgacggccaacgtcaccaccgaggcgatcacccatgccaacatcgacccatattcggtggaggcggcattctcaccggtatgcaccaacggcaatatcgtcggcaggaagcaccagccggcggacgaaatcatcgcaacgccttcgagcacattatgcgacaacgaacgaatcagatgcgtacggttctcgcgcgccatctgacggccaaacacaatcacgatcagcagcaccaacagtcctccgacgccggcgatccagccctcctgcatccagaacgtgtcacggtgagcgatgtcggcagggaaaatcgcgcgccccagcatcatcgtcgtggcgcacaccaccgacagcaaacctgcaatcacggagatcacatgcccgacggtgccgtcacggaacggactgaacaccgtaagcagcacgatcatcacgaccgaggcgacgaccgtgtacgagacgatagcgggattatcggggtttccataggagataccgggaatcaacgccaacacgaccaatacgacgtaagcgacgatctggatcgccaggaccttgccgaaggatcccctcgaatcatgcggacgagtcgcggcatcagttgcggacatctcagcccccttttcataatgtggtcaaaccgtatgtgctaggaaccaatgtagccgtaagtgtccacatcatgcgtctacaatcatgaaacaccggtaacactgcaagagtacaatcgcggcatcagcaacaaaccaaaggggactaacgtgacggaccttacgcttatgacgttcgctagcgaccccgccaccgtacttccctccctcgccctgctttcgcatcgcgtgcgcgtattgccgatggatgtggcgagtttggtgaagatgccggaaaacacgattctctttcttgacgcacgtgacgatctagccaccgcgaagacgctgtgccgtctgattcacgcctccggactgtccacgccgattgtgctgattctcaccgagggcggcttcaccgtggtcaattcccagtggggcatcgccgacgtggtggtttccaccgcctccccggccgaggtcgaggggcgcctgcgtctggtgtcggaacgtggcaacgctccgacgggatccgcagccggagccgccgaaaccggcgtacagaacgaggacggtctcatccgttccggcgatctggtcgtggacaccaatggctatacggcaagcctgcgcagccatccgatcgaccttgcctacaaggaattcgagttgctcaagtatcttgtgcagcatccgggacgcgtattcacccgcgcgcagctgctgcaggaagtatggggctacgattattatggcggcactcgtaccgtcgacgtgcatatccgtaggctccgcgccaagctgggcggagaatatgaacatgtgatcggcaccgtgcgtaatgtcggataccgtttcgacccgccggaggaagaggaaggcgagaacgccgccaaggcaagcgccgcacatgccgatgcaagcgaggcgtagcgcgtaaagcatcgcaatcgcacgatcgcccgagtagaatcatgggcaatgccacgagagtccaaagcagcgcgcctgaaacgcatgcaccatgaatacgaggaattgtgcgagacgattcccgagccgaagtgcgcgctgaatttcaccaatccctttgagttactggtggcgaccgtgctcagcgcccagaccaccgacaagcgcgtgaatatggtcacgcccgtgctgttcggccggtttccgggacccgccgacctgcaggccgccgatcccgaacaggttgaggacatcatccattccatcggcttccaccgcaccaaaacgaagaacatcatcagactctcgcacgacctgtgcgaacgatatgacggcacagtgcccgattcgatggaggaactgaccgcattgcccggagtcggccgcaaaaccgcgaacgtggtattgggcaacgccttcgacaaaccaggatttcccgtcgacacgcatgtgattcgtgtgaccggacgtctgcactggcgtagtgactgggcttcgcccactccggatccggtggccattgaacgcgaaatcaccgcatgcttcccaccctcggaatggacggacctgtctcaccggctgatcatgcatggcagaaccacctgtcacgcccgcaaaccgaactgcctcgactgcccgttgaacgatacctgcccgagtgcgttcaaggtgtagataccgcatgggaaccaagcccgtgtagtatgcgtccactacactcgggcatatgcagaagaacgggaagaagcagcgcgattggcacgacgcggctacacggtggctgattttctttggcgtcgccatcgtattgagcgtgatgctgtggctgggatggtcgctgacgaaccgacgcaacccgattcccgtattcggcacgctcaccacggattccaccgtgtcgatcggcctgcgcgacgctcccgaatccctcgacatccgcacccagcagggccatgccgtggaacaggcgctactcggcaacgtttacgaaacgttggtgtcccgcagcgagaccaacaagctccaacccggactggcctcatcatggcagatctccgacgacggactgacctacaccttcaccctgcgcagcggcgtgaaattttccaacggccactcacttgactcggccgacgcggtctggtcgttgcagaacgcggtcaacaatcattatgtcgacgccgaccagctcgacggattgcagcaggtcgacaatcccgacgcacatacgctcgtcatcaccctgtccaaaccgaatccgcggctgctacgcgcactcagcggacgggccggcatcgtatacgacgaggaaagcgacaatgactatgcgaaaaccgccgtcgggtccggccccttcaccgtggcgcgtgcgtcgaaatccgaaatcgtgcttcaacgcaacgattcgtactggggcaccaaggctgcttcctcgcaaatcaccctatactattactcctccgaaagctcgctgaccagcgccatggaaggcggcaaaatcagcatggcgctgccgctcagcgccgacgccgccgaaacgctcaacgcaacgcgcggcatcagcgcggattccggcatcagcttcgacaaggtgatgctggcgttcaacaatgcgaacgaatccatcctcgtcgaccagcagatgcgcaaggtcatgcgctacgccatcgacgcacgatcaatcgcgaagaccgccaatgactcctacggggcgctcggagggccgatcagccctctggaagacggttatgaggatctgacggaactgttcccccacgaccttatgcaggcgcaacagctgcgctcctacttcggcaccggttacatcggcaccatcgacctgctcatcccccagcagtacgaaaccatcggcaacaccgtcaaagaacaaatcgaacagctcggcgtctccgtcaacatggaggtccttgacaccgccaccgtgcaacagcgcgtcaacgacggcagctacaccatcgcgttgatcaccatgagcggcgagaacgacgcttccgtcttcaccgacggtcaatcggtgttccatttcgaaaacggtgactgccagcgagcctatgcggatgcgctcgcagcgacgaacgacgacgattatcaggaaagaatgcgcacctatgcgcgcaccgtcagcgagaacgcggcctgcgactggctgtacacgcgcaagaacttcatggcggtttccgaccggctgcagggatatccgaagaatctgaccgaccgtctgttgccgctgagcagggtcgcattgcactgatttttccgtgtcattccggcgattgacgagaatcgtccgtattgacgccagttgtcacaatcgctttctagactaacgcttatgactgaaagccaagctaataccatcaatgcgaacctcacgccgctgcccgacaaggtcggcgtggacggtctcgaagacaagtggcgcggcgtctgggacgaaggcggagtctacaagttccggaacacccgcgaccgtaaggccgtctattccatcgacaccccgccgcccaccgtttccggccatctgcacgtcggccacgtgttctcctacacgcacaccgatataatcgcccgtttcaagcgcatgaacggcttcgacgtgttctatccgatgggctgggacgacaacggcctgccgaccgaacgccgtgtgcagaactactatggcgtgcgcgtggatacctccctgaagtacgatccgaatttcgtgccgccgttcgaaggcaccgacggcaagaagatcgacgccaaggatcaggtgccgatcagccgcaagaacttcatcgaactatgcgagaagctcaccgcccaggatgagaagcagttcgaggcgctgtggcgctccctcggcctgtccatcgactggtcgcagacctaccacaccatcggtgagcatccgcagcgcgtggcccagaaggcgttcctgcgcaatctggcccgtggcgaggcctaccagaaggacgctccgggcctgtgggacgtaaccttccagaccgcagtggcccaggccgagctggaatcgcgcgaatatccgggcttctaccacaagatagccttccgtttcgaagatggcaccccgatctatatcgaaaccacccgtccggaactgctggcggcctgcggcgcgctgattgcgcacccggatgacgaccgttacaagaagtatttcggccagtacgtctactcccctctgttccatgtgaaggtgccgattctggcgcacaaggccgcggagatggacaagggcgccggcatcgccatgtgctgtacgttcggcgatgtgaccgatgtcgaatggtggcgtgatctgaatctgccgctgcgttccatcatccagcgtaacggccgtatcgtcatggacatcccggactggatcgaagacggcaagggccgcgagatcttccaggagacggccggcaagaccacgttctccgcacgtaagatcatcgtcgatgcactgcgtgaatccggcgatctggacggcgagccgacgccgaccaaacgtatgacgaacttctacgagaagggcgataagccgctcgaaatcgtcacctcccgccagtggtatctcaagaacggcggcaccgaccagcaactgaacgccgagctgatcgagcgtggcaaggagctgaacttccatccggacttcatgcgcgtgcgctatgaaaattgggtgcatggtctcaacggcgactggctgatctcccgccagcgcttcttcggcgtgccgttcccgctgtggtacccggtgaaggaggacggcaccgccgactacgatcacccgatcgtgccgagcgaggacattctgccgatcgatccgaccgacgacgtgccggaaggctacagcgaggaccagcgtgacgtgccgggcggcttcactgccgaacaggacatcatggacacctgggccacctcgtcgctcaccccgcagatcgtgacccgctgggaggagccgggcgaagagaaccgggccatcttcaacgccaccttcccgatggatctgcgcccgcagggccaggacatcatccgtacatggctgttctccaccgtggatcgcgcgcatctcgagaacaagtgcctgccgtgggccaacgccacgctgtcgggctggattctcgatccggaccataagaagatgtcgaagtccaagggcaacgtggtcgtgccggacaagccgatcaagcagttcggcgccgacgcggtgcgctattgggctgcggcggcccgtttgggcttggacgccacctacgacgaaggtcagatgaagatcggccgccgtctggccatcaagctgctcaacgccaccaagttcgcgctggccatcggccgcgaggacgagaaccatcatgtgggcgctgcggccaccacaagctggaatccggccgacgtgaccgagccgctggatcgtgccgccatggccaagatggcccatgcggtgaacgaagccaccgagaatctcaacaactatgagcattccaaggctcttgaggtcatcgagaactacttctggcagttctgcgacgattacatcgagctggtcaagaaccgcgcctacggtaccgccgattccactggccatgtgccgagtgagaaggccgtgaagtccgcacgcacggctctgggcctgggtctggacgcattcacccgcctgctggccccgtacctgccgtacgccactgaagaagtgtggagctggatgcatgagggcgagggttccgtgcaccgcgccgcatggccgaaggccgagacgtatgccgccgccgcgttcaaggcgtctccggagctgctcacccatgccggtgaggcgctggccgcgctgcgtggcatcaagtcgaaggccaaggtttcgatgaagaccccgattctgtcggtgaagctgggcgtctccgacgaggtgcgcggctccatcgagagcgcgctggccgatatcgccgaagcgggtcgcgtggtgggccgcatctccttcgtgggcgccgcagcggcggccaaggccatcaaggagaccgctgaagccgccaaggatgccgcggcggcggccaaggccgaggcagaggccgcgatcgatgtgatcgtggctgacagcgaactcggtgagccaccggccaagaagccgaagaaccagtaagccggaaagaccctgatcgttgggcccttctccccgtcagagggaggagggcccgattcatagcacgggaacggaaagcagatactgggtgccgtgaccggtcgcaccgaccgtgccacctgtgatatgacgactgccgagatgttggacggcttcctgcagcatttccgcggcggaggccagttcgacggtctcatcgatcagatcgctggaatcagcctcgatcggcgcacgcgaactgacgatactgtatgcgctgatcggcagcgaccccgcaccggcggatgccgcacccgaagcacccgaagcacccgaaacagcgtcacctgacgttgcggagtcctttgcgtcgctttccgacgaaccgtccactcccccgaccttcgccatgttcttcgacgtagtgtcggcggcggcaccgaacgatgaacgcaatccgccggcgtagctcatcacatcatccatgctgatggcgttccggtcgtccaccaagctgtccgtggcaccgtcctcgctctgctgacgaatcgccttggcctgcgcatgctcaaccttgcgtttggccttctgtcgggccttctcggcttttgcgggcaacgtcgtaccgtcggacaaggtgtggccgctgtgcagggaggcaatccgcaccgtgccgcgcgcggtcgtcgcggaatcctgggacgaggtgctggaagcgttggaatcattgccggcggcatcatcggtttccaactgatcggcgaaacgcaccgcaatctgatggaaggcgctggcctgaccggtatgttcgctggcatccgccagtgcgttcatggcgtcggccacgttgccggcggccgcggcaagtttcctgttcgtgtcgatgccgctgcgcacgtccgcaatcgcctgacgttcgtaatgcgaggccgttgcggccgtggctccgagctctttcaagcgtgcggtgtaggcatcggtgaaatccatggaataggggatcatcgcgctcgatagctgcgattgccctgcactgtaatccttggcgccccgttgctgttcctcaccggcgcgtctgcccaattcgccaagcagtcccgacgtgccgcgccgttcgatggtacgaatcacgtcatccacggcatcggcggcaccggcatgccggtaggcggcgctcacatcgttcaccgcgttggcgagatcgaccacggatcgtgccacgtcagtatcgccgttgagttcggcggcggtgcctagaatggcggaaagttgcgtggaatcgccgatcgaaccggaaagatgggtcgtatatgagccgacatacgcatcgatatagccgtcgaaggcctgctgatgcgtggccgtccgctcggcgatggtctgcgtggccagttccttttcccggtcgcgcagtgttttcagctgttcgatgagctgatgattgctttgcgagccgacattcgtcagaccatccaccaggttggaggcacggtccgtcagattgttgagattatcggcaaaatcatcatcgtcttcggcccgcacggcagcgacggccaatgaactcatcgtgaaatgcctggcatcgacatatgtggtgaaggtcatttcctcacccggctcgccaatggcggcaatcagtgtggaggaattgccggatatcacgctcacgccatcgtcggatacgacgtcgctgccgacgcggctgggaatggtgaaggcgaccacaggtacgagatcgcgtgcatcgtcggtaatcgtttgggtggcgccgtcgacggccttgaccgtcagacggataccgaccatgccggtggcgccgttcacctgctgcacgctcacgtccgggccattcaacgtgaacgtggcgctcacggaccatggcagcgataccgtaccggcggcgatgcgttgggaagccgtggagccgctgtccgtcagatacagccgcccgggccggtcggccgccgtataggaactcatcacgtcatgcgaggccacgtcgacggcatagcgtccatcctggcgtatccggcctacgatgtcggatacgcctacgccggccacgggcaacccgcacagtacgaccatcgcgatggcggcggcgcatgcgcgacgcatcgtgcgaacgttgcgatgacgagtgcacatgccggaccttcttagcagtcagaatattgttccacaacaaattgttccaaaacaaacaatctactgcgcggtatgcccgcagagtccggaaaatgggcagatcaggcgaacacgtcgagtacgcccggatcgcctcccgcatcggcgatgcgcttatgacggcgcttggcctcggtcaccacgaattcgcggtacatttcggcgatatcggggtcaagaccggcatcgacggcaatgcgatgcaaccgttcgatctggtagtcctcacgcttgtagtcggccggggcgaagccggcacgcgccttgagcacgcccacctgggacgtgtacttgaatcgttccgccaacagcgacacgatggccgtgtcgacattgtcgattgactgacgcaacgacttgatcttcgccacggtttcggcgacctggggatcgccttgggcggtatccgcatcgatgacggtttcggtttcgtccggttctgctggccgaagccagtcgtgttcgctatcgctcatggtcaccagagtaccgctactttgcgaagtaacgctgcagcacgatcgtggtttcggtgcttaccggaacggtttggtgaatgacgttgagcagctcttcgagcttgcttggcgattccgcacgcacggtgagcatgtagctgggcgagccggccacggaatcgcacgacatgatgccatcgacatcgtgcagttttcccggaatttcggattcgcacgcataatcggtgggggtgaccgcgatgtaggcgctgaccggcagacctcgcttctcatcatcgatgatcgccttgtatccgctgatcacgccgcgacgttccagcttctgtacgcgcgactgcaccgccgacaccgacagtccggtcgcctccgaaagctgggccagtgtcgcacggccatccttctccaacatgttcaggatgcacgtgtcgatgccgtcgatctggcatgcgatcgatcgcgcgctctccgcagtggtgccactacttgtcataaacggtccctcctcataccaagcccatgtatccaatatcggcaatgccgatacccctagtgacaatcggcgtaatacccctaaccatacctatttcagtgcacatcgccacgcatcgttttcgctacaagagtgccgtctttttgcagacgcagcgtttcacactgattatttccaccatcacccttctatatattgcaatattttctaatatcagtttcagaaaacgtattttttattctttttgaaaaatacgaaaatcctgtttatatagtggccacggatcggaacgccgcaacgaaggtgccgtcaacgcaacacgaaggggcatgcaacctgttcgttgcatgccccttgatggatatcgcacatcggccgatggccaagtgtttcgaccacgcccgcaattggcacggacggacgtcgacgctatcagttgccgctggtcacgttaccgctctgctgaatcagcgaagccatgaaatcgcggttggtcgcggtcttcttcagacgcggcacaagcgtctggtaggcctgctccggctcgagaccgccgagcagacggcgcagacggtagatgatcggcaattcctgcggatcggtgatgagctcctcgcgacgggtgccggaggcattcacgtcgatggccgggaacaggcgcttgtcggcaagctcgcggctcagacgcagctccatgttgccggtgcccttgaattcctcgaagatcacctcgtccatcttggaaccggtttccaccagtgcggaggagatgatggtcagggagccaccgttttcgatgttacgggcggcaccgaagaacttcttcggcgggtacagggcctgggcgtccacgccaccggacaggatacggccggaagccggtgcggcgatgttgtaggcgcgggcgaggcgggtcatggaatcgagcagcacgaccacgtcctgaccgagctccacgaggcgcttggcacgttcgatggcgagttcggcgacggtggtgtggtcggaggccgggcggtcgaaggtcgaggagatgacctcgccctgcacggtacgctccatgtcggtgacctcttccggacgttcgtccacgagcacgaccatcaagtggacttccggattgttggtggcgatcgcgttggcgatgttctgcagggtgatggtcttgccggccttcggcggagagacgatcaggccgcgctggccctttccgatcggcgccacgatgtcgacgagacggccggtgagcttgttcggcgtggtctcctgcttcaaacgctcctgcggatacagcggggtcagcttgttgaactgcggacgattcatcgcctcttccacggacagcccgttgatggagtcgatggactgcagcggcacgaacttctggcgctggttgcgacggtcgccctcacgcggagtacggatggaaccgtgcacggcgtcacccttgcgcagaccgtacttcttgacctgacccatggaaacatatacgtcattcggtcccggcaagtagccggaggtgcgcacgaatgcgtaggattcgagcacgtcgacgatgccggcgaccggtacgaggtcttccttcggctcctcgcgacgctgctcacgctcggcatggtcgttgttgcgatcgttacgctcgttgcgatcggcatcacggccaccatcgcggccacgacgatcctcacggtcgtcgaagtcgcggtcgcgtccacgcatgcggcgtccgcggcggtcggtgcgatcgttgttgcgatcgcgctcattgcggccacggccatgacgggcgtactcgccatcctcggcattggcgtggtgattgtcttcggcatcgttctgcgcgggcagagcggcgagaatgtcatcgagatcgcgcacgacatcctcatccttcgtctcttccacgggagtacggcggcgacggcggggctcgttgtcgaaatcgtccttgcgacggcgacgacgatcctcctgcttcggttgggcaccatcgatatcgagttcggcaagcaggtcggctccgccttcggcatcacgacgcttgcgacgctcgcgacgctgtttcggggctccgcccaatgcgtcaagcgcctccactgcggccttggcctcggcggaatccgccggagattcatcggctgcgggttcagtcgaagcctttacggccttcttacggcggccagcgggcttgtccgccgccatctctgcgtgcgcctgttcggcgggttccgtggattcggcgggcttgacgtccaactcatcgacggcggcatcggcgtcgactgcgggctttgccgctcgagtgcccttcggcgtacgtacggtaacgccggccggcgcttcgccgccggaacgggcggcctgaagcgttgcgaggagctcgggcttacgcatgatggaggtaccgcgaagtcccatctgcttggcgagctctttgagctcaggcaatttcatatcttcaagatttgggcttgttgccactggtttatgcctttccttggcttcacaggcacacgcctgcaacagcttaaaaaagaattgcggaaaatccgccgtatgaaaggttcgccgcgaatcatcacggttttcgaacttcgtcaaccatacaacgcaatccagaccaacgcaaaaaccatgcgcacgtcgcgcggccgacggcaacgaaaaagcccgtcgagccgaagctcagcgggctggagaggactcttcgtcttctacttttcttcgtggtaactcttatcggtgttgaccgaccacacattcttcttggaggtcttgccgttcctgatgttgccgacggcctcgatggcggtggccatggagtggtccatgttgttgtagcggtgctggccgttacgtccgacgcagtagaggttgccgaaggagtcgaggtattcgacgagttccggcatgcgatcgtaggtgtcgaagtaagccggatacgccttcttgacgcgttcgcgatgggagtcgagcacgtcttgcggaccgttgatgatctgcatgcgggtgagctcctggatggcgaacttggtggcttcctcgtcggacatgttccagaaggagtcgccttcctcgcagaagtattcgagaccgatccacacggtgtcgtcgacgtccttgaccagatacgggctccagttgttgaagatctgcagacggccgaccttatagcccggatcctgcacgtagatccagcaatccggcacgatcggcggattgccgagggtcgggatgtcggtggtgttcttcaaacgcagatgcttgacgagcaggccgacggtcacgaaatcgcggtacggcaggccgttggcgatttccgtcatatcgttcggagcgggcttgtcggaggcgtccacggcattgacgagatccttgaccggcatggacgagatgaaattatcggcggtcatttcggtgcggttgccttcggaatcctcatacacgacggaggcgatcctgccgttggcctgacggatctcgaccacattggcgtcggtgatgaccttcacaccggcggcctcgcagttggcttcgacggtttcccacagctggcccggaccatacttcgggtaccagaactcttcgatgagggaggtttcgacctcggaattatcgcgcttcttcggcatgagcttggcgaaggcgttcttcagcacgcccatgatgctcaggcccttgacgcgctgcgcaccccaatcggcggagatctgcgatgggtggcggccccacagcttctcggtatagccctcgaagaacatggagtagagcttgcgaccgaaacggttgatgtagaagttctccagattggtttccggcagcttgtgcaccatggacttcagatagctgaagccagcgaccagggtcaatttcggacccatggccttcaacgtgttggcgctcagcgagatcggatagtcaaagaagtgacggttccagtagatccgggacacacgatgacgcttgagcatcaccttgtcttcgacttccggatccggtccgcctggctccatgtcgtgctcacggccgagtttcctgtcgtcatagctgggagcgccctgcagcggcaggacttccttccaccagtccatgatgcgctcgtccttcgaaaagaaccggtgaccgccgatatccatacggttgccgtcgtgcttgacggtgcgggagatgccgccgaattcgcgggtcgcctccaacacggtcacatcgtagttttcggagccaccgtcctttgcgagctcccaggcagcggtcaggccggcagggccaccgccaataatcaccacggattgcttttgcgtcactttgaggtctccttataaaaacaaaatcagacacagtctactagaaggtaaggaaacgcacattgcgacatgtgcggatgcacacaaaattcttccctgagccaaacccataatcacccgtacatatccccttgcacatgtctgatgccgtcttccgattcatacggaagacggcatcgggcgatcgtcacaagcgatcggcatcaacgacgcatgcgccacacgctcagcgaaacaccggccagcgtcagcccgaccgccagtacggcgagcaccgcaatcgcgcttccggtacgccccagcgacaccgactggccgttcgtcgcagacgtcgtcttaccggcatcatcggtcttaccggcatcatccgtcgccacatcggtgtcggtcgtcatatcggtgtccgtcgtcgtattggtgccagtcgtcgtattggtgctagtcgtgggattgccggacggctccggcgtcggctccacgtcggcctgttcgacgatgcgggcatcctgtccgagcgtcttatgatcagccgccaggcaactcttcagctcggtcagcttgtaccacgtcgaaccatcggcgatcggcgtgcattcggaacggaacgcgatctcgttctcgttgtacagcatgcgcacaatgggcgtgtatgcgctgccggtggccggatcctcaccctgtttggcgtacacatcccactgcacgttcgtagccatcggcgtcaccgattcgccacgccactcgttgttgtcgtaggtgtacacgtcgatggtggaggccggggcctgctgcgtggaaccgggcaatccaagcaatgcggcgaacggcatcatggtctcggcatgggcgaaccggaaggtcgccaccgtggaccctccgttcaccctctcatcgatggcatcgaagaaatcatccagcagaggctgcgcgatggagtaggtctcgctctgaccggcgtagctcggccccttctcgtaaaaatcttcggcatccaacgcccaggcgaacaatttggcgtcctgtgcatattcaccctggaaatactggttgaaatcgaaggtgtggtcaccggtgttctcgttctgcatgtcggcggcgatgatatacaggttgtacaggttcattgcggcgttgtactcgctcttgatcttcttggagccttcgccgcacgcattggcgtccttggacgcgtcggcgcccggcgcgcagttctcggcacccttcttggtgccatcggcggtgttgtaccacgtgtattcgccgttctcgagtttggcaaggaattcgtcggtgaagatctgcgacagcaggtcatgcgaggcccgtttgatgtcggcattgtcgccgatggtctcctcggcaccggcgatgatctcatcgttggccacgaaattctgataatcattcgcgatgtcgtatgccttggtgcccggcgtcttttccgtaccgtcgggattctgcaccttatggaagtacaaggtgtcgggattcttctggaaatccttgccgtcgccggaatcggcgggatccgtcggcttgacgacgctgtcggtcagcttgccgccggaagccgcattgaaccccttctcgaagttttcgccggattcggtggcacgcgcctcgccggaggactggtaggaaatcgtaccgccatcgactgcagcctggtcgaacagcgactgattgcgctggtacgcgcgctcgccgatgccgtaatgctgatccgcaccctgtccggtcagcatgccgtagccgttttcgacgttggctgcggtgatgccgctcaggtttttcatgaactcggttttgatggcgtccgacttgaatccaccatcccgctcggccgcttcggccatcttcatcagcagtgcatcatacttgtagctggacaggccgcgtgatccgtgacgggccatgctttcggtatagatcggctcgtacccttccggagctttgctataggatgccacggttgcggcgcttggtgccacatacggctgcttgctgctgtagtattggccatcggattccagggccagggccgggcagaccgttcccggcatcagcatggcggccgcagcgacgcatgcaacggaaccgacaatcctcttcatcattcgtgtcgacatcaacattcactctcatctcataggcggatgggcgggcccgcggttcggacacgccatgaatgttgtatgcgcacgaatcaaacacgacatgcgcatcaggtgacattccggcaaactgtggccgcacaatcggtgaacggccggcatgcgacagcgagaccggcggatcagtgaatgtcgtcggggatgtcgatgtcggttttctgcacctcttcgacgttcacgtccttgaaagtgacgatgcgcacgtttttgacgaagcggctggaacgatacacgtcccacacccacgcgtcggtaagctgtacgtcgaaatagacgtcctggccggcggaacgtacgttgaaatcgaccttgttggccaagtagaagcgacgctcggtctccaccacataggtgaacagtttgatgacgtcgcgatattccttgtacagtgccagctcagcgtcggtttcgtagttgtcgagatcctcggcgctcatcacttgccttccatgtcacgtttacggccgcggcccaatgtacgccaccaagcctccttggaggtcttacgttcggaagaaccgtacggccagttgttgtcggcatcggcatcgccgttgaccgacttgtcggaatcatcgctggctgatgtctcgtcgggcttggtctcgacggcatcggccttgccgggttccacgccgatatgctcgtaggcctcctcacgggtcatgccctgattcccgtcggactggccaccggcctcggcttccttccgttcattgatgcgaatggcgatggaatgctcacgagcgctcaacgcttccttgacgccgggattgtcttcgatcacatgcatgccgaacgcgtcgagggagcgaatcgggtcgaattcgtcaaccaacgtgtccatgacgatcagatcctgataccggttttgcgaggcgttccatagcgcatcgcgggaacggccggacggcacgaatcccaaggactggtatacggagacggaacgcgtgttctgttcggggacggccacccaaatcctatgcatgccaaggcctgccggttccggcgcaaagccgtacgtcatcacacgcggcatgatgtcacgcgaatatccgcgtccacggaagtcctgccccaagatcacctgaatacgggaggaacgggcccatccgtcgatgtcgatcaggaaaatcatgccgatcacattgtcggaggccgccgcatcgatctcaccgtccccgtcatgatcggattccgtgatgatcgaccatgctacggtgcgtcgggattccggatcgcccacaccggattcggtcggcgtctcgccgttggcccaggccacggaacgacgcacccatgcatgcacggcggcacgttcggcgacacgatccttgccagtgatgccggaagctcccggatatgcgtcaatggcgtccatgcgatcgagatccgcgacggtcgccggacgcagatgcaccatttcaccacgaatcggcggtatggtgatccgtgccggcagttcgcgggattcaacgctcactatcgacgactcagcattctctggcatgtcttcgtccctcgtatcgttacaggtgcggcctatgccacaaccattccgacggtattgtactcgactggaggatagctgggaatcgaaagggggagattcccgatgaaatctcccccgatacggtaaaaacacgccggaaatccgtttttaggggattccgacgtgtccttcgacccgctgatggactgagcagtgaagcacagaccgggaaagaccgtagtcgacctctcccccttcgccttacttgatcttacccatcacgatcttggtgacggccttcgcgtcggcctgaccgcgggtggcgcgcatgacggcaccgatgatcgcgcccatcggcttcatgttgccgcccttgagcttctcgacgatgtccggattagcggccagagcctcgtcgacggccttttccagtgcgccatcatcggagacgacctggaagccgtgcttcttgacgacctcggccggggcaccctcaccggcaagcacgccggcgacggtctgcttggcgagtttgtcgttgagcttgccgtcggcgatcagcttctcaacctcagccacgtcggccggagcgatcggcagctcctcaaggctcacacccttggcattggcctcgcgggacagctcgcccagccaccacttcttggcacctgcggcgctcgcaccggccttgacggtctcctcaagcagatccagggcatcggcgttgagcacgtcgcgcatctccagatcgttgaagccccactcgcccttcagacgattgcggcgctcgcgcggcatttccggcatctgggccttcatctcttcgatgtgctccttggtgatgtgcagcatcaccaaatccggatccgggaagtaacgataatcgtcggcgtcggacttcacacggccgcctgcggtggtctgcgaagcctcatcccagtggcgggtctcctgcaggatctcgccgccttcggaaagaatctgcgcctgacggcgaatctcatactgcacggtcttctcgatgccacggaacgagttcacgttcttggtctcggagcgggttccgaacggatcggacgggctgttgcgcagcgacacgttcacgtcggcacgcatattgccctgctccatgcgggcatgggagatgttcaacgcacgcacgatgtcgcgaatggcacgcacataggcgcccgcgatttccggagcgcgctcgcccgcaccctcgatcggcttggtcacgatctcaatcaacggcacgccggcacggttgtagtcgaccaaggagtggttggcgccttcgatacggccgtcggcaccgccgacgtgggtgttcttgccggcgtcatcctcaatgtgcgcgcgttcgatcagcacacggaagacggtgccatcctcaagttccacatccaagtagccattgccgttggtcggcttgtcgtactgcgagatctggtagtcacgcggcatgtccggatagaagtagttcttgcgggagaactggctccactcggcgatttcgcagtgcagggccagacccagcttgatcgcgtagtcgacggcggtcttgttcagcaccggcagggagcccggcagtcccagactcaccggggtgagctgggagttcggggcaccgccgaaggagacttcggccgggcagaacagcttggtggtggtggacaactccacgtgggtttccaagccgatgaccggatcgaacttcttgacggcatcggcgtacttcatcaacttttcagccattgtgttttctttcctccgatgctttctacttgctcaggccgtcgagccacggggtgttcaaggactgccagatcgggccgttccaatcctcctcaagggcggcttcgagagctgcggccggcttgtacatggcttcgtcacgctgctgcggggcgaggaactggaagccgaccggcaggccgtcatcactcaggccggccgggatgctcatggccgggactccggcgaggttggccggaatggtggtgatgtcgatggcgtacatggccatcggatcttcggtcttctcaccgaacttgaaggcggtgaccgggctggtcggaccgacgagcacgtcaaccttctcgaaggccttcttgaagtcgtcgatgatcagggtgcgaaccttttgcgcggagccgtaccaggcatcgtaatagccggccgacagagcgtaggtgcccaggatgatacggcgcttgacttcgtcaccgaagccggcctcacgggtgtaggccatcatgttggcggcggtctgcggaacgcccgccggcggcatgacgcgcaggccgtagcgcatgccgtcgtagcgggccaggttggagctgacctcggacggcatgatgatgtagtaggcgcccaaggaatacggcaagtgtggcagggacacttcggtgacttccgcacccatctcttcgagcttcttgacgccttcgttgaagcgggccatgacgcccggctggaagccttcgccgccaagttccttgatcagaccgaccttgaggcccttcagatcacgcttcatgccttcgcgggcggccgccaccatcgggcgcggaccctccggaatggaggtggagtcgcgcttgtcatggccgccgatcacttcctgcaacaaggccgcatcgagtacggtgcgggagcacgggccaatctggtcaagcgaggaggccatggcgatcgcaccgaaacgggatacgccgccgtaggtcggcttaacaccgacggtaccggtcagcgagcccggctgacgaatggagccgccagtgtcggttcccaaggcgagcggggcctcgaacgcggccaccgcagctgcggaaccgccgccggaaccgcccggcacacgctcggtatcccacggattgtgggtggtctggtaggcggagtgctcggtggatgagccctgcgcgaattcgtcgaggttggttttgcccagcagcggcatgcccgcggccttgagcttctcgatgacggtggcatcgtatggcggcacccaaccttcgaggatcttggacgcggcggtggtttcgatgcccttggtgacgatcatgtccttgatggcgatcggcacgccggcaagttccggcagctgggccttctcgtcgtcggatttggcatcgaaggcgtcggcctgttcaagagcctgttcgccggagaccttcaggaaggccttgacgctcggctcagcggcttcgatgacgtcgagatgggcctcgaccagttcacggctggagacctccttggccttgaccttggccgccatctcggcggcggacagcttgacgagttcagtggtgctcatatcactcctcccccaaaatgcgtggtgcgacgaacatgccggcctcggagaccggagcgcctgcggtcgcttcttcctgggtcagcggggtctgcggaacatccggacgcagataggcctccagcggaatcgggttggcggtcggcggtacgtcatcagtggcgatttcctgcaccttgttgatggattcggcgatgacgttcagatcgccctgcagacgggtgatttcctcatcggtgagtgcgattcgggccaaatcgcccaaatgcacgatttcttctttggtgaaagtaggcatgcccctaacagtaacgcgtctgtgtgacgagcacacgtcttttcattcgccagcccaatgcagtccgcggcggctcttcccctgcctgttgcagtcccgcatcggcctcttcgccaacccaatgcaatccacatggcggattattccccagcccttgcatatggcggattattccagccactggaggaatcatcccgctaaagaccccatcagaaacctaattcctccagtcactggaagaatcaccccgcagtatgacctctcggcatgtggattcatccagcagctggaggaatcggacgatgcggtacccgctcctaagtgtaaaacagactttaactgtttttgcttaggaattttgacttgatatgtttaaatttggtacagattatctcaattctttgaggtatttctgcttttgttatcaaatagctatcacttggatgctatcaaatatttaccggtgccacaaatgtaattatggtaatttgtaaccattttacgaattaacaaaaaataacataattatttttttaattcttttcttatatcgtttataaaaaatcctaataaatctccttttttgactttcttcaaccccaaatcttttcgcatatcattcataatttcttccattaaaaataaattattttttgctttttcaggatctgaactattttcacgaaattctatccatttattaattaccctagaagaaccccataaagtaatttgctttgaaaatttagacaaatcttctaacatttgctcatcggaatatgtaccaggttcttttatatttttttgaacttggtaaatcatttctacgaattcaccatatggtttttctcttttttgagttaggtattcttgcctactttttcgatagtcaactattttagcaacgatagaacttataattgcgccagttaaagaaaccaaaccagtcactaggcctactattattactgcatctaatttagaagcgacttctgttaactttataattccgtttataattatattatatagtaattttactaaccatattgaaaaagcacctatcacaacgattaaaaccaatcccaaaaaaaaatgtttaatttaggatgtttctcagcaaatgaaaccttattatttttcaagtatatacctccttatttacttcctaaacacaaacaaatactcatgtgtcattagcaaaaaaattatatttcacactattggttttccaatatcctgttgctttgcagttatattgctctctgataatcatttctttaagagtaaatcctgcatcttggagaatttttataacatcaaaagatattggtatcatacaacctttttgtcttgtatcacccataagtacagcacaaaatttatcctttctcaaaacacggcagctctctgcgaccaccttttttatttcgtcaagaaaatctttcactttaaaatatgatagattttcttcaatatcttcgctgtatttaataatatcggcatagggtgggtgaatacaaataaggtcgacgacagagttatgcacagacacgtcgggaggtctttgacttatccacatttgcctatcgcgcttccctcggcaccaagccacagggtagcgtcgaatcatgaaagcgtatcctcagattgacaggcttcttgatcaagccgaaagcgcacaacgatgtgcgcacagtagcaagccctgatgcagaaagggctctatcgcagatacctcgcgggggatctggtcaaaccgtatcccggactgttcgcacgttcggcatactggaatcgtctgaatgccgcggaacagtcgttgcacgcagcccgtacgctcaaggatctccacggcaattggatcttcgcgggaatcaccgcagcggcagcgcatggttttgaacaccaatggctcctgcatcatcagggattgaccatcaccctgcccacacgcggctcatatcgttcacatgacaagctcaatgtcatctacagtccattcccgaaagacaacgcggtcatcgtgaatggcataccggtcaccaatccggcgcgtacgcttcttgattgcggccacatgctggaattccggttcgccttgccgattttcgattccgccgccgccgaaggggtcggcaacgatcaggtattgcaggaatgcgtccgtaccacgcgtgactgcacgacgatcttcagacttatgcagcatgcggattcgagtagcgagaacggcggcgaatccttggcacgcggaaccatgatcgaagccggcttttcgattcctcagcttcagatacccttcactgatcccacaaccggagagcggttccgtgtggatttcttgtggcgtgcggatgatggcaggatcatcgtaggtgaattcgatggcacggcgaagtatgtggatccggaaatgaccggtcggaagagcatacaggaaaccgtccaaacggaacgtaatcgtgagcaggccttacgtcgtgccggagtcacggaagtcgtccgattcaccttcgatgacgtcctgcaacgcaacccgctgatagcgaagttgcgccgcgcgggagtcccgaccgtaccatgatgcgttcatttccagtcgccggaagcatcaactgcagcccgtcaagaccggggaacggcatgctgagcaatccaggcgtgcatggagactgcggccgcagcacctgcattgatggagcgaaccgaaccgaattgggagatgtagaccacatcgtcggccagctcgagtgccttctcggacagacccgggccttccgcgccgaagagcatgaggcaacgcttggggaaatgataggtttccatcggcacggcaccgggaataatgtcaagagcaatgatgcgtgcggtctgcaggtcggcgattttcgactctaattcagccagttgcgccagctgctctgtgtttttttgagcgtcatatgcagccaaagtattcgatacggtgccggatgatcggggttcggcaccggtatcggcaatgtcagagacatcggtttgcggcgggacgaagacgcaggcatcgtcgggacgtggtccggccgcggttccacgcatgcggcatgcgatggccgcagcctgcgattgcgccgcggcgatttcacctgaaatgcggtatttccagcattcgacgagctcagcgatggatggatggttttcgacgtgttggtacagttccgtcatgagtgcgcccttgcgattccatttgtgcggcccgacgatgtgtacgcgggatgcttggaatgcattggccgtgcgcaccatggatccgatgttgaagtcatgcgtccagttctccacggcgacttcgaactcatgacggccatgcgcgtcaagatcggccttgatggccgcgacggaccaatagcggtagcggtcaagcacattgcgacgatcgcctgcatcaagcaaggatgaatcgaatcgcatatcgaaattcggggattgcggattgtccggacgcggctctcccggatgggtttcggcccacgggcctacgcccacctcacggaataccggttcgccggacgctttcgccgcgacatcgatagggttgggtgcgtgcatggttccttccgattttcatcccgtacgcgtcagcatcaggcagggcctaggtttttccgccctctgatgcaggtgagcaacgagccgactcagtgaagctcggactccttgtacacttcgatgaatggcaactcggactcatcgccggagaccggattgacgaccttgatggtcggatggatcatatccacgccaccaatcaacgacgccacggcgagcacttcggccccttccctctccacgacggaaaagtcgagactcagttcgttgccattacgcaaggtgacaagcgaggaggtttgcacatacgacttttcggacagccaggagtcgagcagcaccacgcgcttgcccgtgatggacggtcccttgatggacgggtacacgaaatccatgacgaatccgttcaagtcttcaccacgggaggccgcagcctggatcatggcggagaccaacggcaccgcagcggcggtcaacgcgccgacggcatcgacatcatcaacggaatagccggcttcctccaacgtatcaagcaagatatgcccgacgacggaggccccgcgatgatcgaacgtcacggatgcaagctctgagaacggcttgtccttcatctcggcctgcagcagggtcttgagctgatcgcgcggctcgagcatggcgaaatcgacggtggacggctcagtggcggtggcggccgatgcgacctcggtggcggccggcacggtcttacggaaagtcttctcgtcagtcatggctccagcctatcctttcggctcgtcaatccctcgcatcatctacggtttcgggcgccgtcagctcacggatatccgccttctcggatggaatgatttccacggattcgatgaccttgccctgatccacgcgttgcagtttgcgagcggtgaccagcacgcgggactccaatgacgaggcgaacgcattataggcgccaaccgttctggtgatcgccgtaccgagtttggtggcgcgctcccccagcaccgcgaaacgctcatacagttcacgtgacaggtcgaacagcattttcgcgtcatcggtaaggctctgctgttgccaggcgtaagccaccgatttcaacaccgcccacaacgtaatcggtgaggtcaaagccaccttacgggcgaatgcgtcgtccatcagcgtcggatcggtctccaaggcggcctgcagcagcgactcgttcgggatgaaggcgatcacgaaatccggcgcgtccgagaacgcgttccagtaggccttgtcccccagcaccttcacatgctcgcgcactgccttggcatgggccctcagcagatccgccttgcgcgccagctcctcctgcgaagcggtgtcgggaatctcgcaggcacgttgatagtcggcatatggtgcctttgcgtcgatcggaatggttttaccaccaggcatgtggatcaccatgtccggacgctgggtatgcccgtccgcgtcggtgacgaccacctgcgtatcaaaatcgacatgttccagcagacccgccgattcgacgatgttacgcaattgcgcctcgccccaggcgccacgtaccttgttgttgcgcaatgcagccgacagcgagctcgtctcacggtcgagccgcgcctgctgttcccccaaacccttgagttgctcgccgagcgcacccatttcacgcttgcgcccctcttcgatttgggaaaccttctcctgaagggcgtcaagattcttctgcacaggagccagagcggagagcaccttgccctgctcccgcaactgccgctcgctttcggtctgccgacgttccgcctccgcggcggccttttcacgctcacgctcgattctcgtctgctcggcgctttgcgcctgcgccagctgggatttgagatatgtcagctgctgattcaatccttcggactgcgtgcggtactgtgccacggatgtggtcagatcgccgatctgtcgccgaccgtcctcgatctgtgccttcgcctcgttcaagtcggcggtacgcgcatcccgcgccatgtcctgccctctggatcgccccgcaaaaaagcccgcagccgctccaagcgcggccacgatcaccatcagcaccattacaaacacaggattgtcgaacatatgttctagtaaacagcatgcggtggaccacgtgtcgcagccacgcccgaatccactcgacgaaccgcattcatccgtacgaacgaccatccgataccccgcgctggattatgctggggagcagtcgtacgagagcgaaggaacacaagaggctggtatgggattcgatttgttcatggccgcagtcgccatcgtggtcgcctccattgcgacatggggcattctcagattcttcctcggccaatcgccgaccgacggcagatcgtcgacgccaccaacgtcggacgatcgcagggaacccccggcaaccgaaacatcggcggaccatgtgcggaaccattccagccccagcaccgatccaccatcatcggaagccgaacggtccgccaacaagcggcccgaagccgcccctgccgccaactccgcggaatccgccgatgacggccaacgcatcgttccgctgctcgtcatcgccacgattcttacgattccaacgttcgtcgtcaccatgctcatgctcggcagcgtaaccatgcccgactggctgaccaatccatggctgcatgccatcgtgattacgccggtcatgttctattgcggtgcgccgattcatcgccgcggcatgcccgccctgcatcaacgcacgccgaatgcggattcgctgatttcgcttggcatgtcaatcgtctatgtctacagtctgctgctatgcgtggtgtcttggatttttccggttggctcacgcgatccgtatttcgcgttcgtcggtgtggtcgtgatgctggcattgatcattcgcctgattcgccggaagctggtgatcgtgcggttcccgatcgaacatcccgaagattttgagcaggcgctgaagattcgcgcaaccaatgcgtcgtcacagtcaacacatggaaaaagcgcggaagaggttgtcttccgcgccagaataggccatgtgatccacactcgcgtactacagatcaccactgcagtgacgatggtcgtcgccgtgtggacgttcgcactatggctggtgttcggcatgcagccgaagcttgcggttgcggtgcttatcgccgctaccgtgttatcggtcgccggcctggtgcttgaggtcggcgaccgcgtttcctccctctgacaaggaaggaaacggtaaggccgatgccggcggacctcactgaggttcgccggcagcctcttgttcccgcaggggaacggcccggcttacttgcccatgtccgccagttgatcgctcgcccatgcggacagttcgagatgatcgccgccggtctgatccaccaacacggtgtcgccgtcatgcacctggccagccagcagcatgcgcgccagctgatcgccgacctcggtctgcaccaggcgacgcagcgggcgagcgccatacgccggatcgtagccggtgttggccagccattcgcgtgccgaatcggtcacatcgagcgtgatgcgacgctcggtcaggcgagcggagacctgcgccacctggatgtccacgatgccgcccagttcctcgcgggtgagcgggtggaacatgaccagctcgtccaagcggttgatgaattccggcttgaactgcatgtgcacggcatccatcacggccttcttcttggcgtccgcatccaagtccggattgacgaggaattgcgaccccaaattggaggtcatgatcagaatcgtgttcttgaagtccacggtacggccctgaccatcggtcagacggccatcgtcgagcacttgcagcagcacgtcgaatacttccggattggctttctccacctcgtcgaacagcaccaccgagtatggacggcggcgtacggcctcggtgagctggccgccctcctcgtagccgatgtagcccggcgcggcgccgatcaggcgagacacggaggccttttccatgtattcgctcatgtcgatgcgcaccatggccttctcgtcgtcgaacaggaagtccgcgagcgccttggccagttcggtcttgcccacgccggtggggcctaggaacaggaacgagccggtcggacgattcgggtcggagatgccggcacgcgagcgccgcacggcgtccgaaaccgctgcgatggcttccttctggccgatcacacgcttgccgagatactcctccatgtgcaggagcttttcattctcgccttgcatgaggcggccgaccgggatgccggtccattcggatacgatgccggccacggaatcggcatcgacgtggtcgggcaccatcggttcggtttcggcgaccgcggtgccgttcgcgtcattgttgtcggcggcggcttccgctgcggccagttccttctgaatcgcggggatctcgccgtacgagatgcggctggccttctccaggtcgccttcgcgcatggccttgtcggcttctacgcgcaggtcgtcgagcttggctcgcaaatcgccgaccttgttgtggccggccttttccgcatcccaacgtgccttgaggccgctcagcttttcgcgggcgtccgccagatcggcctgcagcttctcgaggcggtccttcgaagcggggtcttcggccttcttgagctgcatctcctccatttcgtagcgggtcaccttgcgttgcagttcgtcgatttcctccggcgaggagtcgagttccatacgcaggtgcgcggctgcctcgtcgaccaggtcgatggccttgtcgggcagctggcggccggagatataccggttcgacagggttgcggcggcgaccagcgcatcgtcgccgatcgtcaccttgtggtgcgcctcgtaacgttgcttcagaccacgcaggatcgcaatcgtgtcttccacgctcggttcgccgacgaagacctgttggaagcggcgttccagtgccggatccttttcgacgttctctcgatattcgtcgagcgtggtcgcaccgatcaggcgtagttcgccgcgggccagcatgggcttgagcatattgcctgcgtccatggagccttcggcggcgcccgcaccgacgatggtgtggatttcgtcgatgaaggtgatgatctgcccgtcagacttcttgatctcctcgagcacgctcttcagtcgttcctcgaattcgccgcgatacttggagcccgcgaccatggagccgaggtcgagcgagatcagcttcttgttctgcagggtggtcggcacgtcaccggcgacgatgcgctgcgccagaccttccacgacggcggttttgccgacgcccggctcgccgatgagcaccggattgttcttggtgcgccggctcaggatctggatgacgcggcggatctcttgatcgcggccgatcacggggtcgagtttgccgtctttcgcggcggccgtcaggtcggtggaatacttttcgagcgccttgtacgatccttccgcgtcggggctggtcactttcgcgccgccgcgcacgcccggcaccgccttgcgcagcgcttcggcggtcacgccgttcttttcaaggatttccgcggattggttcggcttgcttgccgcgatgccgatgagcaggtgttcggtggagacgtattcgtcgcccatcgcctgcatttccttttcggcctgcgcgatcgcggcggtcagctgacggcttgcctgcggctgcgatgtggtcgaaccgctggcagccggcaacgcgaccaaggcgttgcgcaccgcagcgccgatggcttgcacgtcaccgccggcagcctggatgaggccgcggatcacaccgttttcctggcgcagcaacgcatccatcacatgcagcgtgtcgacttgcgcgttacctgccgcggacgcgctttgaatggcgtctccgatggcttcctgcgccatcgtggtgaacttttgttccatatcatcctccatgattcgcgccgctcgcgtatcgtcttcgcagctcacttgccgcgaatcgaccgcaatccggcgcatatgtcgttgtctgatatgctcaaccgacttcaccgccattctattcccaaaacttgagtcatcaacactcaacttttgtttttcttttccagcgaatagtgatccagatacacaaaaaccggctgattcatgacggaaagatgtcatgaatcagccggtttttatggaaataagctctttgtcggccagcaatcagccacgcaacaccacattgcgcagcgaaccgatgccctcgacgtgcacgacggcctcatcacccggatcaagatgtccggaagcgttcggcgtgccggtcatgatcacatcgcccggcagcagcgtggtgaagctcgaaatcgcggcgatctgctccggaatgccatgaatcaggttcgccgtggtacctgacgccatctcaacatcctcaccgttgagcgtgaacgagatcttcgcgtccttccagtccaggtcatcacgcgtcacaatccacggaccgagcggacaggcggtatcgaaacccttcgcacgtgtccacgtcggatcgagtccctgcaggtcacgcagcgtcacgtcgttcacgcaggtgaagccaagcacataatccatggcccgctccaccggcacgttcttggcgatgcgccccatcaccacggcgacctccggctcgaaattcatgtcgttggagcacggcggaatcacaatcggatcgtccgggccaatcacggaagtgctcggcttggtaaagatcaccatatcctccggcgcatgcttgatttcggagtgaccggcctcatgcatgaactgcgcatgcgcctcgtagtttttggccagaccgtacaccttcgacggaatcaccggcgcaagcaggcggatgccgtcaccgtcgaccggaaagcgctcgccggtcggctggacggcggcgccggacagtggataaccgtccaatgccaccagataatccttgccgtcgctctcgtcggtctgcacgaaagcgtactgcggtacatcattatgcgaaaaacgtgcgattctcatgccctttagtctacgccggttcagacggcccgctcgacttcggtgcgcgcctggagattgagtcgcatacgcagggtaccgacctcctgctccaattcgtcgattcgccgcacctgctggtagatcatcaggtcacgtacatcgacgctgccgtcacgcggggcggccggaaaggtgattgcgcgaagaggcgcctgcgattgcgaaggggaccggtccgaagtcacggtctgcatcgacgcgagcacgtgcgcactggcggcatccaatcgatcatcatatcgcggaccggccatcgcatcgctcgagctcttacgccacctcgcaaagcaacgctcgatgcgcttgtaaccgatcagcgccgggtcgagtcccgcctcacggaacagtttgaccggtgattcgccggcatgataccgccgcatgcacgattgcttgaacgcctcggaataggtgattcttctcgccgtggcctcggccaccgcaggcaatgtcttcagataggcgacctcttcaggactgaacattcctccgccgttagacatgacgaccctcctccgtgctacatgtgttcacacccgggatcaacgtcgaaaaccgcctccgtcttaccgcctcgattattgcccgatggagtttatggtagatgaaaacaagtctcatctcaagcgcaattaacttatacccctaactccctccttattactaccaattcaccttatttttgttgatttttcaacgactcacccaccctagtcatcagcatgtataaaacaccctaattcatcatcctttcttaagatatttatgtaaatcaattgacttatttaccgtattccatatcactgtggaacctaacgggaaaaaccttcccgcaccttgccgaacgacatgcaaaggtgccgcccgcggttttcgcaagcggcacctgatccggattttcgcccggagttttccggtcaaggcgttccggcaatacccccttcagtcacatcgttcggacgtcaggactcgaccagcgtgttccgggacttgagcgccacggccgcgccggcaccggccagcagcaacgccacgatggtgaacagcacggttcccgcggcaccggtaagcggcagctgggtgatggacttcacgttcttcaccgtaatcgcaccgtcagcaccggaggtggccagtcccagcacgttgctgccgtcagccaacgcgaaggtcgccttcttggcgttctggttgatggagaccttgatgttgaattccgccaggaactgcttggaatagttcagatcttcgcgggtcgcggtttccttgacggtgtaggtgccttccggcagggcgaacaccttgaccttgccgtttgcgtcggacttgatgtcggcggaggcggaggcggcggtgctcagcatgtagccgttgtcggtaggcacgaacgtaagggtgttgcctcgcgcgtccttcacattgaaggtcacgccttccagagcgttctcttcatcgccgacgccgatcttggtgaattcgaacctaccggtgatgagttcgacctcatcgccgtccgtcgaggtgtccgggtcggtggccacggttggcgtattggtcaccgtctcgctttccttgacttcttcgttgattacgccggtgtactgcacgtagatggtcttgcccgcattcgcgaggccggcctcgctggccgcatagttgctcagatcgaccgtgaactggtccgtgccgttgcccttgagctcgttagcggtgaaaccactgaccacgtagttgttgtcagccgggatctcggttacgttaaccgtctcgccatcgacggtgatcgtggaggaaccgccttcgacgtacaccttgatgtcattattgacggtcaggcccacgcccggcttatccatgatcttgaacatcgaatcggtcttacccagcatgttcggcagcttgacctggatggtgtagttcgcgacactgccgacgcccatagcctgggccttctcttcggcggtctttcccggggtcggcggcgtgttcgacttcgccacgacggtaccgagggtcagcggatcaccagacttgcggacgaacttggtgtaggttgcgccgttggcggtcacctgcgtggccacgaccgtaggcacgccgttcgtgtcggtaatcagataccagccttcggtcacgttcaaggtaaccgtcgacgcttcaagcgcagcggtcttcgtatcggtcggggtcagtccggaaacgaccaaggcgtcagcgaatgcgcgcagctgtgcgtcggtgaatgtcgccacgtacgcagccggattgtccttgtacgggtccggaatctcactcacgccgcccgcactcttcgccgcagcctcaacggcggtcttcgccgcatcgacggtgttgacctgcaccttgctcatggtcggcgcggtaccctgcggatcggcgaattcggcgaacttgtatgccttgaactcggaacccgcggccgcgttcgtcacggtgatttcggctgcggtcgtcggatcggcctgtgcgctcgcagcgcctagggccatgccggccagcagcgtcgccgcggcggccacgcttgcaaaaagcttcctcgcgttcatgatgagaaacctctcttccttgtaattgttgcttgggtgttcaccattgattcgaatgttgtgcgttatcaggattcgtgtccggccggagcaccatcggctcggccggatgcgtccgttcagtcattggttgctgccatcacccccatcagtacaaccgtttcttgccgctccagatggagacgatgattcccgccacgacggcgatcagaccgaaacagccaccaatgagcagccactgtcgaccggtgaggtcacctgccgcagggagcgtcgcaaccgagatatagcgattgacgaacgcagccgtcagatcgtcggccggctgttgtttgtcggctgcgatgtcccggccatcgcaatccttgacctgcacgacctgcgtcaccttcgcctcgtattggccggccgcattcttggcgacggtgacggtgacgtgatattcggacttgtcaaaacgccaaccgtgcctggccgcaggctgtacctccaccaccttgaaggtgtaggtgtcggcaccgtcgttcagcggagtcgagaatgtcagcggatcacctgcggaatcgacggtgaatgcacccggcttggagatattcgcttgcaggttgccgatcgaagtcgtctgcttgccgccttcgagacctttcagcatggcaccggtgttctgcgccttctgcgtatccgacgtgatgtcggtcagttcgaagtcgaaggattccgcatagtcgttgccctgggccttcttgctgagcttcacgccgtcttgcagcgtaaccgtgttgcgttgattccgtaccgtgcattcgtaggttttcagcggcttctgcaggtcggcgttcttgtcggcgagcgcccacagctcattcttatcgatcgtcaccgtgacgttcgcgtcgccgacttgggtgtagccgttgaccgcgtcttcggtaagcgtgtattcgcctggcgcaagtttgacgaaaccgtcgttccatcgattgtcggcgttcaacgtcactgtgaggtcgaccgcatcgccgtagcctttgagatgcatctgcacttccgtaccgtcgacaggttgcacatcgggccattccttggtcactgcgacgttggcgaccggtatctgcagtaccggatgccggtaattcgcgcaactcgacctgtcgtcggtggtgtagcagacttgggccgtcttgttggacctgaagccggccttgcccgccgaagtggctccggtatcggcatcgcccgtcgcgtcatagccggtcttcgcatatgtctgataagcggagtcggtcggttccacgttgtacgacagcgtatatgtcatgccgtccttgagctcgtacgattcgttgaattcggccctgacgatgccgttgccgtcttcgctgtaccacaacgcgtaatccgtattgagtaccggagcggtttcgccggctttgccaccggtgacgttcagcgtaacgccgctcgttaccttgtagaacgtcttgccatcgaacgttctcgcagtggatttgtcgtaggcgatgccgctctgcttggcatactccgacagttcgtcggtgatggagacgcccgtatacacgtgcttttcggtgatggtcttctggatatcgttgaagatctgtgccagctgcgtggcgctggaggccgaatagtagtagtcgccggaggctcggtcgcccagattccgatacccggtggcattcggataattgctcgaaatgccgtgcatgaacttattggcgttgctggcggacgatacgctcgccgacggattcgcgccatcgaaaatgccgatggagtacaccgtggtgccggcattcttcagcatcttcgccttggaaatcgcattgttggcaatagtgtcattaaacccgctgataccaggttcgccatccgtaaagaaaacaatgtacttcttcacgccggcgcgatttccttttttcagggcctcctgtgccttctcgaaggcatagtcggcttgggtggcgcccgaagcagtcaatgccttgaccgaagtcttcaatgaactcatgtccgacgtcagaccgttcaccacctgagtgcagttatacccaccgctaccattggtccgacaggtttgatcattgccctcactatcgttcttatcactcgcgaacttcaccaaggagacttgcaccttcttatcctcttccgagatggattcgttcgtctgatcggtcttatccaagaaggaattcacggcgctcttcaacgcatccagctttatcgcgtcgtatagttgggtcccgtattcagcattcgaactgctctttggcgtgatgctctgccactgccatccattctgatagccccagctattcccggacgcattccaggtcaccgcctcatacttcggattcgagtcagagcaactgccggcgcatcggtagtaggtctttgacgtgtccaaatcacccgaatagatgggaagtcgctcattcatggaaccggacacatccagcaccaaggcgatgtctatcggggtggtgtccgtggtggaggtggaggcgtccttgccgattacgtcaagtttgagtgtgtaggcaccattgccttggtattcgatgctcttggtatgctccggcgtcgacaatcccgaggaagcggacttcagcatgccccggtacgacgcaataccaagacgtaccgtcttatcggcattatccttagtttcgtcgtctttcgcttcgttctgattcaccacggtatcggcatcatcgtcatccgattgaaccgaccgctcaacggtcgtagggttctcggttcccgttggtttctgggtcggcgttgcggaggccgtcgcgggttgcgcttccgacggagtagcaagttccataacaggctcgtcggctgattcagcctcctgctcttcagattgtttcacgagctgttccacaggctgttccgtggattgcttcgcagacgcgccctcagccgcaggtttttcggacccttcggatacattctcggacggggcggattccgctgccggagcagcctcggatacatcgttcgatgcactgctcgcggaagccgtcgcgacctgttcggccgccgccgcatcggcatcatcggccaatgccatcgtacttgcgccggccatgccacccagcattgcgagggtagccgccatggccatgagcttctttccaagatccttgcgatgtcggtcgctcaagccggcaagcagatccttgattctcttcatagcatgtccatctcttcgtctcgacgcgtaaggccggctccgtcacgtgccttatgaaacggactgtagggaagaaagccctgcggcgcatacaccctcctagggggagcctccaaccactgacatcatcaaaaatcgttggaattccaacaagaccataccctcttcggcaacctcttcaagacgtgaaaacatcctctttcaaggaggcgcgcaaaagccccatgccgattgcaacgcatcaaaaccaccatggtcgcgacacgatgatcacccgccgctcaaccacgagacggccagcattcggcatgacgcatgatcctacgcttcggacgaatcagtctgagcacgatgaagcacaacaccatgccgccaaccagaacgccgacacccacccacaatccgatgctgcgcgcatcatgcaggtcggtcgggtcgggtgcgggcacgggaatcgacacacgatgccccgaaaccagcagccgctgggtattgatgccatacggcgtgcaagtcatcaaggtcagacgatcctcccccggctcgattgtgagacgtgacgtgtcattcggatcaatcacgccgatgcgatccacctggtagccaagggtttcacccatcacctcgacatacatgaaatcaccctgcttcatctcgtcaaggcgggtgaacatcatcgcctcgaccagaccacgatgcccggtgatcaccgcatgcgtgttcgtaccaccgaccggcaagctcgtaccatacaaatgcccggcacccttggcgagcgcctgctccgacgtaccatgataaatcggcagtttcacgctgatttcgggaatcgacacggttcccataatgccggagccggaatcaagcagaccctgatactcctcatcctgactggagacggaatccccattaccggaactctgcgaaacgcccgcggccgacgcgaaaggatccacggcctcaccaagaatcggctgcccctccttggcaagacgtgcgttataggcgcgagcatcggcaagccggtcctcagcctgcgggtacggccagcccgcaaccgttttcgccaccgcatcggaagtattcgacagactccgcgccgatcgcacctgcatgaccaccggaaacaagcctacgcataaggccgatgcgatcaacagcgccgcaagcgcacgcatcaccacgaactgcacgagccgcatgcgacgccgacgcaccacatccgatacgtcaaccacctcagcaaacgccacaggctcccaccggagggcaacggcccgagacacctcccgccgcacgctgactctgcgaagcatcatgcatctccttcgaacgcaacaatcttcgcatcaccacccctgcaatccatgccccctattggaggggtccatgatcattcccgcaggcaggaacgtatgggccgacgctagacgaacgcgcgctcgccgaagatggcggtgccgacgcgcacaatggtagagccttcggcgatggcgagctccatatcgccggtcatgcccatcgacagttccaggcagtgttcggttcccggcgtcttggacgcaaggatcagatcgcgcgtcttgcgcagatgcgcgaagcatttgcgaatcgtggtctcatcgtcgacatgcgcgccaatcgtcatcagaccttgcaattcgaggccatccaacgtgcctatcttctgtgcgatgcggatggcgtgcgccggatcgcaacctgacttcgacgcctctccggactcattcacctccagcagcacgccgaccgtaatgccgcgcgcgacggccctgcgcgaaatcttctccgccaaatcgaccgaatccaccgactcgatcgtgttgatcaccggtaacactttgccgatcttgttgctttgcagttgaccgatcagatggaacggaatacgcgtaccgtccgcatcgccggcaaccgcgccgccggcaaccgcctcggcagtggccgcccccaacgtaaagccgcgttgcgcgcactgcttcagcaatccttcggcctttgccgtcacttcctgcggacgattctctccgatcatgcgcaccccggcgtcgatcgcggtcatgatttcgccgacgtcacgcgtcttcgtggctgccagcagtttcaccgaaccgacttcgcgaccggcttgggcttcggcggtggcgacacggtccagcacacgatgcacgccgtccgtaatctcctgtgcgcgcgccgcatcgatcacctcattggcaaggtttttgtggtccatataagcagtcatctcatcgccccttaacgtcggattcccgatccctttccctagggtatgaagaagcccgtacgagccggcctgaagtgaagcgataaagcggtcggcaatagtcgtacgggctaacatcagacgacagtagaagggggacttcaagactccgtctgtagtttctttatgactcaaaatgccttgattgttatggcatattccataatttgagacatttcgaggaaaatttcgaggggttaacccccttgggtttctgattgtctagtaggcactcagtccttgtcagcatgttgccgcattgcacgaatgtttccacgactcaggattcgatggtttcgaaccgttgctcaagctccccgacacgctgccgcaacgcgatcacctggcaggtcagcgactggatctgccccatttgcatggtgatgaggcggttacgcgcatcggtcggcatcacggccatcgcacccggccgtttggcctcgttcatgatctcatcatcatgcttccaacgcgcgatattgcgttccacacgcttatgcccgacgatcatggggctcaggccggccgacgtaaaaatcacgctcggtcgctcaccctgtagataacgactcatgcaactgacttggaaatcatgcgaatacgtgatgcgattttccgtaaccgcctcgaccgccggcagcgaccgtaggtattcgacttccgtctgactgaatcgtcttctcgtcatgttccacccactttcacattgtcattaccgttgactccgcttacgcgccgcgcgacatggatacggcttacgtgctctggacggttcaccctatcatcagaaactcgaaaatgacgggggcaaaaccacccgtatcgctacgcgctaaacctcgtgtaagctatatcacacaatcgattcaacgctttatcatacaattcaccccatctcaccccttatgtgaatcgcttcctttccggaggagaaggtagagtcctgtatgaccaaccactcaaggaggtacgatgccaggccgtttcgctccgacgccgtcaggccgcatgcacatcggcaacatctacgcgatgctgggtgcatggctttccgcacgcagcagcaacgacgcgatctacctgcgcatcgaagacatcgacgaaccacgcgtcgtccccggagcggccgacctcatcatggacgacctgcaatggctcggccttgactgggacggcgcgcccgtatatcaatccgcccgacaccctctgtatgaagatgccctgcgcaccttgcagcgtctcaccatcgacgattcgggagccgtcaccgcagatgccaccggaaacgcaacgccgttgatctacccctgcttctgctcacgcgcggacattcgcgcggcttcagcaccgcaggaaggcgaccgtttcatgatctaccccggcacctgccgcaggctcgccgagacgaatccggacgaagtacgcgcacggcttgcgcagggcaggcggcattccctacgtatcgccatgcccgcttcgaattcgacgattgcgtttgaagaccgtgtattcggccatcaggaattcaatgtgacccacgagatcggcgactcggtcgttcgccgggccgacggcctgttctcctaccagctggtggtcgtcgtagacgatcttgccatgggcgtcgacgacatcgttcgtggacgtgatctgctacgctccaacgccctgcagatatggatccggcaagccctcaccggctccaccgactactcttacgcccatctccccctcatcgacaatgcgagcgggcaacgacttgccaagcgcgagaaatcactggacatgggcattcttcgcaagcatggcgtcacacccgaacgagtcatcggatactgcgcctggctgctcgggctccaaggcgatccgcattccacgcatccgcaacccatgagcgtccaagaggccctgaccgaattcagctgggccaaggtcagaaccgacaccgccgaccgttcccttgacccgcaggcattcaacacctatttcggtctctaacggcacgatggtcgctatctgatccacagctcattatcgagcggatattcgttggtcgtgcatccgtccagatgcatggactgttcctgcatcagcggcgcagactgcccggcaccggcgcacggcgtctcgttatcggtatgaccaagtcgatgccccacttcatgattgatcaccattacgcggtatctcgccatgttcccgcctgcggaaagccaggcatccgtgccgccattccagcgatcgtcgttgatgatcacgttctcgcccacacggcaactgtattcggtggagcaacccgacgaaaacgtggtcatatattgcgcttcggaaagcacgatattgaagtcacagtttccttccgcgccctgcacgaacgtagcaccggcacgcggccatccgcgctcatcgttgagaatacggtagacggcattggagaagtcatcgagcgaaccgacatcacccttctccgctacgcaataggtgtactgcgtgggttcatggccgttatcccgtgccgtctgctgggccttggtgagaatctcgttcctctggtcatcggtcagcggtgccgattgatgctgcaactcagcctgtaccggatcctcagcattgtcatcgtcttgcgattcgttcgaccgttcggcagtcgcatcgttcttggaatgctgccgtttcgccgtcgtcttgccggtcgtcgtcgactgcgaggcctgcgcagcccgttgcgcatgcgccttcatcccgtgcacactgcaggacaccatcgcaatgaccagaaccgcaagcacgcaggccaccgtccagcggcgaatgcgaaacacctgccgcgaatccatcgtcacggccgtcttcggattcagcgcacgtagcacataccgtatgaatcgcaccatggctccttcccacaatatgcgaaggtccgcggaaaatatccacggacctcaagcatagctgtacatcaggcgaacagcgacttaaagaggaatgcgcctacaatcgcaccggcaatcggagccacaaccggaatccaggcctcaccccaacgggaggatcccttgtgcggaatcggcagaatggcgtgcagcaatcgaggcataagatcgcgggccgggttcagaccagggccggtcgggccacccatggaggtcacaaggccccacacgatgaaaccgaccacgatggctgcggcggcgtgatcttccttaccccacggcatttcgaggcagcacagtgcgccaagcaccagcatgagggtgccgaagaactcgttgacgaagtagttgacgcggtcgttgtgagcatcggtggtgcagaaggtgccgagaatggcgttggcatcttcagtatccttgtaatgcggccagtaggtgatgtacacgatgagctgaccgacaacggcacctagcagctgggcgatgatgtacggcagcacctggccccacgggaacatgccgttgatggcctgggcgagggtcatggccgggttgatgtgcgcaccggaaacgccgccgaacatcagcaccgggaacatgacgccgaaaccgtagcccatcgcgatgttcagccagccggcgtgatagcccttggtgttcttcagctccgcattggcgacagcgccgttgccgaagaccatcagtacggcagtaccgacgaattcagcggcgagtttgataaagagtgagtattccacttcgtcttcctcttattgcttcttctcgtattgacacaagattaaattgcgattccgctctaagcggacaacagggcaagatactactcccacccatgtcttttcgatccggagaccactgatacatatgagacggcatagataaaggagcggcctgcaagaagagcggtcacgaattgaacgaagaattataggaataccgctttcgatacgacgggccgtatgatacccctaaacatccctgtacgaagaacctcttgcaccgctccgacgctggggagaagcttcgccgacgacccaatcggtttgcataggtcgatgaccgaacgtagtcggcatacaatcagtctttcactgcttttcctcacacggaaattcttgacagatagaaggaatctgtcaggaatttcatccggtacctgacgcaacctttcagctcgcgttcacaaaacaggggctcgggggagaaattgtacacatatgtaccctgagaaaggcgagagatgcgagattatctcgttggtttaggaaaaaatccgattcaacggcttcccgcaccgctcgcgattgaatcaagagagggtactatgagaacaaccaacaatcgaatacacatcccatccgctctatcggctctgattgcaacagtagcgattatggtcatgagcgtattcccctcggctctggcatatgcggatggcggctccgccccgaccgtgccggtacaagtgtcgaaggtcgacgccgacggcaccgcgctcaagggcgcacaactgcgcatctcccataaggacgccaatggcgcggacgttatcgacgccgaatggacctcagacggcaccgtgcacaccgccgacctgcccgcaggcgactacacgctcacggagaccacggcccctgaaggatacgacaaggcggccgaccagacgttcaccgtcaaggctcccgaaaatcccgccccgacggactattccttcactacacaaagctcgttgacttcgggcgcgctcgtgtcgaaggacgcctccaagacggtctcccccgtgtactgcttcaacctgcggaagtccagcccgacgaccggactggactacacgagggtcgaaggctcagctaccgcgttcagccagctcgcccagcgcgcacgccccggcaccgacctgtatcaggacgtgctgcgcgtgctgtacaacggctatccgaacaacaaagcaggtatccaacagaagtacaatctgagcgatctggagttcgcggaggcgactcagtatgcgatctggtactacaccgactcccgtccggtcgtgccgcatccctattccgacgccgttcaggccttggttgacagcacggcgaacattccttcgggacagaccctggacatctacaagacatccaacgatcaatatcaaaatctgctggctaccgaattccatcaggccaccccgccggtcagcctgatcatggtcggccagaagacccaggccccgacgccgacgccgtctcagccaacgactccgactcagccgagcactccgagcactccgagcacgccgagcacgccgtctcagccgagcacacctgcgcagaacgctccggtgaagcctctggagaagacgccgcagaagccgtccaagatgaccaccacccaaccacaggtcaagaacctgtcgaataccggcagcaacgtcaccatcctcgcgatcgtggccgtaatcgcccttgtggcaggcggagcccttgttctcgtgcgccgtcgcatgaactgaacaccatacgttcctcatccgttgtggggggtgcctgcgtacgcaggcacacccccacactgtttcaaccgtccggaatccagtcaggcggtcatgggcgttgcaaatcaccgtccccaaaaatgaggacgaaagccaacaacgacccattatccgccgatatgcccggcatcggtacctcgcatacagtgatggaacggaatttcgtctgcgaggtcaggatgcatgcatcagagggggcggtccgacgaaccgctcatcgttccacatacaattagacataagaagatcacagcagatcccgttctctcgcattatgcaaaacggtgaaaggcggtagtcatggataccattcatcagatattatcttgggccggtatgacgggaatcatcctagcggtggtgatttcggcatacctggcgttcgtccgccatgaacatacatcggatatctcggtcaggctcaacggcatactgatggcgctttccacggtcctgttcgtcgctggccggcttcatggcacatcgcagtccgccacggtgctgtggtggatcgcaatcgcattggttgccgtctcgatcgtgttgctcgtcatcgctgcttgccgtccctcgggcaacgggtcgacgacgacgctcattcggatcttattcgtcctgtacatcgtggcgatggccgtcctgctgttcagcctgctctgagggaaaagcgacatcgccaatcatcacggcgcccgtgcagatcgtcatgaggatatgttcaacgatgctcaaatcgcatgctcctttgatgggtttgtatgccgaggatggagtgttgaaggcacacatcccaaagcattccccgcaagcgtgaacaccaagagcaagccaagaccaatggaaaacaaagaaacccttggaacctaacgattccaagggttttgctgtgccccctcagggattcgaaccctggacacgctgattaagagtcagctgctctaaccaactgagctaaaggggcgttggtctggcgaggttttgttctcgctgagcacgagaagtaaatatactcagattcgaatcaaatgcaactcacggcgtgtcgcggacataaaaccgcggaattccggtgatcatcggcactttcgccatgacggataatctcgcaagtttcatggatgaaaccgcctctaccggtcccccgacttcatcaattacaatttctccacaaattaggtgttgaccctaatgagaatccccctacgccacaacggtgcagggggattcctgatgcttaagctcagacgtgcagtctgaagtcattcaccgcggtcggacactcgtccggatcgcagcgaatgggaccgaaatcactcagcgacgaccttcacgaagaaggaagcggtgatttccggatgcagagcgacggtcgccgggaagtcaccggtggtcttgatcggctcaacggtgatgttcttcgggttgacctcgaccttggaagacagcgcaatggcgatcttctcggcggagatgccaccgaacagcttgccggattcggagaccttggcagcgatttcgacggtggtaccctcgatcagttccttggcggcaacggcctcttcacgggtggcgacggccttagccagacgagcgcgcttcatggcctcgatctgagcggcggcacccttggtccaggcgaagcccaggccctgcgggagcaggtagttacgagcgtaaccagccttgacggtcacgacatcgcccgggtgacccaggttagcgacggacttggtaagaataaccttagtttcagccattgttcaaacctctctaagatcagcggccggaagtggcgtacggcagcagagccatctcgcgggcgttcttgatcgccttcgagatcttgcgctgttcctgcacggtcacaccggtgatacgacgggagcggatcttaccgcgatcggaaatgaacttgcgcagcagggcgacgtccttgtaatcgatctcggtgatcttggcagccttcagtggattcggcttcttcttaaacggcttgaccggcggctgcggcctcttgcgtgacatcttgatgttctccttacaatctgggattgcttttcagcttagaattccggttcgccgtcattgcctccgaattcggaggagctggcaccgaaagatccgaaggacgcggcggaggaatccgcgttgccccacgggtcggcagccggtgctgcggcaggtgcggcgttggcgggagcggaggccccaccctgatagcctgcgccaccggaatatccggcaccgccctggtagccgccggcgttgccgccgaagccaccattgttgttcgcatagcctccgttgttaccggtgaagccattgccgccacgattgccggcatagccactggcactggaggtacgcgtaacctgggcggttgcgtaacgcagggacgggccgatttcatcgacctgcatctcaacgacggtacgctgggaaccatcctgcgcttggtaggaacgctgctgcagacgaccctgtgcgattacgcgcatgcccttcgacaggctctgcgcacaatgctcggccatgtcgcgccacgcggagcagcgcatgaacagggcctgaccgtcttcgaactggttcgaattacggttccaggtgcgcggagtggaggcaatcgtgaagctggccacggatgcaccgttgccagtggtacggatttcaggatcagccgtgaggttacccaccacggtgataatcgtttcgcctgccatgacgttacctacttacttatgcagcttgaaaagcttgaaattacttacttgcgaagaatcttcgtgcggatgacggattcgttcaggttcagcagacgatcgagttcgtcgctggtggccggctcggcggagtagttgaccacgacgtagttgccttcggtcttgtcggcgatttcgtaggcaagcttacgacggccccagatgtcgatgttctcgacggcaccgccttccttggtgacgagttccagatactgctcggtcagcttcttcagaccacgctcatccagctcaggatcggcaatgaacatcagttcgtacttatgcgcagacatcacccacctccttcggactatcggccatggactttccatggcaggagtgtgtatgcgtactgccttcacgcatctatatataaggtataaagatacaattcagacaacctgttcagcatatcccgacacccagacgagttctttccattcactctctcggcgaaggggcccgcatccaagtccgccgtcaatcaaaaagccccgccgcatgggcgaggctccatcatacgaatcgcacattcacgcagatcacgcatagatattgcgcgggcgcatatcatcaggcaatccattgagcaacgtggaaaccgaaccggactcgaacacggaacggatgccggcggccagcaatggcgcggcagacagtacggtcatgttcggcagacgcttctcttccggaaccggcacggtgtccgtaagcacgatttccctggcaccgcaatcgcgcaggcgttccacggccgggccggaaagcaggccgtgcgtagcaaccaaggtcaccgacttcgcgccggcttcgcgcagggtgcgcacggcctcgcagatggtgccggcggtgtcgatgatgtcatcgacgaccacgcattcgcgcccttcgacctctccgatgatgccgtgcgccaccgcatgattaggacgcgtggtgtcgcgggtcttgtggatgaatgcgagcggcaggccgccgagcttggcggcccactgttcggaaaccttgatgcggccggcatccggggacacgatggtggtgttttccaatggcatgttgttacgcacgtagtcgagcagcaccggcatggcggtgagatggtcgaccggaccgtcgaagaaaccctgttcctgggcggcatgcaggtcgaccgtcatgatgcggtcagcgccagcggcctggaacaggtcaaagataagccgtgcggtgatgggttcgcgcccctgatgcttcttgtcctgacgagagtaaccgaggaacggcgcgaccacggtgatggaacgggcggaagcgcgcttcagcgcatcgaccatgatgagctgttccataatccacttattgatcggcacggtgtgcgcctgcatcacgaacacgtcggcgccgcgcaccggctcggtgtagcgcacgtacatctccccattggcgaaatcgtatgaggtggtctcgagcacatgggtgccaaggtacttcgcggtttcctcggcttgttcggggtacgcacgacccgtcaccaacgccagttttttatccggggtgccttcgagaatcgccgacatgcttcgccttccaatatacaggtgcgtgaaattaagccaaactcaaatataacaatgcgggtgcccacgccgcgcggaaacgattcggcccgtcacgcggtcttcaaagatacggatgccgtgagggtgaatcacttgcgatcgtcacccggctcaagaagagaagatgcctcaccgcaagaacgtcatatcgtctcaggaagatacgggtcggatgtgcactcaggttgcgcacagtcacacaaaagatccctgatactgcgatgacggccatccttccgtccggattggaccgcgcacgatcggataaaaaagaccttttcgaagataatgcgttcagattccgtgcagcatggactcaattcacgtctcagacgacttatccatacccccttacctcacgattgccttcagtatgcggcctcatggagtcattgaggggaacatgaaaagcacgatttgccaaaacagccgtcttgacaaatcgtgcttgcacatccaatttcaccgaaccgcaccgccgctatgccggccgtctcggactctactcggcgaatgcctcgcgaatctgcgcggcattgccataagaagcctgcgcaccgtaacccgtggccgcataggcggacacgtacgcggcaagttgcgcggactcggacagcgacatgccggaggcgagaccggccagcacggtacccatgaaggaatcgccgcaaccggtggtgtcgacggccttcacgcgaaccggcgcaatgcgctgaatcggctcttccgcagtagcgtcgagcaccacggaaccgtcgcctcccaacgtcacgatcgcctgatcaaaaccgaacgaccgcatttcgtccaaaacatggccccagtcgaaagcgtcccagtcatcatcctcaggctcgtcaatgccgagcaactgcgccatctcatgctcattgacgagcaggatgtcggaggctgccaccagttccgcaggcaacgacggcgtgaacggcgaatcgttgagcagcaccttcacacccgcctcatggcagatgcgcgcggcggcggtcaccgtctcgatcggactttcgaggcacaagccgagcacggaagaacgcaccagcgcctcacgtacggattccacataatccacggtcacctgtgcgttggagcccggagaatacacgatggtgttctcgccggccgcgtccacggtgatcactgtggttccgctcggaccgagcacgcggcgcacatgcgtggtgttcacaccggcctcggccagagcgccgagtaggaattcggcattgctgtcggagccaaccgcgccgaacatctgcacggtggcgccgattcgcgcggccgcagcggcctgattgcctgatttaccacccggcagcagctgtaacgggccaccggtgatggtctcccccggccccggcagtcgttgcgcggtaacggtgtagtccgcgttcatggagccgatcaccgacaccgtgccgtgaattcgatccaatgcagagagcacttcgatcgcgcccatccttgtctccttaagatgttgtgttccgatgattgtcagttatcgaagattcagattaccggcgggcggttcattcatccgtaccgcccaccgtccgtgaaacattccgtgaaacttaccgttcggcctgtccggcctgtccggcctattcggcttttccggcctgttcggtttccagcgcatgattgccttcgtagatcttcttcttgaacacgaagaacacgatcaggcccagcaacgcggtgacggaaccgataagcagcagattggagaagcctgcggcatcgccggtggtgccgacgatggaggagccggccatcgcgttggagccgagcaggctgccgatgatggcgatgccgatggacggcgagacgttcatggccagatcgttcatgcccacgccacggccggactcatccttttcgatggtgcccagcacggtggagacgaccggcgagtacatcagaccgcagccggcgtagaacacgcaggcgaacagggtgagcaccaggaagccggaattcacgcagaacgcggcacccgtccatccgacgaacatcagcgtaccggcggtcacaagtcccgccctgatgccgatcttaccgacgatgagtccggagcaagtgcccacgatggcggcgaccacgtacgcccacacgatgtacagcgacacctgcgtggtggtcataccgtacagcttggtgccgatggcgttgaagatgggcgacagtgcgtagttcacgaagtagaacacgaggatcaggctgatcgcgcgcagccagcgggtgttcttgaagaacgccggggtaatgaacgggttggaggccttgttgatgtacacgccgaacgccgcgtacaacagtacggacaccacgagcatccaccatgccatgtacgagaagaacagggtcaggaacgcggttgcgaagccgaagatcacgaagccgagcgcgtcgaccttctggccgttgccgctcttggccggcaaggtcttgagcaggatcggcaggaacaggatggtcaccgccggaatcaggaacagatactgccatgcgatggagctcaacatacctgccgcaaacacgccgatggatgcggacagctgatatgcggcggtgaacaggccgaagaaaatcaccttcagatcattgcgcagatatttggtcgcgaccaccaggaaggcggagcccgccacctgttcgccggcggtctgcagcactcgtgcgatgatgacggtccacagattagcggcaaagaagaagttggcgacgaagccgaacagcgatcccacgaacagggtgataagaccgaccgtcacgaggcgacgcagggagacgaagtcacccagagaaccgtagatgaagcacacgatgccaagcacgatgctcgggaacgcggtgatcagggaagcttggttcggcgcacccacatcggcgccgacctgctggaacacaaggttgaagccctgcaggcacagggtgccgagtacgaaggtgatgagcagcggaatcagggcacggatggccatcttgttgctggtgaccggatcgtcgaacggatcggcggatacgtttgcattgttatgagtcatatgattgactactttcaaatttcacattcaatagggaaacggaacgcgcaatctagggcgcgcaaccttatttcgcgcccttggcaagcccggaaatacgcgtcatgaactcgttcaggaacctcggcacatccacgcccacggccaccttcatggtcttgttcgcatcgttgagtctggtttcgtcgccgatggtgcggccacgggtcgggccgtccacatcgaccttcatgttgatgtcgagcatggtcacgagcgtcggatcgaccgccacgcccacggcgagcggatcatgcaggccacaaccgccaagatgcggtgcggtggtctcgtaggccttgatgtagtagtcggtcatgtcggccaggaacgtaccggccttggtgccgagctcacgccactgctgggtttccttgtaggtgagcagggtttgcagggttacgtcgaggccgatcatggtcacgggtgcgccggaacggaacagacggtcggccgcatctggatcctgtgaaatattggcttcggtccacgcgttcacgttgcccggaacggtcagagcaccgcccataagaacgatttcgccgatttcatccttgatttccggcgccttgtcgagtgcggccgcgatgttggtcatcggaccggtcggtacgtagacgaggtccttgccgtacgttttgacggcgtcgatgatgaagtcgactgcggattcggtttcgacggagcggttggagtcgggaatggtcacgtcgccgatgccgttttcgccgtggatgaacgcagagatcggcagtacgtcgaaatggtcggtggtgctggagtgcggcagtccttggtagaccttgacttccggatgtccgagcaggtcggttacggccagagcgttgcgcacaccctgttcgacgagcacgttgccgtaggtgccggtgatgccgatgagttcgatctccgggcttcccaaggcgtaggagatggccagagcgtcgtcaacaccggtatccaaatccagaatcagttttttcatggttatgcctttcctcattgacggactgacgacggtccgccaccacacgtcccattgtcgtcagctttattgcacaaaaaagcagcgagtacattctcgatttgctgttggattcatgataaagcgttttatcaagagagtcaaaacactcacccatctgcgtgtcgctgtttgtcccaccgctggaaccagcctcatccgtcacgacttcggcgtcgacgcctacaggatggcgcaatccgccggaaggaaggagctatgcgtctaggcgcaggcggcctgaaccagtttcggagtgagcagctggactcgcggatggcgcagccaagggcgttcgcctccgtcttcagcactcacggagtcggaatcattcccgtcttttgcgccggtgcggccaatcgcggcgtcgatgcggacggagagcatccgccaacaggcttccgccagatcggtgacgctttgctcgacggtggtcatgtgcaggccaaggccgaatctcttgaggatattgtcgtagccgatcacctgcatgtcctgcgtcacctgcagtccacgctcggcaaggcgctggcggaatcccaaggccatcacatcgttgcagcagaacaccgccgtggcaccgccgtcgataattcgatcggcagcatgatatccgctgtcgaaacggtagtcacccgcaacgcacagtgcgggatcgaaacgctcccccgcctgttcgatggcatccacgaaaccacgtttgcggtcaagtgcactcgattccgcgacatcgcccgtcacgatgccgatatgacggtgcccgccttccaacagataccgtgcggcgagacggccgcccacatagttgtcgaatccgacggcatcgcaccagccgttctgtacgaggcggtcgatgagcaccaccggacaggccacctgctccacgtcggctcgcagctcatcttcggcggcgcaggactcgcgcgcgggaatcagcatcatgccatcgacacctcgggaggcgagtcggaccatcagatcatgttcggtggcacgcgaatcgtcggaattggccacaatcaacgaatagccttgtgcggcgcactcatcttccacgcatttcgacagtgcggcgaaaaacaggttttcgatgtcgggcacgatcagcgccacgagtttcgactgtttggtcaccaggctgcgcgcactctggttaggcacgtaatgcagttctttggccgccttggcgataagctcgcgcttctccttcgacacgcgtgccggacgtccgttaagcaccagcgacacggtggtcaccgacactcccgccgcccgcgccacgtctttcagcgttgcacgccgtgccatacagcccccttagaacatcgttccttctagcataaaatcatcgcggaccacaacgcgctgtgccgatattcacttgcgcaccgtgcgtcggcacggcaccgtaccgatcgggcacggcggcccgtagcgccacccgaaccatgcaaatctcttcgcgaagtcacatgccgcaactattcctctcacagaggaaaaacacgaagtcattttctcagtaagcgattttctcatggattttttgtagactcgtcaagtctcgttgaaattcacaagcaacaagatagagggaaagaaactgtgaagatcgaaaaaagcaatgccaaatcaaggcgcgtgattgccgcaatcgccatagtggcggttatcgcgatcatattaaccgtcgccgtgaccatcatcatcggcaatcagcgagaactgacgcaagccgccagcgacacctgcaagttgaacgcgaagacgctgaccgtgcatcaagacagcttcaaagaggcgcagtccgaagccgaacaagccgcaaaactgacggtcgacgatgttgcgaacggttccacattggaaacgctcaaggatgcgatgaagcttgctgacgccgtcgacgatgcgccgacctgcccagccaagggcaatgcggatgacttcaccaaggccaccaacgacatcaaagactacgccgacaacctgcgcaatatcaccaatgagcttgattccgcggtcaaggccgttctcgcctcgcaggaaatgaagctcgattccgccaaatagccgaatccgccatcgacggcctcttccgaccgcagtcgccctgtcgaggccgaacggcccggaagatggcccgataggttgtgtcaattgttgttggtggcattaaaggccgtgccgcatgccccaacagtatcagtaacaccttcaaagaaagctaactacttgcctacgcagaccaatgccacacagcagacacccggcagacttctcccaataacttaaacctgcctaggctctgcggctagagccagtcgtcgcaacgattccttggcacgattatgacgagttcagtactaacgttgattaacacaaaggcgtatgatcactttcggggttcacaggacggtttttcatagtcaacacctgtttcggcccagcccatcggagattgatcaagtttcaaatcttctttcgtcttgggagacgtagtgacatcgaaatcgagcgtagcgttctgtccatatgcgatattcagcacagtatgtgtcatactatgcttgttcaacgtgccagttaatggagcgtcagcttgtgcagtaccgccgatagtgaggttagatatgtttccacctgcaggcgcataaagcagcactttatcgagcacacggccgcggaaatcacctatgccaagaatataggaagacgcgttggcgtaatcctcgtacggaagcgcattctgcagatgcatggttacatgataggttcgtgaaccatcctcgttgcatccggtacgagtaattgaggtctgccgtttcaaataccaatccatcttcgaagcgttaagttcgttgaaatacacaccaacttcaggcttctcttcatcagaaggcacactcttggaaagacctagatcggcgaatgccttaccctcatcatcgtgaaaactagtgaaataaaaatgccgaccttcagccattggtgaaatcatttttacaatggacagcagtttctttgcagtcattcctcggaacgtggaccccattacctgtgaagccacgtactgaaagtattgatcctgataagagacatagatgtctttgtaaataccattcaataggaattcagccgtattatcgccggtcaataggggaccatcgggaacctgcacactgccattcagcttcactagttcttggataaacactggatcaaaagacataaccccatccacgttgctagaatggctggagcgttgccatatagtagccatattctttgctacgccattgaagtccgggtctacctcttgatcacgaaggtcgaatgtaaaggtaaataaatccctcatcgactgggagcatacgctaattccttcgaattcggtatttggatagaagtcacctatctgaatggaaccgttattcgtggtcatactgcccagagagccgcctaagccaccggaagaacgtacttcagaggtggtggttgcgtaaatcagatatgtcctgccaccatcttgccctagaaagtctggcagaatagagagcgcctcactaccttgacccaatttatcggcaatattggagacttggtccaaggcttggttgtatgcatttttcaccacaccggtgtgtggagtcggcaagtccttcatcttcttgcactgctgctgaacctgcgtattcgcctcattcacggcatccttcaaatccagtatcggttgcatgttaatctgactatcatcggcactcaaatcagaactcatcaccgtaatcaacgtatcggaaatcttcggcaacgtcttcgaagcgaggtcatccgccacttccgtcatgccctgcacggcgcgaatgtcatcaccatacaccggcaccatggccgctaacttccacaggccgccatgcgcgatggcacgagcggcgctggtgtgctgctgcatcggtttgatgatcttcggcaatgtggccgggtccatcgtattcgtaatatctttgacctgcttcaccgtttccacggcggccatctcgtggtctttgacctgcagtgcctgcttgtagagcctataaccggccacaccaagtgccgcacctagtgcgacaagcagcacaagggcccccagcagtacccatggcctcttcttacgctggttagatcgtttcgtggcatggattgcattatgtttcataatcaacgactccgattcgtctacttgcaatctttcatgcggctagaattccttgttccaaaagccgttaataacacctactaccatgtgacattacgcttacgctactgcttgaaacaacgatatccgctattgaagaccaagttctccacatagccccatgccgaggaaattgggtcacttcatcagaaacagccatttagcggcaagggggtatcgagacgccaaccataccactgcgtacgagatgataaacgcaacagccatgatgcacgcatacagcgcccatccatgcaccggcagtggcgcatacttcatgaacagcactatagggtaatgcaacacatacatgccatacgaacatacggccacactgcgcacaggccggtacagggcattcggaatacgcctaccgcgcaacgcccgtaccacggcaaggaacagcatgcacccacccaacaccaccggcatgaacgccagactggactggaaaccgtctgcatgcagattcgaccatgcggcggaaacgcacaataccgcgagcgccgccaccatacccgcatacaccgcaaccggtgcggttcgcatgccgaagccttgacgcaccatgtagccgaacaccatatagaacaggaatcgcggttccgtaatgccgaacatatccaaagcgctgacgacccggaacgcattgccttgcaatgccatgatctgattcacgctcggcaacaccgagtagcacacgaacaggcaggccagtaccgcataggcatacggttccaggccgcgttcccgaacggcgtgcagcagcaacgccagcaacggtactagcaggtacgcgcctacgatggcctgcatgtaccagagatggcccattggcgcaggtcctatgaacagcgccgatttcacatagtcggcaacggtcacgccgcccgcgccaatgtattgcactatcgcgagcgcaagatcgaatatctcatatgagacgaccagcggcagcagattgcgtttgaagaagatgagggtccgttctttcgtatagtcacggtccaacagcaggtagccgctgatcatcaggaacagcggcacgcccaacgtggacagtcctatggcgcaggaggcggcgatctggttgccggtaagaccggacaggtcttggccgttgacctgcgcaatggcggcgcgtagcgaatggatgctcagtacgcagagcaaggccagcgtgcgcagcacgtcgatgctttgcacccgactcgtctcgttcgcagccattcaagctccttcatgcaacttcacggtcatgatttacgatagcgtagtgaccattcaacagcatgaccagcttccgcagttctccctgcttatgtcagtgtatgccaatgattcgctgccgcaggtcgagagggcgattgcctccgccacggtcgagcagtcgctgccgcctacgcagatcgtgatcatacgggatggccgggtgccggatgatatcgcgcgattcctgcaggaattgcccgaaaccgttgccgattggttcagccgttccgttgtctcctcgaggcctcgccctgaagtgaccgtggtgccgctggaagtcaatcagggtcttgcgcatgcgttgaacgaaggtttgcggcgctgccgttacgatgtggtggcccgtgccgatagcgatgacatctccttgcctgaacgtttcgctacgatgatgccgttgttcgccgccgaccgtgcgccggccatcgatattgccggcagtgccattcaggagttcaccggcgaagaaaatcgtaacggtcaggtgcgtacgctcccccgtgagggtgcggaactggaacgtttcgcccgcatgcagtcgccattgcaccacccgagtgtggtgttccgcaagtccgtggtgctggccgccggcggatatccggagcatgtcggccgtttcgaggattacatgctgtgggagcaactcatgctgcgccatgctcgcttctacaacgtaccggaggcgttggtgctgtaccgcgtggacgccggcgcataccagcgtcgtggcggtttgggcatgttccgtgacgaattgcaattgcagttgaagttcctgcatgacggtttcgtgagtcttccgcagttcctgcgcaatgtgctggtgcgagccgtctaccggctgctgccgaccggtttcagaaaatcctgctatcacctgctggtcgccgtacgcaacaggttgaccggtgatcgcaagtagacttctggaatgttcagccttcgattgccgtgatgcgccgcgcgatccgcggcacgtcggcgaagagttcggcgttggtttgcggatcggtatgccaaccgtcatgccagccgcgtttgaagcagtcgacgattacctccctgctgccggaacgcagataggtgagcgcccagcgacggacggttttcagcaggaattcggtgagttccgccgccgtgaagttgctgcgggacaggcggaacagccatagtttgttgcgcacctcattgtagaagcgttggcccggatcggcgtcgctggaaccgaacaccttggtcttgtgcaccacctcactggcgggcacgtagtagccgatgccatgcttgagcagggccgtggtgaattcgaagtcgtcattccacagaaaataggcgctgcgtggcagcttgttgagtcccacgatcgcaccggcgttgatcaggcaggagacgaacgacagcgaacgtgcctggtaggcgccctcccccgccatgccgtcaagcgtcttcgcgcccttgcgcacccatgtgcgcggccgcggcttgttcatcaggtgctcacggccgtcgacccacagcgctttggacccaagtatggtgggtagggcgtgattcacgtccagtgactcctgagccgcttggagcagcttctccagtgcggtgggcgtcggtatggtgtcatcgtccatgatccacacgtagtgggcggtgccatgatcggcggcgacggctttcgggtcgaccgcttcggccatgcccgcgcagaatccgccggctccgccgacattatgcggcagggcaatcacatcggcgtcgatcggatgttcgcgcgccacttggagcgcatggtcggtgctggcgttgtcgaccacgatcacgcggtcggccggacgggtctggaccgcaaggccgtcaagacattcgcccagcaattgttcacggttataagacaccaccacggcggtaacgttgaatcgcatgggttacgaacttctctatcggtttattgagcactttgaggatagtcgatttttggattgaaggaccatgcctccagcatcttcttgtacattttacggcgcaacggtccagctacgttgccgcgaagcatggtacggcatacggttgcgcaaaatatcagatacttgacaatgccttcgtgatgtagatggtacgaagcctcgttacgtatgccgtatgagaacttccattcattcttttcgttgatcatggtgaaattgacacctttattggcacccatatcatgcagtaccacactgctgagtacctgtacgcccgggcaggcacgcgtgatacgtagagtgtactccgcatcgtcaaaccaaataaaatattccttataaggcaggccgaagttctccatgacccagcgtggaatcagtacggaaacgaatgagcatctagtcaccatgatcaaatcgagtcctttggctttcagacgcccccagtcccacgtaggaatcggattattcatctcagaaatggcgccatcgatatatttcaccatggagcaagcgaacggtacatctgggccaagctcagagactgctttatcatagccttcgatgagtttttccaaagcgctcggttctggataaccgtcatcgtcgaagatccacgcaaaatccgcacccagctcataagcacgacgcatgcctgcggaaaaaccacccgcaccaccttcattcttctctaaggtaacgatatcgagctgcacaacatcggcaagcgagaacgaccttgcatactcctgcagataatccgcggtaccatcggtcgcagcattgttgacaatgatgagttgtgtgggtagttgagtctgcatctcgagggaagacagaactgtcttcagcttgtcgagtcggttataggtaacgacgacagccgccactttccttgcttctgtcattggtcgtgccactccttcagcatcttcttgaagtatgcatctgcggattccatctgtgagaatttttgtagccgtgcaagctcattctcccacagtttcctacgattctcttcgttattgacgatatgggacagtatggatttcgtatcgcgtacaaattgcgaagtcatgcgacggcacagtccctgaggcggaatcagcgtttcctgtgaacccacatttgcggaaagaactggtatgccagcacagattgcctcaatgctggtgagagtaatgccttcattgacagatgaaatcagcaacgcatcggtctcctgataggtctgggccacaggtacgctcatgtctcgacgctccactacattttccaaaccgtagcgtttcaatagtctgcccgcaaaagcatccatattaccgttgccctgcataatgaaacggaattcttctggataagcgtcattcaccgcttttgcagcgaggatgaacgcgtctggcctcttctgtcgaaccacacgtcctacataggtgacagtaaatggcttggacttatctctgctcttaaacttcggtttctttgcatctgttgtcagacctatcaaaggtgcatccaccacttttgcaggggcaatctgatggtaatcgaccatccaatgcttaagttgaggggagataacatgatgaaggtcaatccactcgtcatgggccacggattctttcggataaccaccatggaagtagtattccacgatgtgcagagagtcgattacttgagtttgtggaaaatgtgacttaacccaccaaagattgtcgtacatccattggcaatgatgaatcagaatgcctggaatattaaattgctcgaagagagcacgcaacaacggggaatcaccaggacgttcctgtaatggtagagtcatcggcaataaaagcgcatcatcaaatacaggattggtaatccatggttgatgcccatcacgatcggtaatgatgatgggcaggaaccccgcctctttcaccaattttacagtttccaatgcccaacgttcggcaccgcctgcttggaaccagtgcatggcgattatgattgcccgaggtgcgttcgtggcggcacaaccggatacgatctctacccaagggtgcacgttgtcagcactttcattgacgacttctgcggcacgagaaagcaccttgtcgataggctttctgccaatctgctcacgccatacacgttcgctctcacggaatatgtcgaagcaattcggggctgcttcttcaagagatttatatagttttactattttacggtcttcaggacgatttaattccacatccttgtccgtagcctcgtccggagtgagcagaatataacgcacaccacgatccacaacctgtcgattgtcactatcaaaatagtgaggcgaaaactccgtctgtgcctgcgaagtggaagtcgcctcaaccgtcatgaatggattcagatccgcctgttcagtgagcataccgtccaatgtggtgagatcggtaagcctgggatactgccacttctcccccatgtacagcttatatacgagcttccgcccgggctgaatcaatgagttgtagtccatcgcgccatagaccaaccggcgaaggcgctcacttaatcgctgaagtttccaatcatcttcaagttccacacggaaaaaatgtcgcatacgcaaaatcatatctgatatatctagggggaaacaaattactcgtatttatgagcgtttccactcaaggcagcaaagatccactggcttcacgtctctcatacacaatccggcacctattgaacctctaatcagcatagatacgcgtacagcgatcgcgcaacgttataagaccatacgaagctgcacaaatcatcaccggaagaaactgaatcaagtactttgaccgtccggattcgaacaacatcagaaatgcaacagcgcccagaatcgagaacagcaaccagaatcgtacgaggttgccgccactttcttgaagtggctcgcgtatattcctcacaatgagagaaatcacgccaactaccattagtatgaagaagcattgctcaaagaggtaaacattgacatagcgtacaccagtcggcgtgtagagggctcgaaggccccgagccagtattgttttctggtatcgggaaagtaccccggtttgattggattccaaataattgaacatggaatcccagttgccaaacgagaacgtaccgtctgaaaaagtataattagccttcctagcgagaaattcagcgtaacccacaggcccataatcggagagacgttttttgatttgttcggcggaatatcgactcttctctgccttggttgggtatttagaaaccgccaaccgttcttcaagactgaacccaccatgatcccgcatacccatcaccatgaaatgcgacacagggtatgattcgtctggattgtagttgagtttcatgtggttatgtattgccagactgaatatcggtaccgtaatcgccatcccaacaatgcatgcaacaacgcatatcgccccatgacgatatgttttgagggaaataaaccgatatcctaatacaattaacaggcagagcgtgggaataacgcttgacgccttcatctgatagcccagataagtaagcactcctaacaggagcatgagtcccatagccttaagatgaggccctttgagaaccgtctcttcacccgtttcatgcagcatggtcaaaccaatagctaaagctccgacggaaaatggtagcgacaggatgtccgtgtatacgaggattgtgtatcccgagaatccgaaaaggaacatgaataacagcagcgctgtatccgccagtccggtggaaaaacgcttcaggcttccccataagccgataaagcaagagtccagtacaatgatgttcagaaactgcatagctagtgtcgcactgttcgccggccaattccccggaataaggtttctgactgtccaatatatgtaggcgatgaacacattgttcgggcaataggacaggtagtccgagtatttctgaggatcctcagtcgcgatacgaatactctcctgatcggcccccatcgacaccgcgccgaaggaaagccaaatcattaactgaaggaacaccatcagaccgaagatgaaccatttcctactccgaatgaaccgaaacatcttcactacagccgctctgcatcgttccgacagtagcattgccgtacccagtgccaaagcagtgatgatgacgagcagtgtaagccaagttcccttttccagtgaagtcagtacatccgtaaagactttatccgtcaaagctccatacaaccaccacagcgagaaagccatcagaattaccagcacagttttatgcagccacctagcaactatgctatcgtgagtactgtctttcaccattcccatcacggccctctttcacttcactaaaagcatccatttgcgcaacggtctaatcatgtacaacaagcgtgcaatgacaagtgcgccgaaaaaacatagcaaataaatcgcgataaaccggagcatttggttgccaccaaatagtgatatcagatacttcatacagattttttgcacttggaaatgcagcatatatatggcgaacgaataacgggaaatccaattcgtaatgcggattgccggattgttctcattcattgcgccacgaataagtttttcaagtagcgtaaacaatgagaccgagcaaactactaaaaaaatgttggcgtaatagggatcccaatcaataccttgcagaagagcccaccaatggaacgtagtcaaagcaacggcagaggtgactgcagccacgcacgccgcccatgtagggattctgccaaatacctttgcttttacacaatagccgaggagcaaatatacaatccataccgaatctccccagacatccgccccaaaaatattgagattcaatacgctttccaccgcatattctcgatggaaaacgttcaacaattcactgatggtagggataatggtgccgaagtaaatggctgccgtcagaagcaaccagccatattctctgactcgctgctcacaaatccaagcgattagatgagaaacgattggcagaccgagatagataccgatgatcatgggtaagaaccagagtccgcttcctgtttgtccgcagaacagtgctacacacaatgtagtccatttagggattacgttgacaccgataatccagctaaacacgctccagatgatgttccacagctccgcagctacaaacaatgtcagcaggttcttcacgaggaattttttagtatatgccgcgtcatattttcggtcgaccatcagatatccagtcaacataacaaataaaggcacaccaagagtaccgaaaacattgccaatcagttgcggcattccagacagcacatcggaagatacgtgttcacaaacaaccgaaacgatggctaggctacgaatgacgtccaaagacctatttcgtttacgtgcctcggcaaccatctacagctcacctcattattctttctcaattgcaccacatgcagtatatcgagcaccaagtatgttccacgatatcaagcagtcacaagtgtttcgctgtttcacagacgaagaacctcttcgactaagctctgattggccaattagtgggttatccttgatagagttatgaatgttatagcggagagaccaatatgagcaacaatgttttaattagtcttgttgtgccttgttacaatgaggaggagtccctgccacttttctacagcgaaacctgtaaagtcgctgacacacttagacaagatttcaaagcagaaatcgagttcatttttgtcgatgatggctcaaaagacaacacactctctaaattacgtggttttcgtcataaagacagtcgggtacactatgtttcattcgcacgtaacttcggaaaagaatcagcactatatgccgggttgaagactgcaaccggcgactacatcgcaactttggatgccgatctacaggatccgccgaatcttctaccggagatgctacgttatctgcgaggtcatccagactacgactgcgttgccactcggcgcgctacccgtaaaggcgaaccgccaattcgtagccttttcgcgaagctcttctatcgagtcatcaacaagattgccgagactgaaattgtcgatggcgcacgtgactaccgctttatgtcacgcaaattcgtagatgcggtactctccttaaacgaggtgaatcgcttctccaaaggcatcttctcgtgggtgggatttaagacgcactggatttcttacgaaaacgtggagcgagccgccggcaaaaccaagtggaatttttggtcgctatttagatattcgattgagggcattgttggattctctactgcacctttggtattcgcatcatttattggcgtaatctgttgtttattcgcctttatcggcatcatcttcgtaatagtccgagccgcgatgttcggagatcccgtagccggttggccgagcatggtatgtgtgattctacttgttggaggattgcagctattatgcttgggaattctcggggagtatctcgccaaaatgtatatggagacgaagcatcgtccgctatacactatttccgaaactgaaacaaccataccctcgaaatccgtcggcgaagcccaccttgacggaatcaggaaggaatcatgaactctcccaccgcagctcctcgtgtcttcattgtgctcccctgctataacgaagaggagtgccttccccataccgctgaggtattgaaagataaaatgtctgcactctgcctgcagaagatgatcgctgaagacagccgcattcttttcgtagatgatggttcagaagacagcacttggcatgttatcgaagctatgcataaaaccaatcaactcttgtttggtggtgtaaagttagctcacaatcgtggacatcagcaggcattatacgcaggcctcatggaggcactacggtcaggatgtgatgctgcaatctccatggatgctgatttacaggatgacgtgaatgcaatcgatgaaatgatccgcaaattcacaaatgagcattgcgaaatcgtatatggtgtccgttcttcacgtgaatcggacacttggttcaaacgtaatactgctcaaatgttctaccgcgtatcagagtggatgggcactgaaaccgtctacaaccacgccgattacagactaatggggaacagggccctcaaggcgcttgcggagtacagcgaagttaatctgtttctccgtggcgtggtgccatctatcgggttcaaaaccgacaaagtgtattatgcgcgaggcgtccgtgaggtcggtgaatccaagtacccgtttaagaagatgattgcttttgccgtcgacggtattacttccttttctactaagccattgaaattcgttaccatagctggtcttatttcgaccttaataggtctcattatgctcatatacgccatcgcgtcggtgttcggaagccacgccgttgtcggctggggctcgctaatgtgttctctctggttgattgggggcatgctcatgctgtccctcggcatcgtgggcgaatatgtcggcaaaatatatctagagtctaaacaccgtccgcgcttctttgtggaaaaacgaatctaatcaactttgctttcgttgcccgacgatggaatgaagcccgtacgctgcatacggaatcagcagaacgaagtagggcaaaatatagtcggattttgcttcccaaatcgtgtggaaggcaaaccctcccatcataatgatcaatggaaggactttttggtaatcccaacgtttacgcatccgaacgaaacatacgcatactgccacatagattactgactgcaacacatcacaccacactacgtaaacggtatgaagatgaccgctctgcagactgttacgcaccaagttaccgcttttgagtgcagcgtccgtatcaatgttgctgaacacaatccataatgattgaaaggttggttcagtccactgggtcagttccttctgggcgaaaaaagatgccgcatacctcggatctttcaaaaaaactgtaactctattccgaatcgtattcacggccatactgttcatcttctcgggattgccctcggcttgtgcatacgtctcattgggatactcattgaaccagccatccgcccgggtactactttggagacccatggcgatccagactgttttcggttgggccttatcgaaagtaacaccagttttcgatgaaatcacagccagaggagcaaaactcgcagcacaatacacgacggctgtcacaatcaccagaacagcattgaagccggattttctgacgatagccatcaccaaccacaataattcgaaacccatcagaaaaattagactgttgcttttcatccacaatgctaagaatatactaatgacaaaacagccccccagaataatctttgtacggagttctttcatttccatgcaaacaagttgtaaccaacagcacagtaaacaaaatgctgccgatggaatgttgccatatatgaaattcgagaacaaagataagggaaggaaaaacaatgccaaatatccactgtacgcgactgtcggtctatctctaaacaatacttttgcaatcgcaggaatcatcatcacacaaaacgcagcaaaaaatgagttaataattcgtaccgcaaaccagttttccactccgaatatcgaatacagcaatgcaagatatagaatatagccgctttggaatggatactgctgaatatacacgtcattaaatgagtttatgtcattttgaatgagtttaaccgcataatgcgatgcgataccttgatcagcctgcggagggagatcggcaacaaagctccagacgatgccgacaactagagaaaccatgaagaccaaccacaacggcaactccgtaactgaccaatgcagtacacgatgggacatcacaaacacgataaaagcaacaattgttaatactgaggagaccagcgcatatcgttcgctcaaaatagggaactcaatatacgataatggaaacacataagtaaatatcaatgaagctattgccaaggcaccgaccaaaatcccccccaaatagccgatgattcgtgcccctaaaaaggatctactgttagcgtaatccatacttactccactattcttataaacatgccatagagcacgctgcccatattcaattgaatcaatcatgatatcaataattaagcactagctagataagaagctccaacgattacttaagtttacccacatacggtcaaataattcccccttatgtctatctacagtcatcataaacaacagtgctcgtactaagtcgactagtaaagccacaatgaaaataactgcggctataactagcacatacaggcaaatggcgatacaagaatgcgaattatagtagtctgttaaatcgaaccatcgtttccatagcaggtcacgtacgtacgggtgatctgtaatcaagtacacaccaaaagtggatgatgcaattttattaacgattcggctacgaaaatgcatcctctggaacaatatgaacaggctgaagctaactgccaatgtgggtaatccccattctctctccaacgcaaaaaggaattcagcagtcagacctatattgtcttggaaaaccatgggaatcataacattccaaactataattacgatgactgaaagcgccattgccaaccacgcagtacgcgtgttcacgggttccatataccatttatggtaagagacgagcacgatgatatacataaaacccgttatattaagcccaacatcaagagctgctcccggaatgagattcagcactccccagagaaacgtcatcgtcatggcgcactgggcatgatatttcctcccgattcctcgcaacccttgcagtatgaaaggcagcagaagcagcagcaccgcatagctggaggcataccaccatagacctctgactaacgggaaaatagcactaagccatgtatcggccgtcacattcccggattcagaaactagttcaacggtgaatatggcgatactccagaatagtagctccctctccagtatccagaccttccggcaagaggccatcaacgtcggaaccttatccacgaggaaccatgacgagatgaggaagaacaacgcgacaccaactttaccaggagtgtacaaaggcaattgtagaagtattcttcgcactgacaatggttgactcaaaaggacgaaagcattgtggtatacggaatggtgaagaacgatgaagaacatcgccacaatgcgcagaagctcaatgcctgactctcgttctttacgtactatgaacactgccaatccttaataacgtacattttcattgctctctactggtccagattacccatcactccgtatagaaccaattctgtcattacatcggctacacaatgattcaaatctctgactcggaacaccattgaacaatccgcaccgactatggcgtttcaaggtatgctctgatacaaacaaatggctggcgaaggtaaaaggaacctatatgaaccgaaagaggctgattccaggagtaatcgcggccgtactcacgactataataattatagcgattatcgtaggctgtatgccgaggtgggggaatggctctgcgatgccttcggcgaaggataccgctcaatcttcatccgcgacttcccaagcacagcgcatatccgtgaccctgccgtcatactatgccgaaaacatggtcttccaacgtggcaagccactggtcatccaaggcaccgccaccgctgcaaacgatgactccggcagcgatgccatcgaccaatccaaactgtccgcaacgctcacgcaaggcaagacgaccgtctccgcagccgtgaccgtcaggaacagcggggcgttcacttgcacgatgaaatcgttgcagggcgggctcaaaccataccgtctcaccatcgcatacaacggcgagaccgtgttcagcctggcgaaagtgtatgtgggagacgtgttcgtagcggccggacagtcgaatatggaactcaactacacgcagtactactcctccggcggcgacaccaactggaattggggcggcggactcatctcgcgcaacgatctgccgaaactgctcaccgataagaacgtgcatttcgtggtggccgagcatagcgtcgacaacaccgacttcccgctgatcgacgccaacaagacctccggctggcttactgcggatagcaccaattcgcaacatctcagttacctggcacagcagttcgcaatgcagttgcgcgccaaaagaaccaacataccgatcggcatcatccagacctcatggggtggtaccgcaatcagccgccacgtacagggcggcgacatctacgcgaaccacatcgcgccgctgaccggcttccgcgtggcggccgtgctgtggtatcaaggctgcgacgacgctgcggcgctcagcacctccctggactacgaatcgcagatgaccgcgctgatcaaccagtatcgcaaagtgttcgacgaaagcaccctgcccttcctgtatgtgcaacttgcgcgatggtcaggctatcaatacacgcagaacgtgcgtcaggggcagttgcgtacgcttgacaacgcgaatctgcgcaacagtgcgaacgtggccatgacggtttccatcgacaccgacaaaggcacgtcgaaggtgatccatccgctcggcaaagacattctcggcgcacgcatggccgcacagtacgaggccatggtcgccggcgagagcgtgccgtccgggccgattatcgaatcggcgacgcgcagcgccgacaagtccgcgatcacactgtcgttcaaagacggcactgccgacaaactgcgatccatgaagccgaactattcgaaaagcgccacggcgagtgcgccggactataccaaaaccccgaatgccacaccactggacggcattgcgaacgtggcctcccccaccggcgatgcactgcaaggcttcgaagtagccgacaacagcggcaactggacgtcggccacggccacgatcaaaggcaatcaggtgtcgctcacctccaccacggcaaccatggccgacatgacgcaggtgcgctatctgtggagcggcaatcccgactgctcgagcatcctctacaacggcgacaccctcccggccagcccgttcacggtcgcggtgcgcaattagcccgtaattagtcatttgccgcactcccatcggttttgcggcgaggaaaatgctcctagtatgtcgcaaagggagcattgcgccgtttgttgtgcgcgaacaggtccgcaaccgtatagagaggcaccaatgaagaaaagcatcgcagcaatcgcagtcgcgggcatgctgacaatcggcatggtttcgctgccgtccgcagccatggcagatgaaaccggcacctccggcgcgaccacggaaatcggcccgaacatgaccacctgcgacacggacaggctctgcgacacgttgcagcatgtgcatcagaccggccagcagctcaagaccgacctcgacaccgccaagcagcatgccgagcaattgcatcagaatgcgcatgatgacgccgatgcgttgcgccagtacagcgagcaggcttggaagaactactaggaagatcgcgaagacatcaagaccgcgctcgatggtgccttcaaatgcggtcaggaggtgcacgataccctgcatcaggatgcgcaggatacgcaggcccatctcaaccagctgcataccgatttgcaggaagatcacgccgcattgaaaacccagcatgattcgctcgtcgccgcacgccgggaatggcacaagtcgttcattcaggcggtgagggatgcgcagaatggggcatccggaaccgatgtcacctccggtaccgactccgccgcaggtaacggcacgtcggttcagacggttgccggcagcggctccgccaccggcaacggcggcacggccaagtccgatgccaccacgagcacatcgtccgcgaatcagaccagcgcggcctccggtgccgtgaccaagtcggaatacagccagttggcgcagaccggtatcggcatctccgttgcctgtgcgatcatcctcgcgctgagcggccttgcctacgccgtcaagatgttcgtgcagtacaagcgcgaaaccgccgagtaatccggacatttcaggcgaaccctgaacatagcgaaaacggctcttcaccggggtgctggtaaagagccgtttatgctgatcgctcgatgacagaatctagatatactaccgcaccaccttaccccctactgaccttgaaggtctaattgtcaacacaacgaatatccgtcagatgcccctcaatcaccgttccttcccagacacctttaagcaacccgccagacacttactcgtccagagtccacccctacaatatcgatgtctcaccggcacaaggacaggaatattcccccaaaggatcgagcactaaaggacgcgacgatgcacaatgttttgagagctcctcactctccagcgctcccgtattcgagacgccccgcacaaccagtctccagtgcagcacaccgcctttctgacgtctctaatatcacatactccccgtcagattttaaatcctgtcgcaaggccgcactcttcacacggaaatacccaatccatgccgaatatccgaagactcgcaaaagcctctatgcacaatccgcctctcactctctttcagagggaaccactgttggtaaagtcctggccaaaggcgcttcggattacccccaaaccacacgttatagcctttatatccagggttttaaaaaataccgaacatttgtcggcgaaaatcgtcgccgtaaaaccgtgaccagagtcgcggatgttcccgacgcttccaacagcgcacgtacagtacggtccatcacgaaagtcctatccactgcaggtcaagccacggtcggagccgttaagacagcgagtcatgccattcgtgtcagggcggcttcaatccgtaatgcctggcatacctttacccaacgcaggaccgtccaaaccattatcaaggccgctaagacgacccatacgctctggcagaaacgccatcgtttctcctactcgttctatgcgattattttcactgcgcttaccacattcgaagtcctgttcatccaatggggcatgtattccgagcctgaatatgcaccgggggaagaagtcgatgaagctaccaggcaagcgaacagcgtcgccgggcagctactgcatttcgttagccagatgtggtttgataggcaatatcagtttttactgaacctcatcattctcgccgccctctatatcactttgatattcatactgaatagattctggatatcaacggccattttcggcacggtcatgaccgtctatgccgttgcaaaccatatcaagatggaatctcgcaacgaacccatactccccgccgacttgaacttcatcaccggcggcaacacgggagagctaacctcattcattccagaaacaagccgagccttggtgaacagcgccgtcataggtgtcatatggctcgttgccacctgcatcgtcatgcaattccttgacggacgcaatgcggtcattcactgctcatggcgtcatccgtttgccagcgtcaagaatgccgtcggtaccttgacccgtatcactgcagccgtactcagctccactttggtcatatctttcgtttggggatttggtgattctcagtattggtccaccaattttgcccaaggcctttccgactcacctcaaatatggaatggtttggcggattccactgccaatggtccggtggtcaatttccttcgtcttgcgcacacgaagaccatggacaaacctgacggctactctcggcaggccatggaggagattgccaagaagtatgccgagcaggcccagcagatcaatcaaaaccgcactgaaacaatgacggacagcaccgtcattatggtgttgtcggagaccttctccgatccgacccgtgtaccgggtgtaagcttcgccgaagatccgatgccctatatacgtcagctcaagaatgagacgacttccggtctgatgctctcccccggctacggcggaggcactgcgaacatcgagtatcaagcccttaccggcctttccatggcgaactacagctcgacactgtccgtcgcctatcagcaactcgtgccatctctgaaatggacgccgacgctgaaccagtattggaataagaataatggcgatgactcatccgtagcgcttcatgcctataaccgtaatatgtacttccgtgacctgaactacaaaaaattcggattttcgaagttctatgccaccgatgggacacctcagctcactgacctgtcccccatcgactccgcatggtatgcctccgaccaatcgttctacaacgacgttttgagtcaagtatccaaagcaaaaggcaataagttcttccaagtggtcaccatgcagaaccatatgcctttcgaagatttctacaacgataatcagtttaaagaactcgacacctccgaaaacctacaggataccgagagaagcaatatcgagacatacaccaaggggatcaattacactgaccaagccaccaaggattttctcgatagtctcaatgccctagacaagcccatcaccgtaattttttacggagatcatctcccaggtatctattcaaccgcatattctgatcagaataatattctaggactacacgaaacggattacttcatttggtcaaacgacgcttccacgtcggcaaacaccaaactggacgaccagacctcggcctatacatcgtcaaattatttctccgctcagctggctctgcacatgaatgccaaagtcagcccctatctggcattcctcactgaaatgcatcaagcagttcctgccatttcggttccggcttcgggaagcggcagttccgatgaacccgtataccttgacgtatccggaaaccgcatcgacaaaaaatctctttcacaagaggcgcagtcgctactgcacgactatttgcttatccagtacgatatgagcgtcggtaaaaattatcttaaggacgccggattcgtcgatttaccacaatgactggctacaatgtcatgtatccaactgtaaattgaaagcaggttgtcaatgaaaatcgcagtggctggaaccggatacgtgggcctttccgtagcgctgctgctatcccaacataatgaagtgcatgcacttgacatagtgccagaaaaagtggagatgcttaatagcggagtaagcccgatcgttgattccgaaatcacgaattttcttacccgcaacacttccggcgaacgcccattagatttccatgccaccagcagtccgaaggaggcctattccaacgcggatcttgcaatcatcgcgacacccactaactatgatgcacagatgaactatttcgatacttccagcgttgaatctgcaatcagtactgtacgcgaatacgcgccgaaagcttggattgtaatcaaatcgaccattccggtcggctacacccgacaactgcgcaatcgtctacatgatgaccatatcctgttctcccccgagtttctgcgtgaaggccatgcactgtacgataacctgcatccgagccgcattgtggtcggcgctccgcaggatgatgaacgttccgttcgggcggcacgcgatttcgcagcatcgttggcgcaaggtgcggatccaatggaatggaaccgtacgaatccggacggcagcaccggtattccggaactagtagtcggcaccaccgaggcggaggccatcaagctatttgctaatacgtatctggcgttacgtgtggcttatttcaacgaacttgacacttatgcggaaagccgtggcctaaatactcgcgaaatcatcaacggcgtatgccttgacccgcgtattggtgacggctacaataatccgagcttcggctatggcggctactgtctgccgaaggacaccaagcaactgctggccaactacaaccaagtgccgcagaacctcatcgaagcgattgtcgaggcaaaccgtacccgtaaggattttatttccgatgagattctcaaccaactcaggaatgtagaaaacccggtggtgggtatttatcgcctgaccatgaagtcaggctccgacaacttccgtcagtccgccatacaaggtgtgatgaaacgactcaaaggcgaaggccttgcagtggtgatctatgaaccgacattgggcaagtctgatttctatggtagtgaagtcacatacgatttgaccgagttcaagcagcgggttgatattatcgtcgccaatcgttggaatgatgatcttgccgatgtggccagcaaggtattcacgcgcgatctattcaagcgtgactgatctcatcatggcaaagtatcgcaagtgtgtcttcttcgggaaaagcctgattcccacagccccatatcgtccggtcgctagctcaccattcactggacatccaatttggtatgcatatcactatcatcgtcctagggttttgacgagacattggaaacaggaattacacttacctgctttctcatactttctcatactttctcacaaaaatctaccgttgtttttgagagcgcaaaattttaatccgttaaatctacaacccgcatgcaaactagcgtgcacaatggcatgacttcaaaaatcgagtcacagctccttcatcaccacagattagggggtaaaggactaagctggaacattccctcggatgaaatagcctagataaacgagaggcccgtcatccccgcatgcttctttctatcatcgccgtgtcttcagcaagacaccgacaccggcaaacattaaatcggcgattgtcatggcaatgcggctgatcagaacgacagccagcacactgccagagctaagtacgcctgcaaagaacaggcccagcacactttcacgtacaccagtaccggcaggcacaaatacaactaagaaaccgaccacccaagccaatgcgtaagcaccaatagagagcatcaaactagccatcgatgggcgcatggcaaaaccacaggccaacacccacacttgaataccagcgatgatccatgcgacaaccgccagcagcgtagccaaacccagccctttaaacgtcatctgccgttccggaacaggtcttttcagcagtttgaagccaaatccaatcaatcgattcaacaccggtggcataagcagtgcaatcaatacgaccagaagtaacacaatcagccaaaccggtacctgaatcgatacagatgtgctcaacactgtgatggttccaataccagtcccagatagtaacgaaatgagaaccgcgatagtcatggccgtcacggaacgatgcgcaggaatctcatgatcacgaccaatttccgcagacgcgacgatgttccatacacctccaggaatgtatttacctatctgactgataccaaacagttgtgtcgctacattccaatcaagcattgagccaaggtcggcaagaatcactttccaagaccacatcgtgaagaatacgtacactatcgccagagctacactggcaaaggcgatatgccatggcaataccgccaacgcggagaccaaagacccccagttcttgacaacggcccaaactaggccaaccagcgcgacagccaaaaaaacccagcggagcaattgggagtcgaatattttcttcagcttgttcatacaatcctcatcagtatcttcaccgaactggctatgtcaaagcatgatctttaacccattgagcaagttctttggtgatgttctcactggtgaatcgctgcgaaacctccagtgccctgcgttgctttttcgtaagaatgctcggatttgccaccaaagattcgattgcgttagccaatgatttcgcattgtccggctgtacgaacaccacaccgtcaccaagcattctgcgttgtggtttggtgtcactagtgataaccgcacaaccgaccgccatggactggtataccttgttcggcaccacacgcagacctttaggcgtagtggagaagatacctagggcgatggcatgagaagcgactagagtgggcagttcctcgggctccacccattcgcggaacgtgacgttatcaagccctttgcagagttcacggacttccttgtaatcttgacccttaccgacaagggtgaagttcggtgtgacgccacgctgggcaagtatgcgcacagcctgagcaatcactggtacaccttgcagcggcgtgtataagccgtagaacacgatatcagttgtgcgagcactcacgtaactgccaacctcataccagtcatccgaagctccgacaggaaccaccatactaacgtctttcggttggagcatctgttggtgttccttagtgtccaacaccacaaggtttgccgcattgatggccatgcggtcgagcattttcaagagttcgaccttcaacccctgtgcgccacggtcttttgcagtgtctccggcgaaaatcaagtgatcgagaataatcggtacatctttgaacatgtggcgcgcgaatagcacatcaaaatgacccatatagccaaccagcacggcatcgggtttgccgttgacgcttatccacgccctggcacgtctggcgagtaaacgccacagcttcaacagattccagcagaatccaaatatcctccacggctttttaaggatctctacacgctgagcggtactgagctgcagaggctcgttaatctccccaacctcgcagtcgttcttgcgcaaaccatcaatgagaatgccgacgcgtggatgtttgcgcacgttgtaagtgccgaatgccaaaattcgcggcatagattcaggtccttcccattatcgaatcgtttagtcaagcccctgcgccggagagaattcgccgtattcgttttgttgggcccatattttctgatactcgatagagtaggtaacctccttcatacgttcaagctggtcttccaccagcttgcgctgaatgcgctgcacttcggaaatgatttgtaatgctatacagaatgcagccaacatgagcagggccgtaccaagcaacagcgactgcacatgacctgcactattgcccatgcaggcaagcacgaggaatcgcacgaatgggacgagaccgagaaaaccgaaaatgatggcagcccacttgaaaatcacatttgatttgaacattaggaaactgcggatgatggccccaccagacttggccatatgctcgaaaatgttgctaaataggcgggattcacgagtttttgggttggtggtgatggcgtaggaagtaatggcgatgtgtttgttacctgcttgaatgatggtttccatgcagtagctgaattcagtgatgatgttcaatttgagtaaggaatttttggagtaggcacggaagccactggccgcgtccggaatatgtgtaccagcggccttgttgaccacccaagagccaaaatgctgcatcttacgcttgaaccagctgaactccttgatggtagcggtctggcggtcgccgaccacgatatcggcctcatggcggatgattggctgtaccagctcgcctatggtctcactcgggtactgattatcaccgtcagtgttgaccactatatccgcaccgtgtttcaacgcatagtccacaccatcacggaacgcacgggccaatcccatcggtcttgcatgatgcacaaaatgcctgacgccgagactgctggctacctccaccgtcttatcggaacagccatcatcgatgacaagcagctgaatgtcatcaatgccgggaatctcagttggcatcttcttcaggaccataggcagtgtctgttcctcattaaggcatggaatctggataaaaagacgcatagtaaccttactgcaatcagcttcaactatatgatgatctgtctggattttacgcaccatcgcagaccggtggtgcaatcaaaagggcttcggcatgacctgcagatgctctgagacccacactgaaacacttccttcatgttaatctccttgttagagacaagggttctcaacacaacgtcgaatcatttggtgctggccgcgctccagccgatgccttcggcacgccagctagcgttgactaggaatcattctctgacatgctgaccgtacagttcagcgatactccttactaaaatgcttcatgcgcaccccctcatattctcctaagcggaaaggatgtccctcctcgcctatggaacacccacagacataaactgaaaagcgtccgccagccctaaacgtttcgggaaattgaatacggctacaccgtccttgaacgttccctcacagaaacaccaagaatggtggtggggatccccaccgccatcgtgacactgagctaccttttaggagactgtacgtgacgaacggtaaaatagcgcacgttcgaaaacgttatgaattatgcgggaattgcttttccataacgactggatacaccgacgaaagagacatgatggttgtgcaaattttggggttgtgccgaggtgacggtaaaggatacgtgaaaatcgcaacgaatgtcagtgcagataacctcaaggcgaccatcaagatgacggacaactccattctggaatgccccgtggtgtccatcggattccctggcgaagatatgacggcaagagtcggctggggtgatatctcctgtgatggtgtgcatgagtccgtagtggttgtaccgctactggacggcactcgactcacaataatcattacagaccgcaactctcacactgttctcggctcgttcccgttccacccaatacaaacaaaaatcaagtcccgtttgacgtaccgactacgtcccgaatttgcagcccaaatccgcggcattgaacagcggcgaatctctggcacgccccacgcttatgtgaccggcatttaccccgtcgacgaacagcattattcgtgccgtttccatgtacgttacccttatttcggcatgcaggaatcctgttccattactgtgtttgatgctgcagcgcacaggcttgatctgtcacctatcattcttgaagattcactcatcaccgacccgcatgaccacacacgtcagattcacgagctggtatactcaatcatcgtcacagacagcaacaaaaccatatgcatccaggccaagccagaacatcaggacgcttgcttcacctgtattcttccgccaatgttcgacggattcgtcaacggcgcccgtgatctcaccaaacatgcctcctatgatgatggttaccacgtgtggttcgagcagcatcgtgcaactgtggccgacatccgcaaccagcgtagagtctgtcaatcctggacggacgagatgaaacctctcatcagcatcgtgaccgtcatcttccatcctccagtcgaatacctgcaagcactcatcgacagcttcaccgcacaatcctacgacaatttcgaggttgtgttcgtcaacgtcagtggccatgggcctgaagcacagtcggtcaacaaactgctcgacaaactcagcgatccacgtttccgtgtcatcaccgaggaaaacaagagcatcgctgacaatacaaatatcggtattcgtgagacccatggcgattacattgcgtttgttgaccatgacgatgtaatcgagccagatgcgctgtatcgctacatcagcgtactgcacagcaaacctgatgcagatgtgctgtactgcgacgaagacctgcttgataacgggcgatacacttggccagtgttcaagccggactacaatcccgacctgcttaatgcctacaactatgtgacacatatgctggtgatcagccgcaccgtacttgaacaggtggagctctcacctgccgacgtgagtggtgctcaggatttcgatctaacgttgaagtgctgcgagagggcacgtctggtcaccaacgtgccatacatgctgtatcactggcgtatgcaccaaaattctaccagcacgaaccccgacagcaagccttatgcagagaccgccggcagaatcgctttggaacgtcacttcgaacgcactgatctacaagtggaggtttcggaatccgaattgccgttccggtaccgtaatcgctatatcgttgacaatccgccgaaaataagcattgtcattcccaccaaggatcacagcgatattcttcgccggtgccttaatgccgtgctcacaaagaccgaataccagaattatgacatcactttggtcgagaacaacagtaccgaaagcgagaccttcgcctactacgacgaagtccagaagcagagcgacaaaatcaaggtagtcacttggcagggaaccggcttcaactattccgctatctgcaattacggtgccgcgcagtgcgatggtgagattctgctgttcctcaacaacgatacggaagtaattaacagcgaatggctcggttccatggtcagcttcttcgcacggccggaagtcggcgtagtcggagccaaattgctgttccctgataatctggtgcaacatggcggagtatgggtatcttccgatcaggtgggatacttaggcgatttactatcacacgaagacgacggttatatggagaccatgcgatacccatacaattgtgccgcggtaactggtgcttgtcagatggtacgtcgcagcgtgttcgacgctgttggcggattcgatgaagaactggccgtagtactcaacgatgtcgatctgtgtctcaaaattggaagacaaggcttcttagtggtgttcgaccctgaggcgaagctatatcacagcgaacataccagccgcggccgtgatgagcaggatgtgcggaaggaacgtcgtgccatcgacgagcaggcacgattctacgcgcgttgggacaaggatctgcaacgaggggttttcatcaaccatcagctcaatcagtacgacggccattacaaaattgcctggtagggagaaagacaatccggatgcgtgcaagccttcacaacattactaatcgagttggcggaatccgtaataccattgcatggttgacgattatcgtccttattccggcactgttctttggacttcttcaagcaaaatatcatggcgtgtactcgcaaatcgacgagggtacgcatatcagctatgcttggtcgacatcgcatggccgcattcccgccaaaggcgatactgtggagcagccaatccttgatgactgggcctgctctagccagactaatgccgagttgcccccctgcggtgatgctgaagatccgacaaaattccctgcacaaggccaacaatacaattacattcatccaccgctctattatgcgatcactggctttgctgcacggataatcgcacatatcgaccattcggtatcgttcgcccaggcggctcgactcatgcagattccttggattatcctaggcctcgcccttacttatcgtgctttacgagcatgggggattgaccgactgtatgcttacagtgccgtagccgtcatcccgtttgttcctgtatttctgaacgcgggaagcgccgtgacgaacgatgcgccggcacttgcatgtggtgccctgctgacttggagcgctgcgcgtgtgttcaaacagcatcgctgcgattggttgcctgcagtgatggcgttactattctgtctgatgaagggcacgttcgctttcggttttttgggattcgcggcaacggtattcgcaacatccgctctatggtggtatcttggtgacgttcgtctagggcgcaacggcatcatcagttcatgtgcgaccggtatcgtctccctgctgtgtatcttcggatggtcaaaatttcagaatatgcgtggcgtagagaactggcaaaatcccaattcagtctaccgtcccaaaatagagggaagccctgtttgggaatggatgaaaacagccttgtcgggtcttgacttgggcgcgttcacttccgccggccgtgatatgtcggaccagcctgcttttatcatgtggtccgctttattgaccgtggtaatgattggagccgtaggttttctatacttccagcacgacggcgacgtctcccataccatgctactggggaccacagtgttctccatgcttctgtaccctacactggtgcagattcgtgagtatctgagcagcggtctgatgttttccgtggtaaccgtacgctatggcatgtgcctagtcccgttggtactgtgttgttgggcgctggcgctgcagaatcggaagtcacgcatcatcgccgtcagtatgccgttgatcggcatctgctgtggattcgcctcagtactgacggctgcgatgttagtttgactatattcttgcttatggaatttactccgcattccttttccgaatgacctatcagtcagattttcttcaacgatgggcggagagatctctagcgaatccatcggtggatacggattgcactggcgatacaccggcgtcgagccgaccgaccagcaaccaatgcctcatacttctagccttgctcaccagagcatcatgcacccaagccttggtcatgtagtgatgatttccaccgcctgttactccaatggaataaggattgtatttcaagacaagtatattagtcgacagctcaatcaatatgacggttactacaagattacttggcaatcaatggtttatccgcatatgaacggggatgtcctctactcacccttagtggaaggacatccccgttcatatgcggataggtatgtatctactcgcagccgataccatcattgtctgtatcaagcttgctgctataccctgggtctccacgataaatgggggctctgccagcagctcttacggctttacagtttttgaatggtgcttcagagggagaggtaccccacggtgcagaagaggcaccgccaataccataccaagcaacaccttcgtctcgccttccacgactgatcaggtaagaagcttcacctggattcagcgtgtaattgtgcgtgccagtatgcgcataaggattgtattgacgctgaagagggaatgaacgattatcatccgacgaataccagccaattccttcatcggtccatccggcagataccgaagcgtctcgttcttgtgaactcaccgtgaaatgatggtcccctacgtaaggattgtatagacgatacaccggggtaccagatgaagtggggcgacccaaccggcaccttcccatcgccacccggcgcggcggagcccatccctttcattttgcgctgcctgtatagaagtgttctccggaatgcctgttatatggacgatacatagtgtctgccgcactagagtcggcatgagcaagcggtaccatcattgcgattgagctcaatccaacgagcgctgccgccaatgtacttgagacgcaacgtttgatggtcgacttcttcaacgttcagtcctccattggtctctgccttgtggcaagtgtttcgtccaagctttcatacgccatagagaccttgttgattagggcgaaattatcctttcctttcgcatcacgcagggaaaaatcacatgaattttcctcattggtgaacgcaatcatctccgcagtgtccggatgggagccatcccatgtatgcagtgatgcaacaagacggaagtcgccattattgaacaaatccattggtaaatgaaaatgcaccgtatgatggcctttccggctcaggtcaaagctatcgccataaggcagaccacctctacgaagatcatgcatggccaacgcgacgtaaaaatttttatctccgcgataatcgtattcaacttcaaaatcaaaaccaccaacaatggtgcagaccggctcttttgatggctttacgttcaacacgggaacggtggcgctcagacctaacggatactttggagcatcgtttttctctttctcttccgccacacttttcttctcgcgacgcagattctccaacgtgtaacggtccgctacatcgtctttattgccggaagcaatgatttcgccgtccttaataagaatcgccttattacaatacctcttgaccgcatccatggagtgggtcacgagaatgacggtcttggtcgggtcctttttaatctcggcgaagaagttatcacacttccgttggaatgcctcgtcgcccacggcgagaacctcgtcaagtacaaggatgtcgccttgagccttgatggccacggagaaagcaagacgtacctgcatgccagaggaatagttcttgagtttttggtccatgaattcttccaactcggcgaacttcacgatgtcgtcatacatcgcatcaatttccgtacgagtaaagccaagcaaggcaccattcagatacacgttctcacgaccggtaagctccggattgaaaccgacaccaagctcaatgaacggcaccaacttacccgtaaccgtaaccgagccctgttccggagtgtaaatctgggaaatgatcttcagtaacgtggatttgccggaaccattacggccgacgataccgaaaaagtcaccttgacgcacctcgaaatcgatgtcgcgcaacacatgctgttcggtgtagcccttaatgcccttcgtccagttcagaaaggccatcttcagccctgtagcctgttcggtgggcaaccgaaacatcttggcaacgtggtcaaccttcaataccactggacgttcgtcaacagttgtcttctcagtcattacaacctcagtcatggtttagagcacctctgcgaatttggagctgtacttgcggaacacgtgaattcccagccataggatgaacgcggacagcgcatatggcagcaggcaaagcagcttattgtcgaccatggtccatacggtcggcacatactccggcgaaagcaggttatggcgaatatccataatcgcctgcgtggtcggattcaacatcatgatgtcggcggcccaagagaactccttattctgggccaccatggaaatcgggtagataataggcgtcgcatagaacatggcctgtagcacaacttcccaaatatgcgcgacatcacggaaatagacatacaacgaagcgagcagcagggccacgccaaggccgagcgcatacagctgcagaatactgaacggcaccagcagcacatgccaagtgtagtgtgcgtgggcaaagaaaccgaacagaatcaccacgagcaggttgatgcccagtgaaatcatggaacccatggttgtggaagccacgataatatagttcggaaagtgcaccttgcgcaacaagtcaccacgtccgacgatggactgcatacccatgctggtggattcagaaaagaagctccacaggcaggttccacataacaatgaaatcggaaacgtaggagtgccatcggagaatttcagaaacttcacgaataccacatacatcacagcgaatagcatcagcggcttcaatacagaccacaccataccgaggaatgagccctgataacgcaactgaaaatcggttttcaccagttccttaaataccaccatcgcatagtggtacctctttttgaggccatcaaaaaagttcttcacaagcgtcctattctactagcgcaaagcgtttgggcgcaaaatgtgacgcacccatcttcagcaatacttaacaatcttctattaaccaaaagacgtttaccgcgcaacgacaagatatctcacatgcctcttacagtcactaaatacagcgcactcagtctcatagccaaaccccaatccgtaggggcaagagactccatccctttcgaactcacaccactaccggtttcgcatactgacgtatacgcattaagctggaacttacatgaagccgagcaccactgagcaaagggtctgtatgccgcaactctccatcattatccccaccttcaacaacagtaaataccttcttgagtgcgtgcatagtgtgacaacacaggaattcaaagacatcgaagtgataattgtcgatgacgccagcaccgataacacccccaccatcgcagcaaacctcacaactgaggattctcgcgttcatctcattcggcattctcggaactctggaaccctcgcatctcggaaaacaggagtacttacctcgacagggcgttatgtcatgctgatggaccaagatgacgagcttgccagcggtgcgctgagaaaacttcttgattttgcgaataactatccagcggatatctaccattttggagtacaagtgatcgcggccaacgcttcagcacaacaagcagccgccggaatgacaacattccttacccccataccacgcaggttgaacggcgaaacaatactcctcacccaattttccccgaatgagaacttcgactggcatgtgcatcacaaaatgtatcgaggcgatttagcacgctccgcttatatgctggctgccgatcaaagacttgtgctttccgacgatctatacgtgagtttcattttggactctatagcatcaacctatatcagtattcccaacgcaccatggtatctctatcatttgggccgtggagatacattaggatataagctcacatccggctcgctgagcgttatggcacattgggacgctcaagccctatccatgctaactacgttcgtttcccgaaatcataccaaaatccttcgctccgattggagcgatcgtctcgccgatgtacgcgataaactcatcgaacataccatgaacgaatggaaagacaaccttccagacaatgataaaacgcagggactccagcgaatactcgatatttgggcacctgacacggtttgcggcgaactataccgatacgtaagggactacgcctacgcctatctggtcgccgacaatcgacaatccgcggccagtcgaagcaatcaaaaacaggccgaatggtatctacgcaaggtgcagcacatagaacggcaacacggacttcctagtaagtctgataaccggcactatctatcactgcgaaaaactgcgtacaatcacctgtatgactcgggcattctgcagcaaccgcgacaagagacaaccaaatcaagggataatcacttggaggttatgttgaaaagactgtttgcagggcactgagacggactctttagctagactctaataagcttcacaaccgaatgagagatacaatgccgaaaatttccatcatcatcgccgcttacaatgtcgccgactacctgcagcagtgcctcgatagcgtggcagctcagacgttccccgactatgaagcggttgttgtagatgatgccagcactgactccaccgcacaaatcattgcacaagctgccgcacaaaattcacacatcgtccctgtcacacatgaacacaaccaaggacttcacctcacccgtaaaacaggtgttgagaccgcgactggtgaatatgcattcttcttagatggagatgacgatctcgcacctgaaacttgcaagcaactcgtcgatgcaatggaactgtgtcctgccgacatcttgcactatggtattaccgtcatcggagagaacaacattctcaccgatgagtgccatgctttcgaagcattcaacaatgcgccgacggaggattgtaaacaggccgatatcgtgtgcaatatctatgatcaatctcgagggcagaaagttgattggcgcgtcacacaacgtttatatcgcacttcactccttaaaaaagcttttgaaaccatgagccgtgatcggcttgaaagagcagaagatggatatgaatgcctagtcatttcgtctttggcccagacataccgttcacgcaaagactgtcgcggataccgttaccactacggacgcggagtcaccggcacaagtgaaatttccgctgaaaaatatggcgcattctgtcgacaattcaaccgttgcttcttagcagcgacagactatgccgcgaaatataccgagattgatttgcaggcttgtgttcgtggctataaggaaaaagccaccgaactactagctaatgattggaaagtcagggttccagaacaagagaaacgggatgcggccgaacagatggaagccgtcttcggtcccgctattactggtagagaaatatatcgcttcgtacgagatgacgcctacgaaaaaatagtgaccgatgcagaatcatccgtagatgatgcactccatcattggttctcaattgcaaaagaattcaaagtgacggaagattgcaaaaatctcaacgccatacgattcttcaagatgaaacacgttgcctccactcatatggttgatttggatgcacgcattcgcaatgaggtatcttttcaatcctacgccaagcagaatatccgcatcttcgtcactacgcacaaaaacgttgacctatttggcagcaatatcatgcagcccgtgcaagtcgggccgaaaacggagcggttcccttgggcgttccaggatgatgaaggcgaaaacatcgccgacctcaatccgcgttattgcgagctgaccacacaatactgggcatggaaaaacatcaatgccgactactatggcttctgccactatcgtcgctatttcgatttcaccgaacccaagcatgaggagaacccattcggtgaaatcatggatgactatatcgatgtcaaagccgcgcaggaatacgggttggacgacgtaaccatcgcggaaaccgtcaagcagtatgacgtaatcaccacaccgttcggcaatctcgaggagatcatcaacaagtatggcacgccacaggccttgtgggaagccgctcctctgttgcacgacgatgatttgcaacgctgctatcacattctgtgcaagatgcacccggactatcggcaggatgcggacgccttcctcaaaggcaatgcagcatgcttctgcaacatgttcatcatgaggaaggatatctttttcgactactgctcttggctgttccccattctcaaggaattcgataaacagactgattacggtacatacagcaaagaagcccttcgcacgccaggacatctctccgaacgtttattgaacatttatctgatgcatcataagcgcatcggctccaactggagattcaaagagttgcaatgcgtacatttcaccaatccggaaccagcggaaaagctcggaccactcgccgtatatgacaagccgattattcctgtggtgttcgccgctgacgacaactatgtaccgcaactggccaccacgatttattccgccataaagaacgccaatccgaactacctctatgatgtggtggtattgcagcgcaatatcgtttgggacaaacaagagcgtctacgtgatttcttcaaacgatttccgaatatgttcctgcgttttaccaatgtggaacgcgagttggctgggtatgacctgtccacgaataatgcgcatatcagtgtcgaaacctattaccgtttcctgatacaggaactactgcccttctacgacaaggtgctgtatctcgattccgatatcgtcatcaacggcgacatcgcagagctataccgtaccgatctgcaaggcaggttgcttggtgcgattcgcgacatcgattaccttgccaacctcaatgtgaagcacggtgaccgtatgaagtatacgaaagacgtattgaagatgaaagatccatacgattacttccaagcgggcgtgctgatattgaacacccgggccatgcgcgaacgctacaccatcacgcagtggctcacctatgcttccaatccagccttcatatataacgatcaggatgtgctgaacgcgcactgcgagggtaacgtactgtacctgccatgggaatggaatgtagtgcatgactgtggtggtcgtgtcggtaacttgttcgtgcaggcccccagtgacgtctacgatgcctacataagatcgcgcagcaatccgcaaattatccactatgccggtttccaaaaaccttggaacgatccggattgcgattttgcctccatttactggcgttatgctcgtgagacaccgttctacgaacggctgctcgaacgcatggtagaggccaatgaaccgaagataccggaaatcgtgttccagccgcgacacgagcgtgccatcggagaagacaacccgattcgcaaggtcatcgatccgctgatgccaattggttccagacgccgtgatgtgctgaaagccattgttcgagctactcgtggacgcatgtaagcacagaaggcccgcagtgaggtttatgggggctacggcccagaactgcaaccctcataaacctcactgcaggtaagcagcccagacggtacgagcatcgtatgtaacagggcagggttttcacttgctccgttcacaagcatcatggaccagaaagtttattctctctgaattcgtcaattgtccgattgtaagtgcacagtaagtagcccccacatcaatggcgttatcacgaccatcggcataacataacgaattccctcgatggtcaccgtcgcgggagaaatccataaaaataagaatgttgctatatacggaaacaaccagagtatatttttccgacgatgacggcaccattcatatatcacgaagataaacatccaagtagcccagatcgctcgcgagaatatcagattcagaaccggaagctgttcgattctgtccatgaatcgttcaaactgatttacacgataaacatgtcccggtgcatgcattcccatttgtggcgcatacccgacaagagtgtggttgctaccggccaagaacactggcaacaacagattcgtcggatcagcggtttcgccatatgctggaatgcccaaccatccctcttgcatagcaagataagcctctatataagttcccggatgctttaccagaccacatacccatgctttcgcgtattcatcaaggtactgatccttatcggaatcccaagtataccctttaacattatcggcagcccaccattggtatcgatcagctacgtcttctccgagaatatttgtaattgcttctaaagctttactgtcgatatcactcttatgccgtttaacctccagagcagactgctgaaaaggaatggacagcatttcttgtttgccaccctcctgaatacaaaaagccggaaatacaaccttcgggataaacagcaacataaccacgagctctgtcagcaatacagcgccgacacgcaaccgatatttgccgagtactgtaaaaaacagagctaagcaacagatcagcgcgacatacatacctgtcttctttgtaagacccataagcagcacaatcagcatgaaagcaatcatgattgaaggccgtctcaaacaaactccacgtgttctagcgatttctacacagatcaacgcaaaccatataaagaatggaacgaagacagaatctttgacgaggctcatcgaaaacattggaatcacaggaaatagcgcaaagaacaacatactggtaaaacaaatacgccatctagcccccaaacgacgacagtatacgatcacagtcgtaaaagaagtcgttgacagtaccgccaaggttacagagcataagaacaatccacggtcaacggagccaacgaatttccctagctcagcaaaaataccaaagaaaagcgtatcgaataccggatgatgatcggaccaatgactgccatcagtaaacgtattaggcaaaccgaaccactgcatgagctgctgccccgtgtcataccagatgatcccaggatacgtcagcaacagatagggcatccagcatagcaaaataaccgcagccactaatatgaattgtcgccacccccatttaaaggagaagagcaagcgcagcttctcaaataccggtttacttgatttgggctctttactcagccatgcaatcaaatattccccaagtagcacaagaatgatgaacaagcagaaagctatcaccgtaaaccatatgcaacgcccggtaaataccagatgttgggaaacgcggagcgtgtttaccaacgcggccatgaatccacagattaacgctaatatgatgagtggcatacggctgatgagtatgccactcagcgcctgcataaccttcttcctgttattcatttgcatgctcttaacggaaactgtctatctttggaccatgagggtatctttaccgtcgccatcccaatcaccaacatgcgtagcatcctccgccttgccataaaagaaagtagcatcagcaatacctccagaaatcgtatttttaatgaaatactcattcccccttcgcacagccaacgtatccctgccatcaccatcccaatcaccaacgagaacggtgtcttcttgacgcccgtaggaaaacatcacgtctgcattaccgccattcagagaattcttaatatagaagaaattgccacgacgcacagccagagtatcgaagccatcaccatcccaatcgccaatatacacctcatccccagtgcgtccgtatgcgaaagagaactcagctgcaccactttgtaatttattagatacatagaatcccacccctttagggtaattctctgatacaaacctcctattaccaaatgcgttcatatccacattgccgtcgatgccgtccacgtggccgatgctcgtatactgccagccacgatcattggtggagaactcggtgaagcccatctttgcgccgtactgtgccacccaacgggtcttggcatggatgttggcgctgttcaacggtccctgcagatagctcgtgtacgaatagacgcccagattagggtatccattcgatcgcatcacgttgtaccagctgttaactatgttgtcgtacgcactcacactggttggtggagtatggccagtccagccactccacttttccaagtcatagtagatcgggtatgtgaggtccttggcgcttacacccacctgcttgagcttcgccacaatgtcatgtgcctcggcattcgccatgctgccggtatcggcgtatgaataccaatagatgccgaatggaatgcccaaacgcttgcattcggaaatattacgtttggctttggtatcaattgaattaccttcgccgtatccaagacggataatcgcgccttctacgccatcagctttcgccttagcccagtcgatatcgccctgccatgtagaaacatcaatcacacccttcgcctgctgcacgaacagattgttttcgtaatcgaagaacgctttcgtaccgttacaagtaccccaatgcgcaccgtaactattcgattcgaacttagcgaatctaatagaaccactcgatgttaaggaagattggttccttcgttcttgtccatctgcggatgtttcgctctgcacctcttcaacagcagccttcaccgtcgccgcagacacaggaatgaatgattcaccatccgtctttgcgagcggatcgggctgctgattgccggcctccgccgcagcagccgcccccgggtcctcaaccgtttcaccagtctctatatttttcagttcaccttccggtgtaatagccaagtctgctgagacaattgtcgcatcgtcgagaatgctttcgcttatcgaatccggaaggggtatttgtggattatccggcatgctttctgatgaaggcttttcttgattcgtcaagatagcgtctgcggccgatttctcggcagcgctaattgaggtatcttgtagtgcatgagcgggtacagcgctcgctaaaatcaacgtgattgcagtcgccgcaacagccgcactcgaaacaagttccctcagcatcttcatcgaacgttccttccagtcagatagttactgtgcagatccctaccgaccttttcattgaaacatacttcatcaacatttcggtagccattcaccaccccgccccattgccttgcgaatacgttgcaatgatgatagcccgattgttctgttgtacaggccgagacggtaacatgcttcatatgctgcggcgatcggagtaggaaggtacttgcggagcctgcggcacacagcctaacagcgtagtggcacagaagggtgatatggcagcacggcacagcaaaaagcatggcaggcacaaagctcggcatgccgttcccagctcgaagcctgccatcatcaaatccatgttcgtgcccaaggaccgcttctatacggcagtgatgcaaggcgtgcacgacagcatggaacgggaacgcaaacgcacgagacaagccatgcacacggctgtggccgccttggcgattatcgtgctcatcggcagcatctgttttggatggatgggagcgcgcgcatcgctacgaacgcacgagctggtccgagtatccacctgtcaacaagccgtcatcgatatgaacaactcatatttcaaggcttcccagctcaaaacgcaggtggattccgctttcaccagcatggatgccaactacaatcttgaccaattgtcgaatctgtacggcgaaaaagttgacattccaagcacactgcagtgctccaacaacccttccaacaccgccgataccgccacaaaagccaaggctgcctacgacaaacaggcaacggcatttcaagatgcgttgaagaaaacgcaatagcaaggacgatttcgccatccgcgaacttccgtcaatccgatcgagccaagcaatccggtcaatccaagcaatccaatcggtctaagcaacggggcgaggatcactggagaccctacgcggaaccgacgcggcggaagactcgatcacgatgggttcggtgcgacgcaacgagatattggaagatgactgtacggaacgcgcctcgcgggaagaggtggccgcatcagcctgcacaggcggaaaagcgccggttacggggcgaacccgaccggtcgccgtaggaatgaaactgggtggaagcggctgcgtggcggcggtgtcttcagaagaatcctgagagacggtccgcatggaaactcgagaagccatcgcggcaagggaatcgcgcgtatccggctcctgctgcaggcgatcatagtccgtcatcacgcctcccctcattgactcacctctcactgtaccgagggtaacgcagccataatgacttccacattacgaatgcgcgatatgcgcaactcccttactcaacagcaacttaagcgttcacagtgaacgaaatcgaatcatcgtccctccgaaaaacgaccttggaccggtaggatttcagatatggctgaaagttcccatccgcccgcagaccattcggcccattatctttttctcatcgtcggcgccccgctggccgccttcctcatcgcggcatcacgcgcattcgagacgcatggcctgaccattccgctggttcgcatcacgaccggcatcgcgggactgatgctgcaagccatcccgttcatgatgctgggggcgttgatgtcggcggccgtcaccacattcgtcagcgaatcgctgatccgccgccatattccacactcgacattcggcggcctcgcaatcggcctgctcacaggattatgcctgccagtatgcgactgcatggtagtgcccaccttcgcaagcatcgtacgcaaacgcatgccattgccctgcgcggtcacgtttctgaccgccgtaccggtcacgaatcccatagcgatatggtccacctggtatgcgtttcccgacaaaccatggatggtgctctggcgaacgggactgggcatgataatagccgtgacggtcggcgcatcgttcgcgctatggccgccgaaaagctccgccaccgccacggattacgcgaatcgcacggattacgcggattatgcgataaagaatcgcaccgcatgcacgcggcatgcagatgacgcctgctgcagcaccggcctcggcgacgatgcccgtaagatgacggacgacccgccgatcatccgttttctacgctgcacacaccacgattttctacacatgatgccgatcctgctgttcagcgccatcatcgcctccctggcgcgcacatatatacgtccatcggcaaacggtctcgacacatccacactggcaagcatcctcgcaatcatcctggcgatggggctggcgtttctctgctcactatgctcatcctccgacgccgtaatcgcctcgagcatggtaggcgtactaccgcaatcggcattgatcgcattcctgacattcggcccggtgctggatctgaagaacacgctgatgctcatttcggcatgccggccacgtttcgtcatcagattcatcggcacgttcgccattgcctgcctcaccgccgtctgcatcgcgcaatactggatgcccggagcctgacatgcgcagccggccatcactccccaatcgaatcgaaggactctgctttgcagcgctcgcatcggccatcgcatacagcgtggccagcggctcatacgtttcgctggccacgccacgttcgaaaccgtatctgatcatcgccgtcatcgcattgtcgattctggctgccgccgcatggctgggcctgttccatgccaccgaacggtcggcattccgctggctggtcgcgttgatcatcccggcactgctaatcaccataccgttccagcaggcgggcggcagcaccggtttcgacatctacgcaggcggacgggccatcgccattccccgcaacgtgtacgcggcggacggcgcacggcatctgcacggattggatgacgcccgtagaaccatcaccgtacgcaacgacgaattcggctcatggttcgaacacatcgaccacaatccgcaatcctacgtcggttaccgtatccgcatcaccggtttcgtcagcaaaccgtccacgctcggcaccgacgaattccagatctcccgccagttcatgagctgctgcatcttggacatgacaccattcggattcaccgccgtcaccgcgaaagccgccaaactgcacgaatatgactgggtgaccatcgacgccacgatcgaacagggcacgtacggcaccagtgggcatgaacggcagggtctgatattgcaggtctcctcattgcagcaggccgcgaatgcccctaccggctatttttactggcaatgagtccggaggatggcatgggcagctgatgtgtcttggctgccaacgccgcttttgccctaacttgatgcagtgaccgataaaaacggttgcgttcctcgctatatctaccgtccaaaggtccagcggacccagagtccttcatctgtatagcgccagattccggaatcttgtccctaacgaaatcggagcatcccctacttgcgcaattccaaataatgagacagaaaggggttatagcgcgttatcacgcggcttgaatcaaagccatgaatacctcatataaatgaaacgtatgactccgaattttggcctttagttttcgggggcgtaccgtcgtcattcagcaagaacgacagcactttccaaaagagagaggaaaacacatgaagaagaacaagctgttcacgacggcggtagctgcgctcgtggcgatcggctcgctcggagcattggccggctgcggtaccgcgaatgcaaaggtatccgacagcggcgtgaagaccgtcaaattcgttctcgaatcccaagatccgccatactcctacgcggacaaaaacggcaacccgaccggattcgaccttgacgtcctcaaagccatcgacaagaagctcgacggctataagttcgaatacagcgtcgtggattatcagaccgcattggtcggaaccaagcagggcaagtatgacgggctgatcggtgccttcttcgagactccggcgcgagccaagcagtacttgctgtctaaaccgtacaactacttcttcatgaacctcatcgtccctgaggacagcaagatcgaaagtctcgaggatctcaacggcaagaccctcgacccgattgtcccgacggacggacgatacgtggccatccagaactggctgaagcggaaccccgatatcaagatcgaggttccgacggtcaccaaccaagagacctttcaggatatgttcaacgccgtgcatgacggcacctatgacgcagtctatctttccaaggcccagtatgacggtgtggcagacaccctcggatacaagctcaaggtcaccgaccccgttgacgccgccggaaccgtgatcctgtacaacaagaagaatagcgacgtccagaaagccgttgatgagcagattgacgccctaatcaaagatggcaccctcggcaagatcagtgagaagtacttcaagcaggacaacttccagaaagcccgtgaactcggcgccctcaaggactgattcggcaaacaaacgaaacggggaaacaagaaatgccttccgatctgctgacgggcgtgctgcctaagctactgcagtatctgccggccaccctactctattggattgtgccgtcactgctcgccttggtcttcggcactgtattgtgcatcgtcagggtcggaaggcacaacgttctctactggctctgcaccattttcatctccttcttccgcggaacgccgggaatcgtgcaaatatacctcgtgttcttcggactgcccaaggttttctacctattcgggcttgacatcgacgactggaatccagggatcttcttcatcatcgcaacggccatgaacctctcctgctttgtatgcgaggcattgcggggaggatatctaggggtagacagagggcagatcgagactgggctgagcatcggttatagccggatccagaacttcgtctacgtcatcgtgccgcagaccctaaaggtcgcgattctcaacctcaaaaaccttgagatagacgtcctcaaggacacttccgtcgcctacacaattggcgccatggaaatcctcggatcggcgaaagccatcatctccgcacagtacggcacagggcaactctggattttgggtcttgccgcagtcatttactttgtgctgtgcacgcttgtggagacgggattcaccttagcatcgcaccgcatggaacgttacgaaaggaggttcgcctgatggaactcgactacgatttcatgattgcggacttctcaactattcttgcgggactgcccaagaccttggtgctgaccttctggtccgcactgttcgcactattgctggctcttgtgttcggatgcgtcatcctatccaacattcctgggctcaagcaactcgtaatcgccatcaacacattcatcaagggagtgcctctggcggtacaactattgttctgctactacgccgtcccgttcgtagcaagatggctcggatccattggcgcctacgacttcaacccacgacatatcccctacttccccgcagccgtggtggcaatagcatgcaacttcggcgcatatatcaccgacgtggttgtctcctcggtgaaagccgtggaccacgggcagatggaaagcgcccaatccatcggtatgaccggcttgcagattgcgttgcacgtcgtggctccgcaggccgtggtgatatcactgccaagcatgaccaactacttcatctggctgctgaagggcaccagcttggcctctctaatcaacgtgaccgagatgctaatcaccgcacagattagcgcttccgacggataccagtatctcgaggcgtacattgacgcggccttgatctactggatggtatgcgcggccatcgaattcggttcagaacgactgttcagacgcgtgggattctttctgaaacccgtacgcgcttaggataactcgaaagcaaataagaaagaaggctggcatggcattcgaaaacaatactccgcatctccgcaacaccaccgtcgacgcgacaagggagatttcggaacgacgggctgcgactatcagccgaatggtggacgaggccgcaaaacggggtcttgatgaccaattcgcctatgatgcagtggctgactacggaagggacaatgccaaggaatttcgcaagactctcaaggacccagattccttccaagagttcatcgacaatttcggcaccgatcacaaccacgaaatctatgagatggaaacggtcaagaagaccgccgatgagctcgagatagacttccactactgcccatacgtcacccagtgggtccgtcaggggaaagacccgcagcagattgcacgcctgtgcgagattgccatggccggagatcacgccttcgctgcgcagttcccgcacgtgaagttctcccttgaaggcaccatcgccgaggggaagcctgtatgcgtactacgtttcaagaagcagtgaaaggaaacacccagtatgagtgagcatgacgccgatgaaacggttgtcacgctgaaagggattcgcaaatccttttcaggcaacgaaatcctcaagggcattgatctcgagatatacaagggagaggtcctcgccatcctcggttcgagcggatcgggaaagaccacactcctgcgttgcgtaaacgccttggaacagccggatgcaggcatcgtacgcgtcgacgggaccactgtcgacttcaacgggaaagtatccaataggcagatactcgaactgcggcgcaagaccgcgatggtgttccagaactacaatctgttcaaaaataggactgttcttgagaacgtcactcaggggctaaccatcgttcgcggcatcgcgaaggatgaggcgagggagcgagcaatcaaggctctatcgagcgtcggtatggacggatacgaagaccgttacccgattcagctctccggtggtcagcaacagcgtgtctccatcgcccgagcactagcgattcgaccggacgtgatcctgctcgacgagcccacctcggccctcgatccggagttggtcagcgatgtaaacgacgtcatcaccaaggttgcgcagactggagtcacgatgatcctcgtcacccatgagatccggttcgcgaggaacgtagcgtcccgtgtcgtattcgttgagaagggcaagatcctcgaggaagggagccctgaacaggttatcgataaccctcaatcgccgcgaatccgtgagttcctcagtaagatgatggcgaaatgacagataacaggtagcaggattgaagttgttgggcccatcctcaccgcacggcgtggccgtcgcaccatacgtgccgtatggtccagtcttccggatcgagtagcagaacatccgccgcatagcctggcgcaagcaggccgagtggtcgcccagtaacacggttcggcttgtcgtaaccgaatgccctggccggagtcaatgtggccgcttcgacggcatccggtgcgctgatgcccaatctcagcacggcacgccgcacagcctgctccagcaccagggtcgagccggcgatggcaccattggacatcagtcgcgcatgcccatcgacgacatccacatccaacgctccgagtagataacgaccgtccggacagccggtggcggccatggcgtcggtgacgaaggcaatgcgatgcggcgcgaagccgaacccgagtttcaccatcgaatcgctcacatggaagccgtcgttgatcaactcgatggtgacccgcggatcctccacagccgctggaatgggaccgggccttcggtgatgcaatccattcatggcgttgaacatatgcgtcatgatgcctgcaccggcggcgaagccttgacgcgcagtctcataatcggcgtcgcaatggccgattgccggaaccacgccggcatcggcgaatcgacggatcgcgctgatgccgtggggcagctccggagcgatggtgatctgcctcaggcagccatccgcggcccgcagtatgtcatccaccaagccatcgacgggatcgcacaggcactccggattatgggcacccttgcgcgacgccgcaaggaacggtccttcgagatgcacgccgagaatgtcggagcgcatgtccgtctgcccgcggattgtgcgtagattgtcacagatcgtatcaaacgggttggtaatcaggctgagcacctgccgcgtggtgccgtgcgacaggtggcccgcacgcgcgagttcgattccttccgcaccatcgtcaaacgatgcaccccatgcgccatgggcgtggatatccacataccctggagtcatgatggcgcccgaggcgtccatgaccgcagtgtccggaatgttgagattacggcaagcggtttcacaatcatcgtcagaggtgcccacggcgacgagcgattcgccatccgacacgacccaggcatgatcccgcacccctcgggcgtcgactttccgcgcattgcgaatggcgaacggttcgccgtctcgaagaaaggaacgcgcaatccgccgtgcgaagtcctgtctctgccttggctgctccatgtctgacactccttgcattgagggaagggaacctctcatcatgcgcaggaaagggtccctgacgggtggccggttcagccctgatgttccgccggctggctcatgggtataagcgtaccggcagtggtccttgcggcgcagtcggcttgcggcgtcgatggtagcgtcgatggtgacgtgacgctactcaagtctcttgcgctcctcgacaaggattatggaacaatacatggctacgcagaagtttattatgcaagtcaccgctggtgccaactgtatgaatcgctggccacgtcgaaggcaccggatggcaatgcgacgcatggcctagatcggttggaatcgttggaagagccgtttttcagtataagaaaagggctttcagattgctctgaaagccctaccggcggagaatacgagattcgaactcgtgaggctgttacaccaacacgctttccaagcgtgcgccatagaccactaggcgaattctccaattatgcaacgctctgcaatggtcacctgcaaaacgcaacttgattaggatacaacgcattgtctcaacctcaaaatcggcgtgtcgcgccgcgtggagggtgaacagtcaagcaggataacgcgacttgccggcaacttcggcatcgcaccaatcaggcatgaagaggctcaacgccgtacagacatcctacagacaggcccatagccccgaacataggaaattcagcgtacataggccctcagacggccgataatgcccaacatgaggaagaaggcgtccgatgtcgacttacgcctgagataactgaacaatgatgctacggggacgaccgtcggcagacaaccgatagccagacattggatttgtggacgcgccgacgtggaattcctgcctgggcctcgggaaagcacatcgaccgcgttgtgataaaagccgctgaagaccccgatgaccgacggcaggagaacgcaaaaaagaatcttcccggggcggccagtccgtccaaggggatcccgtcaggaacaggataaaaaaggtggggtttcccggagcgtcggctccacgggaaaccccgacaagaacgtttgcggcggcgtgttactctcccacaccctgccgggtgcagtaccatcaccgtgccaggccttagcttccgggttcggaaagggaccgggcgtcacacctgggccatggccaccgcaaaaaccaccatcaacggcccggacccccaaaaaaacaggggaccccgaccggccaaaaggaaaaccacccacgcgccgccaccggcgcgtgccgtgacggtccgggaaccggacagcggacgcgaacaccgtttcgtgaccacaggaacaacgctccttgtcgccaacaatcccgcagcagcaaagacgcggacccacccccacacacaagggggaatgggctgctatgtcgccgtcgcccgttagtaccggtcggctccacccctcgcggggcttccacctccggcctatcaaacacgtgttccacatgcgggcttcaggaccccgaagggcccaaggaatcctaatctcggagcaggcttcccgcttagatgctttcagcggttatccctcccgaacgtagccaaccggccgtgccgctggcgcgacaaccggcataccagaggttcgtccacccaggtcctctcgtactatgggcaggcctccccaggattccaacgagcgcagaggatagagaccaaactgtctcacgacgttctgaacccagctcgcgtgccgctttaatcggcgaacagccgaacccttgggacctgctccagccccaggatgcgacgagccgacatcgaggtgccaaaccatcccgtcgatatggactcttgggaatgatcagcctgttatccccggggtaccttttatccgttgagcgatgccgcgcccgtgcgccggcaccggatcactatctccgactttcgtccctgctcggaccgccgtcctcgcagtcaagcccgcttgtgcgattgcactcgacacccgattgccaaccgggctgagcggacctttgagcgcctccgttactctttgggaggcaaccgccccagttaaactacccgccaggcactgtccctgaacgggatgaccgttcgaggtgagacgtcaaacgagaacagagcggtatttcaccttgcggctccgcgcgggctggcgcccgcgcctcgaagcctcccgcctatgctacacaatccgcgactgacgccaataccaaggtatagtaaaggtcccggggtcttttcgtccttctgcgcttaacgagcatctttactcgtactgcaatttcgccgagctcctggtcgagacagcggggaagtcgttacgccattcgtgcaggtcggaacttacccgacaaggaatttcgctaccttaggatggttatagttaccaccgccgtttaccggggcttgaattcaccgcttcacccccaagggggctgacggatcctcttaaccttccggcaccgggcaggcgtcagtgcatatacagcggcttacgccttcgcatgcacctgtgtttttggtaaacagtcgctaccccctggtctgtgccacccccacacgctcccggagcatgtccgttcacccgcgggggtctcccttatgccgaaggcacgggagcggtttgccgagttccttgaccaggattcgctcgatcgccttggtattctctacctgaccaccagtgtcggtttggggtacgggcggcaacgcgcctgacgccggggcttttctcgacggcctggaccaccggatatcgagccgaaacggctcccatcatcgcacctcgccatacacgccgcacggatttgcctatgcgactggctgcgtgcttgaccacggaaaaccacctccgcggccggctcccattccgtgtcacccctgcgctcacctaccacggctacgctcccaacgccacgcgccggaccccacccgaaggaggggaacggcccgcgacggaggttagtactcaccgcctcggtcctgtcggttcgctgccggtacgggaatatccacccgttcatccattcgactacgcctgtcggcctcgccttaggacccgactcacccggggacgacgaacgtggccccggaacccttggtcatccggcggacgggatcctcacccgtctctcgctactcatgtctgcattctcactcccgcaaagtccacggcacggtcacccggccgcttcgccccttgcaggacgctctcctacccggcgcgcatacacgcgccgccgcgtcttcggtggtgtgcttgagccccgctacattgtcggcgcgggaccactagaccagtgagctgttacgcactctttcaaggatggctgcttctgagccaacctcctggctgtctatgcggccccacatcctttcccacttagcacacgcttggggaccttggacgacggtctgggctgtctccctctcgacgacggagcttatcccccgccgactcactgccggcatacacatcaacggtattcggagttcggctgctgttggtaccccacaagggcccgcaagcatccggtagctctacccccgcgatgcaataagccgacgctgcacctaaatgcatttcggagagaaccagctatcacggaatttgattggcctttcacccctagccccaggtcatccccccggttttcaacccaggtgggttcggtcctccacgcggtcttacccgcgcttcaacctgcccagggctagatcatcccgcttcgggtccaggacacgcgactataaaaacgccctgttcggactcgccttcgctacggctgccccacgacgggttagcctcgccacgcatcactgactcgcagactcatttttcgataggcacgccgtcaccccgcaaggaggctccgacggatcgtaggcgcacggtttcaggaactctttcactcccctcccggggtgcttttcacctttccctcacggtactggtacgctatcggtcagacaggtatgcttagacttacaccacggtcggtgcggattcacgcgggattccacgaggcccgcgctacttgggacacgcgatcggaagacggcaagcgtccaggtacggggctggcaccctctgcggccaggccttcaagcctgttcccctggcaagccgttttatgactcccgcccggtccgtcggaaccgggacacgcgctccctcaacaccgcgcacgcaacccccgacgggtatcacgcgcacgcggtttggtctgatccgctttcgctcgccactactcacggagtatcccttcctgcaggtactgagatgtttcacttccctgcgtaccccccgcagaagcctgcggtgccggcccatgacggccggcgggttgccccattcggaaatcctcggatcgaagccatgctggaggctccccgaggcttatcgcatcctcaaacgtccttcgtcggtactgtctgccaaggcatccaccatgcgcccttgcgggcgacacagccaacggccgtgccatcccgcggctttcctgatagcaagattgccagacgacaaatcatcgcactgttcaaatgatcacaaaacgatcgatctcgaaaccaaactcaaaaagaagagtttggcgaaatcgcgataagcaaagggaaaacgaaaccgttctccctcgctcgcgtccactatccagttctcaaaccgccacgcgccacacgttccgccacgcgcccaacggacgccggccaccccgcatgggcatcgaaccgcaccacaatccaagactgtggggtggcggtccgggaacccaaaagcacacccataccacccccggacgggacaggcccatccaagccaacgatctcttccacaccagcatccccacacgggccgtggaaccgttccacgcgcatggggcacacaccggacacgaaccgcgtcctgaactctccgtagaaaggaggtgatccagccgcaccttccggtacggctaccttgttacgacttagtcccaatcacgagcctcaccttagacggctccatcccacagaagggttaggccaccggcttcgggtgctgcccactttcatgacttgacgggcggtgtgtacaaggcccgggaacgcattcaccgcggcgttgctgatccgcgattactagcgactccgccttcatggagtcgggttgcagactccaatccgaactgagaccggttttcagggatccgctccatgtcgccatgtcgcatcccgctgtaccggccattgtagcatgcgtgaagccctggacgtaaggggcatgatgatctgacgtcatccccaccttcctccgagttgaccccggcggtcccccgtgagttcccaccatgacgtgctggcaacacagggcgagggttgcgctcgttgcgggacttaacccaacatctcacgacacgagctgacgacgaccatgcaccacctgtgaacccgccccgaagggaggccgcatctctacggccgtcgggaacatgtcaagcccaggtaaggttcttcgcgttgcatcgaattaatccgcatgctccgccgcttgtgcgggcccccgtcaatttctttgagttttagccttgcggccgtactccccaggcgggatgcttaacgcgttagctccgacacggaacccgtggaacgggccccacatccagcatccaccgtttacggcgtggactaccagggtatctaatcctgttcgctccccacgctttcgctcctcagcgtcagtgacggcccagagacctgccttcgccattggtgttcttcccgatatctacacattccaccgttacaccgggaattccagtctcccctaccgcactccagcccgcccgtacccggcgcagacccaccgttaagcgatgggctttcacaccggacgcgacgaaccgcctacgagccctttacgcccaataattccggataacgcttgcaccctacgtattaccgcggctgctggcacgtagttagccggtgcttattcgaagggtacactcaccccgaagggcttgctcccgatcaaaagcggtttacaacccgaaggcctccatcccgcacgcggcgtcgctgcatcaggcttgcgcccattgtgcaatattccccactgctgcctcccgtaggagtctgggccgtatctcagtcccaatgtggccggtcgccctctcaggccggctacccgtcgaagccatggtgggccgttaccccgccatcaagctgataggacgcgaccccatcccataccgatggaacctttcccggaaggacatgcatccaaccggagcatccggcattaccacccgtttccaggagctattccggtgtatggggcaggtcggtcacgcattactcacccgttcgccactctcacccggaggcgaacccccgggatcccgttcgacttgcatgtgttaagcacgccgccagcgttcatcctgagccagaatcgaaccctccacaaaaaaccatgaagagaaccgaaaacgactctcacaagaaaattgacgatcgccttataaggaaaggcgcatcgcacgaaaaccccaccgtccttcaaggcctcccggccactcgccgaaacacggcgagccgacgatggactggcaatcattgactataaagaagtagtacagatacgctcttgagttctcaaaccaccaccgcaccgcacgggcccccggcaccggccggaaggcgccgccgtcgggcagcaaggaagaaacttacacgcatccgcccccgcacgcaaatccgccccgcaccaccacccccgaaacccttgccccgcaacgcctcccccggcgtgtcgcgaacacgcgccccacaccggcccaccgcccgcaccaccacccacacacccaacaccacggcgtgtcgcggagttgccatcccgctctcagccacgcatcctcacggcggcttcctcaccgaagacgaacggcaatacgtaaaagacgatgccgtggcaaccatccgatcgtgcaatcgcacaatcgtgacgacaacgacggaacaaccgtccgatcacatgaaaagggggatgcgacactacgcctcatccggaccgaccaccttgaacaggcaccgccgaaggccggcatcagctgtgatcaggccttctcaaactacgattctcaggaagtattcagacttcatgcaggggtataacagtattgcgcaagaaaacatacacgtagcatgaccatcatgttggtacgggacgcaacgtgcgctttgagtctgccttgctgaagtgcgcgtcccggccaacgtcgacgtcggcatgccgccggcgcaacaacacagagaactggagaagtaccgcatgttcgttctcaagaacgcatgggccgcgctcggacgctgcaagtggcgtacggcgcttatcgccctcatagcactgctggtgtcgttctcggcagccgtggacctgacggtcctacgctccgacgacaccgccaataatgaaacatatcagtcgcaaaaggcttcggcggtgattcggccaaacgcgcaaaccaaagccaaacgtgacggtgccgactccagctataccgacaactacctgacttgggccaagtacagcgaatacgcaaccgccgtacagaacaaaagcctgaccttcgaatacacgcttgccacttcggtaccggtgaggcagagcaagtcgctgactgcgatttcggcaaaaaccgacaccagcgaagacaagaccggcggcaatctgacgctgcaggccttctacactttggatgcggcgaaactcaacgaatacggtacttacaaggtgaccgaaggcaagcatctgagctataagacccagggcgacggcgcactgatctctcaggcattggccaaaaagaacaacctcaaggtcggcgacaccatcaccgtcggcaatccgaccaacgcatccgaaacctacacgttcaccgttcgcggcatctacgaatacaccggagaggcaccgtccggcttcggttccgacgccaaatacgccaaggacaatcgcgaaaacgtgatctatacctcgtatctcacattcgccaaggacggcctggacaccacggatgccacaggttgggccaagccggacctgaacatcatcttcacgctgagcaatccgagcgactacagcaccttcggcaagctggtgaagaaggccaagctcgacaccaagacgtatgagatcacctcaccgtcgctgaccgcatacaagcaatccatcgcaaagctggattccgccgcctccacggcacgtaaggcgttgccggcaacgctgatcggcggtggactggtgctgcttgcgctgattctctgggccgcaatcgccggccgtcgagacgaaatcggcatggccatggtgacgggcgtatccaagggacgtctgggatggcagttcatgctggaaaccttcatgatgaccgttcccgcttgggcggtcggtttgattgcgggcgcattgctcgccaaaccactgggcaccgcttgggcaggcggtcatgccgtggcgatcacatccgcttcggtatggaacgtaatctggtgcggcttgggcgcatgcctggtattgggcatcatcgcgctgattcgcgtactgtgcttcaacctgaatcaactgtttgaaaaccgctcggaggtgaaggcatgagcgacaaggacaacgaactcaacgagaggcccgatgaaaccgtgaccgaagcggaaacgaccgaagcggtcgaaacgtcggatgcagccgtcgaatcaaccactgaggcaggcaccgacgccacgaccgatgtcgatgcggcatccatcgatttcgatgtcatctatgatgacgatgaagacgaaaccgacgccgcggccgataccgaatcctccgaaaccgtggacgtaccgtcagcagcggagcagaacgacgagacggccgacgctgacatcgtcaaagacaatgcgaatcgtgtcaacgagacgctggcgttgcacaagtccgacgacatcgaatcactggatgcgcgtgcaaccgcggcatctgattccgcaacgagcgtgtcttcacggctgaaccgtgaaatcaagcgcaccaggaagaaggacgccttcttcctgaagtcgaatccgacgttcgcgctcaaccatgtgacggtgacgcaccgtaagacggggcgtaacattctcgatgacctgtcattggcgttccaagccggtgcaacccacgccgtgctggtggatgccgaagacaacgaacagcatcaggcgctgctcgccacgatggtgggcatgattcgtccggatcgcggcaatgtgatgaacaaaagcgccaatctgaacgaagtggagccgctggacgtgcttgggcatcgcatcggcttcattccgcaacgtttcgccgtgcgcggtgagctcgacgcggaaagcaacatcctctatgcgatggacgcttcgaaccgcaatttcctcaagccgaagccggtgatcgcgcgagagctgctcaaacgagtgggattcaccgaggcgacctccggactgccgatcggtaagctgagcgaactcgatcagcgccgcgtggcaatagcgcgtgccctgtgctgcgaagccgaggtgatcgtcgccgacgagccgaccgtcggtctggatcgcgacgaagccgccgaagtgctggcgttgctgagcaagttcaagcgtgatgcggatcgcaaacgcgccatcatcgtggtgaccgtcaatccagaggtcgccgatgcgatggagcatagcgtagaactcgagtaaacgcctgtcccgccttatatggcgaacagatatggataatcccgggtatgagatgttgaaaaccgttgggcgatcaacatctcatacccgggattatccatatcggatgccttggtaacgccggatggcctcgcatcggatggcctcagcaaaagacgaatccgccccatgcgagacggatagacgcctattcgacgacccgcatgtggtattgagcggccagaggcctgacgtccaggatgccatagcgttcgagcagatgcagccactcacgcttgttggcttcaccgaaacgggcggctttgcgggtgtaggcctcggcggtgaggaatttcggcggaatcgacttgctgttgtacttgtcggccaccatcacgacctcttgctcgagattcatcggcacatagtcgtccggcggaagcggaagattctgtgcgactacggcttccttagtgaggccgacgccggtatggttgcgggcgaactgggcgatggattcgtccacgcccccatccagcagatattcgtagcctttcagcccatgctgtacatagtgcggcccgtcgaatttgagcggttcaccgtcggaaccgtcctgcttgagcagaaagtacgtgccgatatcatgcaacaggccgccaatcaccaccatatgctcgtcgatcagacgcggcggcaccatgccaccggtgatgccgtcggttggcggcacggccggaatgtggagcataccgaacgattcggagcccgagatggcagggacgccagcacccccatccggtttggtgccgccgatctcacctggctcgtcggaagtcagcgccaagccaaaatcgccggtcttctcaggcacatccgcaggcagggtgcatcgacgcatgaacagggcgttctgacgacgggccatgcggcgggcgatgtcggccacgaccacgcaatgaccatgaatcaggtcataggcggcctgcgactgcgcgattttcttatgcaactcatccacttgggcgagcgtagggatatatccggttgtcatagggctcatcttagcgtccgaacgctcagccgctccgattacgctacgaatccaaatcgaaagtcagcccctgcacaaaccggtcgggaaccggtcggagccgagccgcatcgagcgaacggtccgaagacattccgcatcagatggaacggatacggaattcaccggtgcgattggaggcgacaatcatccggtcgttctcaagacgggtccagccgtcttcagcacgctgttcgaaaccggagctggccacgaccacgcccttcagccgggcagcggattcggcggggacggcaccgccatcgggaacctgagcaccctcatcaagcgcacggtaacgcagtacgcggtaatcatgggcctgctcgccgcgaccgtactggtcgtaaatctcgaggatgcgcttggaagtgacctcacgacctgccgcgcacaaggcgatgaactgatcctggctctgaatcatgcagttgtagcttgacttcggatagctcttgcgcaactcacgtacggcctgggccacagcctcgtcaagcgcgaagccaaagccgatgtattgcaggatcacggcgaagaagatggccgaatcggaacggccgccggtggactgcacgatgttcgggtcaaccgggaaggaacggttggtgatgatgttacgcccctgatcatcggagatgtcaccgttgtggatgaagctcaagccgttggcgtagaacggctgctgattctcgagaatcagcggcagattcgagctggccagacgcagatgccacaggccgcctcgggccggggtgccggcaagctcgtcgaaaatcgagtcatgacgggcggcaatcgtgttcttgtagatcgcggtaccggtttccggagaaggcgcgccaccgtcacgacggtacggggattcctccggaacggtgaccaaggcggctccccagccgtcattatgcacctcactgagatcacggaattcgcgtacggcctgcatgccgagcacaccattgagactggtgttgctgcctgcggtcgcgaatccaagtaatctgcacatggttagaaccataccgacctcacatttcgacgcgcgtacactgctatcagcattccttatagcgggcggaaatgcaacgaaccgctacgggcggtgaaatgcggcggtcagacgcgcttgagacggggaggacgctcggtggcgaggaacaacggctggatttcgaccagcggattatagggggcgagcccgaaccatttgaccggagacccggccaaccggcgaatcgcatacttgatctgcagagacaccgcgccacgttgcgacaccttcgattcgggcatcagcgccttatgaatcagcacgtaacgaatcgggccgatattgacatcggcgtccagcttcggataacggctttcctgagtcggcagatcacccgatttcaacatgtcgttcataatctgatgaatgtaggccggcaaggactgcgcaaccttgaatcccagccggatacgcacccggaacagaaaatccgtaccgaaattctcaaccgaatattcgcgggtgaacggctcgtcggcggtttccacggaaacggcccaccatgcacgggcacgcttcggatgatcggcgaaaatcgagaagaagatgtcggtatcgacacgtttcgtttccggatcggatgtcagatagacgatgttgtcggcgaaatacggcacggtatcgtcgtcatgcagctgccgcagcaccggcaggcagtcggcgggctgcatgtgccggcgttgcgtacgctccagcttcgtaccctcgttccacgtatacatgatcgtcagaatcgccagcgtgagcagcatggtgaaccaaccgccgcgcaggaactttgccatggaagcgaagaagaacatgaactggatggccagaaacagcacggtgaatacgatggcgccgaaccgtctgccggcatgccagatgtagacggccagcagaatcgtggtggtgatcatcgtgatggtcaacgccagaccgtaggcggctgaaatatgctcggaatcgcggaaaatcgccaacacgatcagagtagccgcgcaaagcaccccattgacgaccggaatgtagagctggccgcgcgtacgggccggatagcgcacctgcagatggggcatccagttgaggcgggtggcttccgacaccatggtgtaggcgccggtgatcagggcctgcgaggcgatcacgccggcagcgacggacagtatcacggcaatgtaccgtacggacggggtcatcatctcgaagaacgggttcagaccgtgcatgcgccggtaggcggaatcgtcccaatgattgagcatccacgctccctggccgaagtagcacagtaccagtgcgatcttgatgaacggccaagtgcagtagatgttgccgcggccaacatggcccatgtcggaatacagcgcctcggcgccagtagtcgacaggaacacggtgcccatcacggcgatgccggccacgttgtggtggctgaacaggaagcggacgccatacaccgggttgagcgcggcgaaaacgctccagtcgttgctcagattcatgagccccacgacggccaggaacgagaaccatatcatcaccacggagccgaaagtacggcctatgcgctcggtgccgtgcgattgcacggaaaacagcaccacgatgatcacgacggtgatcatcagcgtaagttccttgttctccgtcatcacatgttccagcgcaggcaacgtttccaagccttccacggcggaactgatcgataccgcgggagtcagcacggaatcggcgaggaacgccgcgccaccgagcatggcgggaatcgcaagccatgcaccgtatttgcgaatcagcgaatacagcgcgaaaatgccgccttcgcccttgttgtcaatacgcatggcgatcagcacgtacttgacggtggtgatgagcgtgatcgaccagaacaccagcgacagcacgccgagcacggcttcgcgatcggcgttggccaagccgccctgaccgttgaggaaggtctgcatggtgtacagcggcgaagtgccgatatcgccatataccacgccaagtgcgaccactgccatggaaaaggtgattttgtcggggccggactgcagtctgctccaccagcggcccagacggcctctactggccgcctcatcgagcttggcggcttcctgctgcttttcctcgtgctgtttgatgagctcctggcgctcttctttggtcaggaccttgtgcgagaccttgggcgcctgcgtataggccgctgcgtggagcaacggtttctcttcgtctggctcgttcgccataacgcttcctccaagtggcgggccttccaacccactccccaaaataacacgcaaggcggcacactaggagcgccgtgggcggttgtcaaatcctcaggcccgattcagccgtcgacaatcatgttcgacgtgtgctcagcaccatggcggctctctcaaaacccttagattccatacactttgcgcgtagtctcacgagtggcgcgcgcaatttcagccaatggcttatcaagatagttggcgagcgcctgcagggtgtacggaatcatatatggcgcgttggtgcggccacgatagggcatggggctcaggtagggcgcgtccgtttcgaccatgacgtggtcaaggccgacgagtttgaccgattcgcggatgccatcattgcctttgtagctggatgtgccggaaaggctcaggtaccagccgttttcacgcgcgatctcacccatttcggcgtcgccggagtagctgtggaatacggtgcgttccggagcgccatcggcgagcaaggtttcgatgacctccttgtgggaatcgcggtcgtggatctgcatgggcagtcccaattccttggcgagtgcgatatgtgcgcggaaggcttcgcgttgaagttccttggcggcttcgccggtacgaaacaggtccatgccggtttcgccgatggcgaccacctgcttcgggtaggtgacggcgagccggtgcacttcggccatggcgtcatcgaaattgacgtcatgccacggtttgtatttgagcggcagtccgtcggggccaggtacgccgcggtgtccatggagcacggattcgttggggtggatggcgatggccgcatgcacgacatcgggatgttcgcgggccatgtcgatggcggtcatgaggttgggcagttcgcagccgcagtcgatgacaccttccacgccgaccgcctgtgcttgggacagcaattcgtcgacactgtagacgggcacttcgggttggcccttttctgcggcttcatggctcatggctcgggagaagggcacgacggaggccacatgcgtgtgattgtcgatgacgtgcgcgtcgtcgggaaggggctgtggggccggggcccagctacggtcgcgatggtgtttgctcataggacctagattagtcccgccagcagtcgttgtagtcgagaccggtaagaagttccactgtgttgcggatctccggttttacgtcggtcttggccccgccatgctgcaggcggtggatttccatgagcagcatgttgtcggtttccttgcttaggctcatgcgctgcgattcgacccatccgatggtcatggcgatggcgaaccagccgagcagtatcgcgccgatgccgatgcgggctgacgcgggttgcgtatcgagtcgggaatcgaagccggtggcggccagcacgaggcccgtgccgatggagagcaggccgctgcacagctggcgtacaaaggtctgtgcgccaaggaatgtggccgaacgataacgtttggtgacgatttggtccacgtccgctatataggggaagacctgccatggcaggtagccgcatagcgatttgaaggagaagaaccagaccgctccgatgatggtgaacgccgtccatgcggcgcgtgacatcgtgcctgaaagcatccagctggcaaacatccaggccacgccgatcaggcatccggcgaagttgatggcgtacagcctgcgtggaccgatcctgatgatcgcccagccgaagaccggcataagcggcagtgagatcacggcgcaggtgagcagcatcgaggcgaacgcggccgtgacgccccaatcgtagatcgcgaagaacaggaacagctggccgaagatgtccattggcaccatcaccatgacgtaaaccgtgagatgacgccgaaattccgcgatacgcagcgtggaagcgtattcacgcagcatgacggacatgcgatgcagccagacctgcgtgacgtgacgggccggacggataatcggaccggcggcgatcgtggccgagtctccatcggaatcctcatatatgccgaaccctgcctgccgtggcgacatctcccacgtggaacgccagcagacgaaaacagccaaggcgaacatgagagtgaccgcgaacgcaaatcccatgtatccgccgggatggtcctcccccaccgccgagagcacgatgcctccaagcaacgggatcaacgtgccggacgcggtggagaggaacagccgtacggtggacagcgtagtgcgttcgctgaaatcggcggtcatctcgccgggcaacgtgctatacgatgtgccgaacagctgcgccagcatgacccacaccacgtacactaggcagtacaggaacgtcgggagtccgggaatccacagcaggcagcccacaagcaccgtcggagccacgaaggcgagcaccaggcgccggcggccgaaccgcctgccgatgcggaaccggtagaggttgtcgcacagcacgccgaaaccgagcgcggcgaaagcgctcagaatggcgctcatgccgatcacgctttgcgtcaggccgatgtccatgccgcagaagcgattccagaacaatgccagataggtggcgacgagcgcaccctgcccgccgccgtaaaggtctcccataccgtagccgatggccgatatggcagtgaccttgcgtggttgatgcgattcctgcatggataccgcccgttgcctatgccgtcatttgatggtgatgatgctgaatgaccaggcgggcgcgagatatgcgccgtccgtcagatcgacggcggcttcgaccggtttggtcggcgatgccttgccgatgtcgccggcatacggatcgtcaccttccaacactgtggccgtcgcggcggcgctctcagcgggaatgccgagttcggcgagaatctgactgatgtcgaacatcgccggttcggacatcgcgttgacgatgcgcagataggtctcgccttcgccctcgttccgtgcgacggtaacggtgcgcctcggctcgtcccggacctcttctccgcaggcgatgggttctccatcgatgtacagcttcatggcctgtccgcggtcggagatctcgatatgcacctgccatgtggtgcctggtcgcacctcgttcatggagacttcggtaccggcgagcgcgtagccggtaccgtcgcggaccacctgtacgctgtggccgcggccgagggagacgatgttgtgattcttgccgtcgacgtcgccgctgatcagttgcatgccccagcggccttcgtagtagacgacggtggcgtcgatggagtagtcgtccgcgctgagatcgagaccggtgtcgatgcggcgggcgtcgtagcgtacgtcgccgagttcgatccgcttgccggaggccgtggtgacggtcagatccttcagatcggctttggcgttgccgtcgatgagtagcctcaccgtgttcggcaggtcacggcgtagcgtggtgggtccttcgaccgcgaccggccatgccgtgtcggccgtggtggtggcgtacatccgctgcacccagtagctgtatggcaggtagacgcgttcgttgtcgaagtagatcaggtccggattccagctgtgatgtccgtttttggcgaacagcggggcgtaggaggacatgaccaccgcgtcgccgttcaattccatgcgtcccatgaatgccgcctcggacaggccgttgatcagctgtgtgttccaggatccgtattctccgagatagattttcgggcctctgcggtccgcgtcgtcgtaatggtcgaggttgtggaaccaccagctggatgactggtaggagtgttcgtcgacgatcggtacgccggcctcgcgcgcgtacttccagccttcctcatagtcctgaccgcttggggccggcccgacggtgccaacgacgacgatgtcgggatatgcggccttgatcgcgtcgaagatctgctggaaacgattcttgaacaccgggtcgatgaggtcttcgttgccgatgccgaggtattcgaggccgaatggctcgggatgtcccatggcggcgcgctttgcgccccattctgtggtgacgtcgccgttgcagaattcgatgaggtgcagcacttcatcgatgtaggacggcatgtctttctgcgcgatcggtaccggtccttggctggtgttctggcagctcacgccggcgggcagtaccggcaacggctttgcgccgatggtttcgcacaggcacaggtattcgtagtagccgatgcggaatgactggtggtagccccataggttgaagttatgcgggcgatgctccacttcgccgatggtgcggtcccagtggtacatgttgtccatgccgagaccgtgcgtgatgcaaccgcccgggaatctcatgaatcgcggatgcaggtcggcgagcgcctccaccaggtcggggcggaagtgtttgagaccttggtaggtggtgcgtggttcgagcgtgacgaagtcaaggtcgatggtgcccggttgggtgaatgtcaggcgtagcgtaccctgcgtggcggctcccgaggcgacgagggacgtttcgatcctgttccagacggtgttgtcgatggtgacggaagtttcagcgagcacgttgccgtcatcgccaagcagagcgatggtgacgggcatggaggcgccagcttcgacgcgcatccaggcagagcagtcataggtttcgccggtgcggaagaccatgccgtcccagccgacgttttccaacgcgacgggtgcctgctcaacttcgattgaggcgtaatgcgggttttcgcatgccaccggatcgtcggtcagtacgtcgaaggcggcgaatgagccttccggcacgactttgcgccagaaactgtagttgctccagtcggcggcatcggcgcgattgtattcgaaggcgccattccgtacgaggtcggcgttcaggccgccgtcgccggagtagctgatgtcttcgaagaaaatgccccacaggtcggtgctgatgttgcgtacgcccgccttgttcaggattgcggtgagcttgtccatgttcttgttccttttctcagaggggacggatggcgaaccagagtgcgccgtgggcagggatggtcccgcggatcacgcggtcttccccctcgccttcgatgcgtatgtcggatggggtgccgggagcgtctgcccacaggtcggcaagtgtccagtcgcgattccggtcggcgatgccgacgaagctttgcagttggatgttgcctttgagctcatagggttcgtcgccggtccagaagatcgctccataatggctgcccggatgtgcgcaaggcgtgccgtcggcccatttgaccgcgtcggcggtccatacgatgaggtcgccgatatagctgtcttcgacgttccattcggaaaacagccgttcgcgcacaatctcacggttgttggcggaaccggccgtcacttcacgcaatgcgggattggtgagcagtgcaatcgtgtcatcatcgctggtaggcagatcgccgccgaccatcaatggcgaacggcccatgcaccacaatgtcagcagcgtcttctgctcatcgagcgtcagccgtgactgccggtcgtcgccgcgttcggcacgcaatccgatatgaccgagcggcagcatgtcggcatcggcccaatggccggtccgttgcagcggcgcccaacgtgccaggcgagggaattgctggaagatgtcttcccaccgatcccacagatcgtcggaaatgcgccacatctgcgcaacgtctcgcagaaaatcgacatgcgtgctggccacccagccgcccggcgacagcgagagcgtgatccggcggccataccgcttttccgccttcgcgatggcattatggtaggcctcgatctcttccgggaagaatggcgtctgcatgtcatcgaccttcagaaaatccaagccccatgaggcgaacaggtcgacttgcgcgtcataccaggcctgagcgccggcatcaccacgcttcagaccgtagttgtcgtgattccacacgcagttgtgctcggtgtcggcgacatcccgcgcggtgagatcggtgtctttcaccggcagattttcgtgtacggcctgacgcggaatgcctcgcatcacatgcacgccgagtttcagaccaagctcatgcaccgcatcggcgagcgggccgaaccctttgccttcggcggagctcgggaaacgacgttcgtcgggcaactgccggccgtattcatcgatgcatagtggcgtaccgtcggaatatccgtgggcgtgggcgttgggatcgaaccaaccggcgtcgattaccagcgtgtcccagccggcggccttcagatgttccgccatgaatcgcgcgttggcgagcacctcgtcttcggtgatcgtggtgccataggaatcccagctgttccagcccattggtggtcgccaggccttcagcgatgtgtcaggcagtgtcgtcatcgagccgctcctttgtttgtccgatctgtgcgatcgctcggcatacgttccgtattccatggtcgcaatcgtcggtccttcccgacaatcactatatgtaacggtacatattctaataaggtttcagcatcgcacaacttgcgcaaccattcggtgagtctgctgatttttcagcatttttcagataagaaactccgattttacagcaacgaaaatatataatatcgttacatataatcagtagttcattcatcgaggaggccatctatggcaaccagcaagccgacgctgcgcgacgtagccgccgcggccggggtctcccccatgaccgcctcgaatgcgctgcgcggcaaaacgggcgtcaaggaatcgacacgggctagagtgctcgctgcggcgaaaaagctggattaccgcatcaatctgaccgccagcatgctgaaatccggccgcagcaacatcatccacgtcatcgtcaacgaattcgactcaccgttctattcgaaactcacgcaggcactgagcaacgaaatcgtggcacgcgggctcacgccgttcatcgaacagacgcgctattccgccgacgccgccgcgcacgcgctgaccagcaatccgttctccggacaattattcgacggtgagatcctgcatgccaccggcctaggtacgaatctgccactcgccaagctgaacggcggcaggccgttcgtactggtggacgcctgcgaggagacaccgaccgtcgatgccgtgaactttcccaacgaggaggccgaacgcgcggcggcccagcatctgatcgaccatggatgccgcaaaatcgcaatcgtgggccatgcctttaccaaacgcgccgacctggcccacgcgcagaacgcgtttctgctgcgtctccgcggcgcgtgcaacgcactgctggacgcaggattgccatatgacgaaaccaccgttttcgaagcgggcagcgccgaagacggcatcgccgcagggcatgcgattgcgcagcagattctggcgacgcgcggaaacgccgacgtcggagacggggccgacccgccattcgacggcgtatgctgcgcgaatgatttcgccgcgttcggcgtaatccggggtcttgccgatcatggcatccgcgtaccgcaagacgtgcaggtgatcggattcgacggcgtgaccagcggatcgtacgccacgccttcgctgagcaccatcgaggtggatctcaatcagcttgccaagttcgcgcttgacatgatcgccgaacgcgtcgaacgccgaggagaagaggacgccgatccgttaccgccaagccgagccacaatcggataccaactggtggaacgcgaatccaccgcgcctcacctcctctaaacaccttcccctgatcctcgagccatcttcccctgacggggaaggccacagacaaaggaacacccatgaacaccaccacagaagcctacattttcgtgcatttcatcggcgacgagaaaacgccgaccgatgaacagctgtatttcgcgctgagtcgcgacggcgtgcactggcaggatcttcgccccgccggcaaaccggcattgcaatgactgaacggcgaacagggtgtgcgcgacccgcacatcacacgcgacccgcgcggtgggttccatatcgtggccaccgatctgagcatctattatcgcggcggctgggggccgaacgacggcgcgaccacgaacggctcgaccggtctggtgatctgggactcccccgatcttgtgcactggagcgaaccgcgcctagtggatgtcgcctccaagattccgggggccggcatggcttgggcaccggaagccaattgggatccggtccgcgaacagtggatcgtgttctggtccacccaatgcaacatcgaggaaccaggcaatccgctggctaacgagttgggcgacccgacgaacgtgtattacgcgaccacgcgcgatttcgtcacgttttccgatccggtcaaatggatcgaccgcaagaacgtcatcatcgactcgaccatgctgctcgacgatgatggctggtggtatcgcgcatccaaggattcggaaatcaccatcgaacgcacgcgcaacccgtacgcggtaacctacgaggtgttgcgcaccgacgatccgaatgaatggtcatatgtgggcacgctcaccgacatcttcggcaatgggcgttactccatgcactatctggaaggtccggaactgttccgctacaacgatgcggacatacatgaagtggccggaaggaacatgccgttcggcctgatgtgcgatcagtacgcggaagccaagggttatctgtcgttccgcaccgcttcgctcgcctcgcacgatcccgccgattggcagcgtgccgacgatatcgatttcggcactttgaagaagcgtcacggtgcgattctgccgattacatccgccgaatatgacgccgtgcaggccgccttcagcctataaggattggaatgtgacgctcgtccgggcatggaccggacggctgggccgtgcacgattcgccctgaaaggtcctcaggcgaatcgtgcacggaggccatatgttagggagcgtatattcaggtcttttgccatcttgcatggccgatttccctatcattaagccctccatctcacatatgaaaaacatgattccccaaaatgtcgattctgggaaatcatgcatgcatcctgtctcctatgtatgccgaatggcgaagattcgggccgaaggacactcggtggtagccgcggtcagacgaacggtttccggatcgagccgttcaatggtccacggcttggtttcgggtgcatgatcgggattgcccggatcggggaaaatctgttcgatctcatcaccttgggccaaaggcatgcagagggatggggtgccgcctcgacgccagatgatgatgtaatcagtctgagggtccgtatccgatgagccgccttccgtctcgctccgccaacgggaggcggcttccgtatggcgcaggccggaggtaagccactccgcgttgaaaccaggcagaccggcgggccagaacggcacaagggcggactgttcggcgagaattcgccgatgcagggcgatggcatcgcgcaccaagctcagtcgcggttcggtcatgcgatcgatgaatccagacagatacaggcggcccatcacgccagtcgccagtgtgaacacggccgtctcatcgttcatttcctcttgggcgtaaccccagttgccttgctgttccggtggaatcgtcagcccggccccggccgcaatggcggcgtacaccagcggatcgcactgatcggaagtcgactgcaggtccagccgcgacagttgcgcgtaatcggcgcgcatggctccggaaccgcaattctcgatcatcacatccggatggcggcggcgcaagtcatcaagccaatccaagtaggcgcggcaatgcgcgagcagaccttcaccggccgacccggcatcaacatcggtgccgactccgggaatggtgttgtaatcgaatttgaagaagaccgcaccgaaatcgtcgatcagccgatcgacggtacgcgtgacatgcgcacgggcctcgggcgaacggaaatcaagcagatagcgcccggaatcgcacacgcgcacaccatgacgctggaagaaggcgttgtccggaagcgttttggcgagcggtgattgcacaccgatcacctcgggttcgagccacaatcccaaacccatgccatgctcgcgaatgatgtcggccaatccctgcaatccgacttcgccgaaacgattcgtggaggcccgccattcgccgaccatatcccaccagccgccgtcggtgctgtcataccagcccgcgtcgatgcagaagatgtcggcgccgacgcccgctgcaccttcgaccagtggcagctccttgtcgatgcgagggtcaccgaacaacgtattcatataatcgttgtaaatcaccaagccttgcgttcgctcgaattccgcggtacgacccagctcgcgggccttggccgcccgcagggcgcgacgttgcagcgtcatttccgcgacggcatcctgccagtcaccggcaacgatggcgaacgataccggcacggattcgaaatcgttgccttcgcctagattcgtaaaccactgatgatcctgatattccggaccgaacgcggcgatatgcagacccggatcatcctcgccgacctcccattcccacggaccgttgtgctcgatctgccacatcacggaaaagtcgcggaccttacgggaacggtgacgcttcgattcctcaacctgcacgatgcccgccggttcatgcatgccagtgctccatgtggaggtggagctcagtgcgaaacgggaactggattgaccggggttgatgcgctgattgcgatcgcgcacgctggtttcacgaagcggccgcatatgccagtcgttctccacggcccaagccgcgtcgccccagagcaggtgggaactttccaccgttccgccgttaacggtcaagggcacggtgaggttcatggaggagaccgcctcgacggagaacggttccggcgagcgcaacctggtgtgggtgcgtacggccgacagacccggataggcttcaaagacgctggttacggtcagaccgggttgaggggcatccgtagcgttgccgggaatcgttggcgatgcttcgatgccttgcgcccgttcgcaatgcggggaaggggcagcgtcttcggaagggcggtcccgttccgtggcaacgggttcgaattcgcggcccatcggctgaagcgcatcgtaggaggcgaattgggtgatttccaaacggtacggatcgccggaatcctctgccggctcgctggcatgggccgaaacgaaacgcaacttgccgccggcaacggtggctatcagcgatagacggttgtcttgcgatccggtgttggcggcgcgtacctcgacgattggccgcgcatcgcgttctaccaccgcaacagcccccgataagccctcttccgcggtggccatgcctcgaccggcgacattggcaagccggaccggggagtcccccgtaacatcaaacagcatggaaatcacgccattgccccatgcaagacgaccgtccgattgaggaagcagtggaatcatgttgccatcggccatagtgcagctccttcgctctccaacattcgttggacaatacgcatcgttttacgcaataaacactagcttacgcagtgcatgcgagggggcggtgcgcgtgtgtccgctcaaccgagcatgcaatcccccgatatgagggccgtatggccaggcgtcagcctctcttcagcccgacagcatgacgatcagagcggaaaaggctgccgcggcacggccaaccaagccgaacgctactcgaatcgcagatattcgacgaatctgaccggcatctccttgctcttggtgacgttgctgaatccgaggatcatctgctgctgcggcaatcctttgacggacttccacaccttcgacttggacaggtcaaaccctacggccttcttcacatccgtaaccggattgcccttggcatcgaccagcgaatccttgatccgttccagttgcgcctcgcccattatctccgccggcttggtaatgtcacctcgattattgacttccgcgaacgtatcggcatcggtgacgatcatgttgatctgcccggcggagaccatggcgagcagacgtgcggaaccgtcctgcgtattttcggaatcaccgagggagatggacgtgtccatttgcaccagccggctgtcggagatcttctccgccttgacgaagtcggagccgagccggtcgagctggtcggcgtacccgtccatattgatgccttcgacgctcagttcggcgcgtggccccttggtgaggtaggaaacgccgaacgcggcgacgatgacgaccacaacggcgataatgacggcataggaaagaaagttttccttgaaatacggccatttttcagccatcggcaactcatgtagcgtcttccatttcgactgcttcgcgtacacgttggatcgggaaagctcggctacggccgccttctgctcgtcggaaagtgcatagtcatcatcatgccgtccatcggccatattgatcctcgttttcatcactgccatttacgcattctgcgggcagtctacaccatcgcctttcgttttcgctgggggtatggactgcccgcagaattccgtatgccgtccaacgggatgttggccgtcaaacgtcagctgcgcaggaacaccgtcatctcggtttcgccacgattggcccatgcgaaatacgggatcagcgtgacttccgtcggttgacgttgtgccggctgccacagtgcgtacagcgacttgtcggcggcgccctgcgaggactcacgccaagcgggaatggtcagcgtgaccatcggcagatcgaccggttccacttcgcccaagcctcgttcgtcctgtgcggcggcctgcgcatggaaggtgatttcgttgactttgacggcgtccggatcggcggcgatcgtctcggcatcagcatgtagcagatgcagattgtcaccattgtcggtgccttccgcgcagtaggccagcgggccgcggatgaaggcgaccttgcctgcgtcttcgcgtacgagaggattggccgcaatcatcctgaccggcatggggaagtcgaaatcgatgacgtcaccgtcacgccaagtaccggtgaggtagaggtagccgtcatggatggtgcgtgtgatgcgagaatccttctcacccgtggcatggatggagtcggcggccgactcgccaccggcccaggcaggcaggcgaagggccaaggcaaaggactccggaacctgcccctcatcggaggaaggaagggtcacggtgatggcgccggcgccattccaaggcataccggcccgcacttcaagggagacatcggaaccgccgagtttcgcggacaccacgccacccatatacaggtgcacatacagcgtggaggcatcgtcggccaccgtgtaggcgtactgttgcacgctttcgaccatgcgggcgatgttcggcgggcagcacgcgcagccgaaccacttctgacgtaccggcttgacgtggaacttgcgttcgtcgcgatggcaggcttcgggcacgacctccaacggattcacatagaagaagcttttgccatcgagcgccatgccggccagcgtggtgttgtacaaggccgattccatgacgtccgcatattcggatttcggctgaatctcaagcatacggcgcgcaaagaacgcgagtgcgatggccgcgcagctttccgagtaggcggtgtcgttcggcagatcgtagtcgaaggagaacgcctcgcccatatgcgtggcaccgatgccgccggtgatatacagtttcctgtcgacgatgttgcgccagagcgtctcgcaggattccagcagtgttgcttcaccggtgattctcgccacgtcggccacgcctgagtagaagtaggcggcgcgcacggcatgaccgagcgcctccgtttgttccgtgaccggcttgtcggcttgatagtaggcgtagttctgttcacgtggctcgtagttgcgaccgtcctcttcggcacggcggcgatcttcgagtgcaaagtacagtggttgctggccacgctgccgtacgaagtattcggccaggccggcgtaacgggtctcgccggttaccgcagccagcttcaccagcgccatctcggcgatctcatggcccggatagccgtgcagcctgccttcttccgtaccgaatcgggaatcgatgtaatcggcgaaacggcaggccgcatcaagtagcttgcgtttgcccgtggcctcgtagtaggcgaccgcgccttcgaccagatgcccgaaacagtacagttcgtgatggtccttcagattggtgaagtggcggtccatgccgttgagaatgtagtaggtgtcaaggtagccgttgtccagctgcgccgcgcacacgatgtcgatggccgcgtcggctgtggcctcgagttcggcgtcgggatgatgggtcagcgagtagccgaccgcttcgatccacttggagaagtcggtgtcttggaacacgaatccatagaatttgtccgggtcgggattggccgggtcttccggcagcgcctcgaagcctcggaaggtgtatttcggcggcacgaaggccttgccctgctcgtgatgctcggcattctgcgcggccgcggccttgaagttgtgcatgcagtagctgggggcggcaccgggaacgttgtcgttcaacgcattccactgatatggaatcaccgcggtgcgtacgagctcctgctcggcggcccagaacgggtcggtgacggtggcgtcgcgcagcgcgattggatggctgtggcggttatggatgtcggtcacgagagattgtccttccgtgcgggggttgtcgtaccggcagggccggcgttctggtcttgtccgatgggttcgagcacatgtacgtccatgccgggcagtcggccccacgagtagacggccatcatggtggcgaagatgggcacggccacaccgaataccatcatcaggccgggccacatgtagtatgcccagacggtgatgaggaaaagcagcagcaccatgagactgcagagcggtcgagcgattaccatcgacagcgaagtgcgtaccacccatggcgccttctcgtcgaaattgacgtgcacggcccagctgaggaatgcgaacaggccgtagatcaggttgatgaccagcagtgcgccggaaatcgcgaatcccacggtgcctaggtcgttgtgctgcacgaaccagtattcccagatgaggagcgtccagatgagcaattgcggccatccgaacaggttggcggagccaagctcctccagccatgcctgatggaaggtgctccaggtacgtttgaccgtccatgagcggtcgtcgacgtcaagcagccaagagcggaaggtggcatacgatgcggcgacggaggggaacaggcctccgacgatcaggccgagcaatgtatgcgccacgaaggcgacgttgacgacgacgatcatcatgatgatgcggcagaggaattcgtagccaacggcgaatcgtttcatggcactacctcgttgtatcgcagtttcgttgaaatcccaatatttctatcgttataaccatataccatcccaactgcacgacgtgcgtaaagatggagaattcattccggcaccaggagaagatgggagcgttgccggcatgaatccgcctcgggaacggcggcgactagaggccgttgtcccatgaatcatgccatgtgagcgcggcgtggcgctcatggatggcaattggcagggtgaccaactcggaattgcccaaatcgtccggattccagcggtcgccgacatacagaaaacggcttgcgtgccactgatcatcgccgtcgagcggcacgatgacgtcgcactgggactgataggtatgcgatccctccggcgtgaatggcctgaaatcgctccaggggccgtgcaggttggtggctgtggcgaccatgttgtcgttgcagtcccagccggtcagttgcgagccgaaccagtagtagactccatcttttttgatgaggatcggactttcgtaaccggcccagtaatcggtgccacgcaggcagatcacgtcttcgacgattgccaggtaatcgtcggaaagacggtagatatgagtgccgtgcggacggtcctcgctgatgatgtaaccggtaccgtcctcgtcctggaagacgccgatgtcacgtgattcgtagccacggaactgcagtgcgctcaggaatgcgaacgggccggtcggcgagtcggcgaccgcagtgccgatatgcgcatacgtgtagtcgttttctccgtcgacgtgcaggtacatcacatatgtgccggtttcggggcagcgcatgaccttcggccgttcgatgatgcgccccggtccggtgatcgtcccctcctcgccgacttccagcaccgtgccctcattcctccactccacgaaattcgtggtggaataacaggcgacgccctgaaaaagattgccgtcgttcttgatttcgccatacgcataccagcggtcgccgaaccgttgcacgccgatgccatgcagttgcgcgacgttgccgtcggtatccgtgaacagctggacgccttgcattgttgccatgatggattgttctttcttggtgtggcggaaatgggaatcagatatcgttgtcggggttgtcgatgccgtcgatgtccctgcggtgcggaccgagcaccattcccccgtcagtcgcttcgacgttgtagatgatgccgtgcgagacgagttcgcggccgtttgaatcctttctcgtcatattggtgtgcatgagcagcatcgactgtccgtcgaaagcgcggaacaccatggcatgaccggcatcgcggtaatccagcggggcgagctgcttccatggaccgagcacccttccggattcgctgatggcctgagccagaatgtattgacctttgctatacgaggtccataggcagacaagcgcgccggacggcgtacggatggcgtacgggccgtccgtcacgtatccgccggagccttcggcgatcagccgtaaggcacgatcggaatcgaaatcgccatgccacccgccttgcggagcatcgccatcggactcatgccagacgccttcgctggcggcccacaggtgcgacggctccgatcggcctacggacaggtcggacgcatccaatcgaatggcttccatcgtgccgtcgaacaactgcacccattcgtgcgcgtagatcatccacggtgaaccgtcggagtcaacggccagcgtgccatccaacgccatggtcccggtcggggtggtcggcgattgtggatgaacgggcacgaacgggccggcgggagtgtcggcgaccagcacgaacacgccccgcttctcgccgacggtacggtcgcggcggtaccagtcagggccggcctccgggcggaccggcttgtcgcgacgggcgtgcagggtcacgaacatccagtatcgaccctgccattcgtgcacttccggggcccatggcgaatcacaatcgtcataccaggcccctaccggccggtcgatcacgtcgaacaccgagataggttcgctgaaatgcttcaaatccgggctggtatacagcaccacggatttgccgaaaccgtgttcggcggaacggtattggaaatagttggcgttgtagaggtagtacaggcccgtgcgcctatcggcgagcataaacgggtcatgaaggctgaagtcatgcatgctcagcggataatcgtcgtacatggttctccgaacgtgatggatgaggcggctgacaggccaaccgcttgtatgaaacggcccgtgtggcagggcagagaagcacgcgggccgtttccgtcaggcgtgcctatggctcagcccttgaccgctccgatcatgacgcccttgttgaagtacttctgcaggaacggatagatgaccagcaggggcaaggtggagacgatgatcacgccgtacttgatctgatcggcgagctgctgctgttgcatcacgttctggccaccggagcctgagccgagctggttggtctggttggcgagcaggatgtcacgcagcacgttctgcagtggctgcagtccgctttcgcgaatgtagataaggccggtgaagtagtcgttccagtgccccacgaagtagtacaggccgattaccgcgatgatggcggaactgagcggcagcacgatcttcatgaaataaccgaacaggctcagaccgtcgatctgcgcggcatcatgcaggtcctcagggatggaggtttcgaagaacgagcgtgcgatgatcagattccatacgctcaccgcgcccggcagaatgaacacaagcggattgtcgagcaggccgagggccttgaacagcaggtagttcggcaccaggccgcctgcgaagtacatggtgaacgtgaacaggaacaggattacgcggcggggtttgaattcaacgcgcgacaaaccgaaggcggccggaagcgtgacgatcaggttcaacgcggtgccgaacacggtgtacagaatggtgttggtgtagccggtccagatgcgggaatcctggaacacgcggatgtagccggccacggtgaagcctttgggccacacggtgacgttgcccgcggaaacctgggtctggtcggagaacgaggccacgacgatgaaccagatcggatagatgaccacggccacgatcgccacgatgagcacccaaatgatgatgtcgacgatccagtcggagatgctgcgctgttggctcatatgcttgttccacggaatctcgtccacgctggtcttcggcgcgacggatggggaaacgcttgtgttagtcatgttgtattcctccttgcgattcccgcgagatcagaagatgctcgtatcggatactcgcttcgaaatccaattggcgatgatcaggaaggcgaagttgatgacggtattgaacaggccgatggcggtaccgtagctgaactggaacgattggatgccgattttgtaggtgtaggtggagatgacttcggaacccggcatgttcatggcgttctgcatcagccagactttttcgaaaccgacgttgagcacggagcccatgttcatgatgagcaggatcacgcaggtcggcatgatggtcggcagatcgacgtagcggatgagctgcaggcggccggcaccgtccatcttggcggcctcgtacaggctcaggtccacggacgaaagggccgccaggtagatgatggcattccagccgacgtgctgccagacttcggaaatccagtagatcggggcgatcgcgtcagcgttgtcaagcacgctctgcgagccgaggaaccggccgatcagaccggtttgcggcgtcaggaagatattgagcatggccacgatcaccacggtggagatgaagtgcggcatgtaagtgatggtctgcacgaaacccttgatcttctgcgaaccgatctggttgatcagcagggccaggacgatcggggcgaggaagcccagcaccagcgttccaaggctgatcttgaaggtgttgatcatcgtcgatgcgaacatcggcgaggtgaagaattggacgaaatatttgaatccgacgaacgcaccaccagtcaggcccttggacggcacgaaattacggaaggccagctggatgccatacatcggcacatacgcgaacaggcccacgaaaatcatcgccggcagaatcatcagccaattctgccaatagtgcttgaaatgccagcccagccgcttgaagaacggccatgacctgcgtaccgcgttgttgtcgaccacgccgttctcatcgacgacggagactgcttttctggacaccgtttatgctcctttttcatctgtggtgcgaaccggtggggcgggacgattccgccccaccgtcggaatcgtctgacttacttgacgtacttgtcgtacgccttctgccagatctcggtgttctgttcgatgttgtacttcttgaggttctcctggaaggtgttccactgggagtcatcctcggcgccgccttgggcgacccacttggacacgactggaatcgcgtagttgaacagcgcggtgttgttgttggccacggtgttctgatcggcttcgctcacacggacgtaaatcggcatgagatccttctcgtggtcgtagttggcgtactgttcctcatacggggcatcggccgcggcgacgtgatccatgccgcgatcgccttcgacggtgacgctgtccgaaacccagccagcaagacggtcttcgaatgccgggaccttggaggaatcctgcgcctcgtggaacttatcggtgaccttgtaggaatgttcgccggtctgctcgagatagccgtcatcgatggaaccatacagctgctggatggagtatttctcggaatacagcaggtcgatgactttcaggcaggcgtccttgttggccgcactggcggacatcgccatgtgatagtcctcgtagcggttggcatcgcgggagccgtcccatacggtgtcggaggcggagacgccatcggccgacggaatcgggatggagatatactgcttggccagttcggaatcgtacgcgccgaaggcggattcatcccagccgaacaccatgccgaccttggcggtcttgccgtcggactggttgcgcgcattgtacttgtcatccttcacggtgacgaagtcggacggagcccagccattctgaatcatctcattgtaaaactcgatgacctggcggaactgctcggtctgcatccagttgccgaccttactgttcttcacgtagatgccctgctgggatgggccggagttgaaatgggtggcgatgccggtggcgttcatcatcagccacggactccaccagtcgccgatcttgccggtggactgttcacgtgggttgaaggcgatttcgtcggcttcgccattgccgttcggatcctgggtcttgaaggcctccatgaccttgcgcaggtcgtcccaggtcttcggcacttcgaggccgagcttgtcgagccaggtcttattgatcatgaaatgctggccggaggcaaggaagcccttggtacggctggacggcaatacggtgaccttgccgtcgacggtcacgaatttcttggcggtcggctgctccttgaagaacgccttgacatttggcagcttgtcgaggtcgttgcccagctgttcgaaggcggaggcgttgcgggaggcatcgtccgggttgaaggcgcggatattcagatcggagatttcgcatgaattaacgatttatcaatcttaaaaattgcaaaaaataatcgcaacgattcgattttcttccggatcctcattatagtgaatgacagcaatacagcagttgcagcgcagcacacacaagaaggggtatcctatggtcacattgaaggatgtggcgcggaaggccggagtctccatgtctacggcctcagctgcgctccgaggcaaagacatcgtcaagcccgacaccacgcaacgggtgctcgaggcagccaacacgctcaactaccgcatcaatctatccgcacgtgcactgcgatccggcaaatcggacatcttcaccatgatcgtgccggatctggaaaatcagtactacgcgaagatggcgaacgccatgtccaacgtgctcacggcggataaaaaacgtctggtcgtacaggtctccatgtacgacagccaacgggaactcgaccagatcaggcagatcgacccatccacctgcgacggcctgttcatctgctccacgcataacagcggcaaagacatacgatccgccgccggcgatctgccggtgctcatgttcgacgacatgagcaccgatccggaagcgtgctatgactccatcgagacgcctagccagacaggcatgtatgcggcgatcaaacatctggccgaacgcggacgcaaaaccatcggcatcgtcggcaccttggggaaaagcgccgaagcggaacactcactgtccgtcactctgaggcagacccgctacgcctacgcctatcaggcgctcggcgcttacggactcaacaccgccaacgcctacatccaatccgactggagcgtggaggccggcatcgaagtggcacacaaactggccgcaagcggcatgcaatacgacgcactatgctgcatgaacgacgaactggcactcggcgtgatgcgcggcctcgcggaatgcggcgtgaacgtgcccgatgatgtagcggtgatcggtttcgatggcgtgggctgcgggtcgtacaccacgccgacgctgtccaccatcgccgtggatttcgacggcatggcgcaaaccgcggcgacgatgatgcaacaacagatcgaacaagacgccaccgaacgaaacaattccataccgaaacgcattatcgtaggcttccaactgctcaaacgcgaatccaccatgggacgcacggccaccaccggcttcaccaccaagactcgtacagaagcaaccatgacggccgatgaatcgtaggaaggctcggcgtgagacgcatagccctgacatatggacgttaccgtcgcatcatcatgatggcgcttgccgcacatgtgacattcatcgcgaacgcgccgcccagacgaccaatccgttccgagtcgcaaaaaacagtacgaaagaaggcatacggtgctgtatccacaatccaatgattcccgaatcgtgttcccacttgatggcgtatgggacttccgcacggccggggaggactcataccccgccgaatgggcggacgctcccctgcccgagccgttgccgatggccgtacctggctcctacaatgaccagaacgacgagctgaacctgcgcgcgcactacggttgggtggtctatcagcgcagcttcgccgtaccctcgcgcctggtcgccggacaacgcatgatgctgcggttcgacgcggccacacacgcggccgacgtgtacctgaacggtcagttgcttggctcgcatttcggcggattcctgccgttcgaattcgacgtgacctccgcactgcatgccggggagaatctgctgaccgtcgccgtcgacaaccgcattgggtcctcgacattacctgtcggcaatgatgcgggaaccgccttcatgggctccgacaatgccaacgttccggcggtggccgaggcgaaaaagcatgcgagacggcagaatctgccgaatttcgatttcttcaatttcgccggattgaatcgccacgtcgaactgtatacgacgccggccgacacgtatatcgcggatatcgcaattacgaccgaacggcttgaccacatcgcaggcgacgcatgcaccgcggcgaacgccctgatcgcgtatgacgtgacgttcggaggagactttccttccaacccgaccgaccccaacaccctgatccagccgtccgatccggcaatcaatcatgcggattcgtccgaatcggccgaatcggacatccagcgcgcagcgacctacggtcgtcaggtacgcatctccatccttgacggcgaaggaaccgtcgtggcaggcgttacggccgacatcgagcgaagcggcgacgggacggcgaaggcgagcggcgaaatcgccatccgcgatgcgaaactgtggaatcctggcgcggcatatctgtacaccgcggtagcggaactgctgccggagggcggagcggaatcatcatcgcgcatcatcgacgcatatcggcagacattcggcatacgcacggtcgaagtgagcggcacaacattcctcatcaacggcaaaccgttctatttcaagggattcggcaagcatgaggacagctacttccacggccgtggcaccgatgacgtactcaacgtcaaggatgtatccctgattcactggctgcacgcgaactcgttccgaaccagtcactatccgtatgcggaaagcatgtatgatctgtgcgaccgcgaaggcatcgtaatcatcgacgaggtgccggcagtgggcatgagttggctgcagtatgcgaatccgctggtcgcggagcggcatcgcgaggcgattcgaggcatgattgcacgcgacaagaaccacccgtgcatagtgatgtggtcgatcgccaatgaaccgggattggatggcgacggggaacgtccgcggcaggcgtatgactactttcgtccgctgtatgagctggcgcacgccagcgacccgcagaacaggccggtcacactggtatgctgccaaaacgactacacgaccgacatcaccgaacgaaccatggatgtggtgtgcatcaaccgctactacggctggtacaacctgagcggcgatcttgatgcggcctgccatgcgctcaatatcgaactggacttctgggagaacattggcaaaccggtcatgttcaccgagtatggcgccgacaccatcgagggcgttcatggcacgcatggcgaaatgttcagcgaggaattccaacgcgattattatgcgcgcatcaacgccgaaatcgataaacggccatggttcattggggagcagctgtggaatttcgccgatttcgcgacgttccagggcatcattcgcgtggaaggcaatcgcaagggcattctgacgcgcgaccgccagcccaagatggccgcgcattggctacgcgagcgctgggccggcattccggactatgggtataaaggctgagagctgagcggtcgaattcacccagtagctggatgaatcaccccgccagagaggccttcagcggggtgattccgccagtggctggcagatttaccccgcttagaggggtgccgatggggtgattcctccagtgactggaaggattgccccgctaagaggcctttcagcgtcccaattcacccagtcattggaagaaacgggacgctgcatgcgtcggcaacgtaccaattcacccagtagctggatgaatcaccccgccaggaggcctttcagcggggtgattcttccaaccagtggaggaatcaccccgctcagggggatatcagcatcccaaaacatccagcgactggaagaaataggacgccaagacgccatctgacgtccgaattcctccaatcgctggcggatttaccccgctcagaccttgatcatggcgtattgcgactcatagaggcggtaatacgcgcccttccgagccagcagctcctcatggttgccgtgctcgacaatctgaccgtggtcgatatagcagatctcgtccgcattctcgatggtagacaggcgatgcgcaatgatgaagctcgtacgccccttgagcaggtggttgagaccggcctgcaacgcctcctcggtgcgcgtatcgatattcgaagtggcctcgtcaaggatcaggatccgcggatcggcgagtagtacgcgcgcgaacgcgataagctgacgctggcccgccgacaacgtcgaaccacgctcctccaccaccgtgtcatatccatcgggcagatccatgatgaactcgtgcgcatgcaccgcacgggcggccgcctcgatctcggcatcggtcgcatcgagcttgccatagcggatgttatcgcgcacattgccggagaagatgaacgtatcctgcaacatcacacccatctgacggcgcagcgactccaacgtcacatcacgcacgtcatagccgtcaatcgtaaccgaaccttccgcaacatcatagaagcgtgacagcaggttgatgatcgtggttttgccggcaccggtcgggccgaccagcgcgatcgtgcgccccggctcgacatgcagatcgaccaggttgaggatgttacggccgtccggttcatagcggaagaccacgtcgttgaagtcgacgcgaccttcgatctgcggcagatccttggcatccggcgcattacgaatctccggctggacgtcgaacgtttcgaagatgcgctcaagataggcggaacaagtgatcagctggttgtagaagttgccgatgctgatcaccgggttccagaagttgttcgcatagccgacgaacgcaatgagcacacccgtggtgacgttcaccgcaccgaagccggtaacgcccacatagtagatgaacgcgatggtcatgacggaaatcgtctggatgcccggccacatgaggaactggatgtgcacggccttcatccacgaggcacgcacatcgttctgctgctcctggaaggtcttgaactgcgccgcttcctgcgcaaaggtctgcgtggtcttcacaccggcgatcgactcgtggatatatgcgttgagattgctctgcttgttggacagcacctgataggcacgacgctgaaaatgctgcaataccagcacccatgcgatcaggaacgggaacagcacaaggctgaacagcgcaagacgccagtcgaccacgaacatgaccaccaacgtgatcaggaacgtgaacacatcggagatcacattgatcagaccggagctcaacgtatccgaaagcgtgttcacatagttgaccacgcggatcagaatcttgccgtgaggccgcgaatcgaaatagctgaacggcagggtctggatatgcgtgaaaatgtcgcggcgcatgtctttgagcatgagctggccgacccgcgtgatttccacggtccggtagcgcagacccagttcgtagatgacgatcagcaccgccagcagtgccgccaggccaccgagtagcgtgagattcttggccggaatcgcactgtcgatcatgattttcgtcagatacggcacgacgacggcgatgcagctcatcatcacgactacggcgaggatgcgggccacacgtgccatatacggtttcagatagacgccgatacgaaggatgtcatgcagattgatctgctcctcaagctcctcgtcttcacgaaatgtgttgcgttttgccatgatgctcctcctcccttactctccgaagccttgcgaacgaccggcctgcaggccaagctgtttgtgatagatctcccagtagcgcccgtgggcggcgaccagatcctcgtgcgtgccgcattccactacgcgaccatgctcaagcaccagaatcaggtcggaatccttgattgacgaaatacgatgcgcgatggtgacgatggtcttgcgctcgtccatctcacgcaaatgctgctgaatctcagcttccgtctccatgtcaacggcgctggtggtgtcatccatgatcaggatcgacggattgtcagccaacgcacgcgcaaggctcaaccgttgcttctgaccacctgacaagccgacgccacgctcgccgacgacggtatcgtagccttccggcatactgcggatgaaattgtcggcgcctgcgatggtggccatgcggcgaatgtagcgttcgtcatattcgcgttgtccgccagcgccgaagccgatgttgccgccgatggtgtcggagaacaggaatgtgtcctgcgcgacgatgcacacctgcgagcgcagggtggcgagcggccagtcgcgtgcgtcgatgccgtcgatgagcacgcggcccgcggtcggatcgtagaagcgggagatcagattgacgagcgtggacttgccggcgcccgtctcgccgagaatgccgagtttcgcaccggccggaatatggaagtcgatgtctttgagaatcggcgtagccggatcgtcggggaaagcgaagctgacgtgctggaattcgatgtcaccgccgatacgttccggatcgtccggagccgccgattgcgcgatgccggtttccggctcgttgccgacctgattgacgattgccaccgcctgtttgacggtttccttggcgtccggcttttcctgaatgcgtgattgcgcggtgagcagtttgcggatcttgatgcaggaggcgttgaaacgctgccagtcgttgatcagccagccggactggcgcaccggaccgtcgatcatccacagatacgaattgaatgcgacgaggttgccgagggtcatgtaacccttgatgaccaggaagccgccaagtccgagcgtgatgagctgcagcgagaatcccaggccatcgagccatggcatgtatcggcggctgttataggcgaggtccatgttgcgacgcatgtagtcatcgttgtgcctgtcgaatttttcggtttcatacggctcgcgtacgaacgccttgaccactcggttgccctcgatgttctcttcgaccatcgaattcatttcggccagcgagttgcggatggcgaagaacagcggatgcgcgtgcgacgataggccgcgcgtgaggatgaagatgaacggcgtgacacaggcgagcgccaacgccaaccgccaatcgatggtgaacatcatggcgagcgcgccgacgaacatgaccacacagtcaagcacctgatagctcacccagctcaaggcgtggcggatcgcgtcggtgtcggaggtcatgcgactcatgatgtcgccggtgcgtgtgtggttgaaatacgtgaagtcaagctcatgcagtttctcgtactcgtcgctgaccaggcggaatacggagttctgtccgaaacgttccatccacatctggtagccgtagcgcgaggcgactcgcacgacggtgaagacgatcatcatcacgcatagtcgggtcagttcgtccacatggccttgtgtgatgacgcggtctacgatgaggccggacagcagcgggatgatcagggctatgacgttgttgatgcagaacagcaccaccgcgccggccacacgcggaaggtcgggtttgcagtatggcaggatccatgtgaggttgcctgcctgtcggttgcgattcggatcgacgtacatacgtagcgttccttcggattgtttgctggtacttgggttgtgtttgggttatgcggccattcgttgccgcaacgattcacgtccgtcgtgtttcgagcgtcccgtcaccggctctctccgccggccgaaacccctgttcggattcgcaaacgcagtttattctatgcgaaccgtttttcaatgcaacacctcttatttgggcgtgtcgcaatcatagtgattccaatacctttaccgttacattttcgatgtgcgaaatacgtcagagaccgcacatcgaagcgcttctccgagacttgcgcgataatgggcgtcgaaccgatgcgatgcgccgatggcaaccatgacggcgccgacaccacgtcaacgaaaggacggcaatgacgacgaacctacgtgcagcatatgcggaaaaatatggtttgaccgatgacatgctcaaggatgcggaaggctggacggaagtcgacggcgatctcggagatctgtcagaggaacgcatcagaggcattctcgacatgcgtttcagtgcgattgcggtggatactccacgctccgaactgtggcacactccggaaagcattgatgtgatcgccgatatcccgtatctgccggatggcggctacgacaaggagaccgggcagtgccgggggcatctgctcgacctgtatctaccgcatgacacggtgttgcgcggaggcaaatcgctgccggtgtacatcgacattcatggcggcggcttcacctacgggtacaaggagctcaaccgcaatttcaacgtgcatctggccgacatgggcttcgccgtgttttcattgaattaccggcccgcgccacagaccgatctcaagggacagcttgccgatatcgaagcgggcttacgttggatcagggctcatttggacgactatccgatcaatccgaatggcgtgttcctgacgggcgattcggctggcggcgcactgacgctgctcacgctcgccatcgagaacaatgccgaggcggcggccgcattcggcattgacgaaccctccggcatcacattcgcaggtgccgcaccggtgtgcggtgcgtacagttcggcttcgctggaaacgatgggctcgaaactgaccataggctatgatccgaatcgccgcatcggactggaacggatgctgggcgttgagttcttcgaagggctcgaggcggccgatccgaagttcctcactgcggagggtctggcgttcaatgtggacctgcctccactgttcatcgtgacctgcggcgacgattttctcgaagcggacaatctggcattggcggcggcactctcgcgcaagggagccgatttcgaactgttcgatccgaagccgtgccgccatgagaccttgggccacgtgttcgtcatcggcatgccgtggctcagggaaagcgtggagtgtttcgaacggctacgtgccttctcctactcccgctgctagtacgcttcggcggattcgcctcatcacgggaaccactcgacttgtgcatggctcctgtcggttgaacaatcatgaagcccgtgtacgatcggctgaatctcaacgatcgcacacgggctttcccgtgaacatctgcccggtatgcaatggctccggggatgatgggcggtcttttagcggcggaccatctcctcttcaatccgttcgagggacttgcccttggtttcgggaacgaaatgcagcacgaacgggatggacaatgcggagaacacgccgaagatcgcgaacggaccgcccacattgttgccgaaggccgcaaggagcatgaggaagaactgggagaccacgaaattgccaagccagttggcggcggatccgaaggagctgccgatgccgcgcacgctgagcgggaagatctcaccgatgagcacccaggcgatcggaccccaggagagcgcgaagccgaggatatagacggcaatcagaaccatggtcggcacggccagagtggatacatcgccggtgaagttgaggatggcaagcgccgcaagcgagacggtcatgaccacggagccgaagaccagcagcttcttacgcgggaacctgtccatgatgagcgtggccacgatggtggcggcgaagttcaccacaccgatgccgaccgacacccagatggcgtgattctcggggaatccaaagcccttgatgaacacctgcggcaggaagtagatcacggagttgatgccgacaagctgctggaagagcatgataccgaccgcggcgatgagcgccggacgtgcgatgcggaacagttcacgcacaccacccttggtgtcttgcgctgcgacttctttgatttcgtcgagttcgagctgcacttgggtctggtcaacatccttacggatcagcgtgagcaccttgaaggcgttgcgttcatcgcccttgctcacaaggtagcgcggggattccggcagcaggatgccgccgatgagcagcaatgcggccgggatgagtgcggagccgagcatccaccgccagtcgcggacgcctgcgatgttatggccaaggaagcccagattggaggcataggccagaagaatgccgaaggtgatcatgagctggaagagcgtggagagcgatccacggcgctctttcggcgcaagttcggccagataggcaggggtgagcgcggaggctgcgccgacggcgaggccgaggatgatgcgtgcggcaaccatcatgaggaatccggtggcggtggcgcacatgccggaaccgatgaggaacaggatggcggagaggatcagcagcttcttacgtccgaaacgatcggagagcgtgccgatcgacagggctcctacgcaggagccgatgagcaccgatgaggtgatgaagccggtctgcgagaccgacaggccgaagtcggattcaatcagcggcgaagcgccggaaatgatgcccgtgtcgaatccgaacagcatgcctcccagtgcgccgaatgtgaaaatgaacgcgctgttgagcgggaatcgcgtggagatgttgcgacccacggcctcttcaaccgtttcgatggcctccttggcttccaatggttcgtgaacttctcgagttccggcgattgttgcggagcgttgtattgacgtcatgatttacctttcatcttccttgacgctaggttcacacaaaaaaagacctggaacagtacgattcccgtaccgatccaggtcttgcctcgtgtgagtagcaaccctgccaataacgtttgtattgaccagtgtaaaccttgcagacccgcgacactccgaaaaacagaaaacgttttccagctatttttcgcgttgaacgggagtgatttgaagcagtctcatccggttcgccttccgatgggaccgcaaatggccgatattatgggccaatcccaccacgactcgtcgtggggactcgagcgatcccctcatcgcaaggaggaacaagagtgaaaaaagaaagccggcggagagaaggccgccggctgagagagaagagagaagaagggttcagttatggggttcgattgggaacctcgccaacagccgtaaccgttgacatgttctatataaccgcccgacccttggaagaacgatgtttctacctgccaatttcctgtgaatcgcgtaatgggaatgtcatgacgccccaccacacgaatcaatgcaagcgatttccaaatcaacgaaatcgcgattcttctcgttacaatggggaacgtcgagagagtgcagtgccgcagggaggctcccatgttggatatcaaacgcgcattgaaggcctcgcccaagaaaaggcgttccccagagccgctgaaacaactatggacgccttggggcgaacgaatccgcgatgaatggctgtgcgaaaacgtcggaaacaaggcgttccgcccaatcgaagagggagagcgcaagctggaggtcggccgaacgccgattcttggcgagcatccgcgcccgacgatgatgaggaacaaccatacgatgctcaacggcatgtgggattatgcgatcgtgccgattcccaatgacgaaaccggctcgcgctggtcgttctcccgtaacaaggccacgccggcgctcactcgcgatgaggccgtggaggctgtcaaagaggccgccatcccggaaacgttcgacgggaagatcctcgtgccgttttcaccggaatccgcactttccggcgtacatcagaccatctaccccgacgacatgatctggtaccgcaccgtcgtgcatccggtggcgctcggcagcgaggaaaccgtacggcagatcggcgatgcgaaccgtctgatcctgcacttcgaggcggtcgattgggtgtgcgcctgctatatcaacggccagttcgccggcgtgcatgtcggcggctaccttccgttcgacgtcgatatctcggcgttcatcgaccctgacgatgtgtttgagatcgcattgtgcgtctatgatccgaacgattcaggcacgcaaccgcgcggcaagcagaaaatcgaacgcgatggcatctggtataccgcgcagagcggcatctggcagagcgtctggctggaaatcatgccggacgcctacctgcgcacgctcatactgaaaggcagtgccgatggcaagctgttcatacgggcggaaatcggcggtgaccggccgaacgcgaaactgcgaatcgtcgtgaccgagccgtcggatggttcggtcgttgcggacaccgtactgccggcaggcgcgcgcaaggtgcgcaccgaaatcgagacgaaggccgagcatatgtggtctcccgcggacccgcatctgtacgatgtgacggcgacgctgctgttcggcacgacggcgaaaacggcagaggctacgacgaaaccgcaatccgcagacgtagtgaaatcgtattgcgcgttccgcacggtggaggtcaagcccgacatgaaaggcgtggcgagattccatctcaacggtaagccggtgttcctgaagggcgtgctcgaccaaggatattggccggacggactgctgaccgcgccttgcgacgacgcgctgattcatgacatcaccgctatgaaagcatccggcttcaatatgctgcgcaagcatatcaaaatcgaatccgcgcgctggtactaccattgcgaccgtctcggcatgctcgtatggcaggatgcggtttccggcggcggcgaatacaacgcttggcagaccaacaaaaaaccgacgctattgcgctccagctggaacagactccgcgacgataccgcacagcatttcgacgcgctcggcgccgacgattcgaattaccgccgcgactggtcgcgtagcgccgacgcgatggtgcacatgctatccggccatccgtcgatcgtgacgtgggtgctgttcaacgagggttggggccagttcaatgcgtgtgatgccgccgaacgcatccacgcgctcgatccgacccgtccgatcgacgcgacgagcggttggtatgaccagcattgcggcgactatcacagcgtgcataactatttccgtccgctggaggtctaccccgacaaagggccgttacgcggatacgcggcggaatatgagaaacggcatagaaggcgtcgccgtgccgagcattacgcggtgctgccggtagcgcagcatggcgtacgcgcgttcatgctctcggagttcggaggattggcgcagctgattgccgaccattccgcagtgtcgcgagcctacgggtacggcgaatacgattcgattgaggattggcgatccgcggtacgttccgttttggcgtcggctgcggcattggaatccaaaggattggccggctacgtatacacgcaggtttccgacgtggaagaggaactcaacgggctgctgacatacgatcggcgcgtggacaagctcacggaataagcacaggcgccctttcggccatcttgcctgcatggtctgcgatgcgtgcgcaggcggcgaaattcccccggtcggaggcctcgccggtacccgcacgtaccgggtggtgctcgggaagcgattggatgatgctccgacccgaccggattgagaatatggacctaacgaatggttcggctagaatcctagacgcgagtaggcaccacagctccaccataggcgtcgtggcggccaattggcagccttaactcggttaataaaccgggttccggcaggttcccgatatatacgtctagggtgatgcgcgagcgttgcaagtccggtggcgcagtcggccaccttcgccccttccgtggaaagacagttgcacggaaggcgaaggccgccatgtggcgcccccgttcgccgacgagacggcgggagcgtcccggagccgtttcaagacctcggggcgtcccgtacgtctgcgggcaagacggccgccgtggaatccaacgggaggcccatggcccgccggcgcgtgggtggtgctgggtggaccggatggcgtggaggccgccggaacggttccgtacgcccacggcggttcggcgcatggcataggcggatgcggaaagggccgccatcgccggtgccgtcagtcgacgggctggagcacgatggcgaccgtgccgtcaaggcaggagacgatgtggcatcccgtcatatcggcgatgctttgcgcaagaacatccatgaatggatcgtccgtccatgaatcatgccatgcgaaatcgaacgtttcgcatgccttgcgcggggtgagcgttccgaccaccctgaaacggcgccctttgcgcacgatgatttcggcgtcgtcgatgctgttgctgtcgttgttcatgttgctgttgcccatggtcctttcatgcgtccccgacttgccggtatcgccaaacgccgtcgggaaaccttcgtcggcgtttggaatggcccgctcagtacaggtcgggatcccgtccgcgtgcagttcgtcaagccggctgtcccatgaacgggtcgaatcaagcaggatcgtggcgaggcgtcgtgggtcgtccgagagtctctcgagcgtggatgcgagcaccatcctcggcgcgggacgtttggatgaatatggattgcgcatacctttcctttcgttcgggatcgtcttcaccgttttccattccggcagactcccctatgcgtccccaccgttggatttgcgtctggaacgttccggtccgcccaccgacatgaacaacattcccgaccacgcatcgtccgcgatcgcaggacgtagaggacgacgaccttcacaccgaccggaccagaatcgaaaccatcggacggaaagaccatgccccatcccgaaacaggaacgggcgcggccatccatccaggccgaccgactggcatacgacacgaaacacgcatgcagccaagaccatgcccacacagacgaagaacaaaacccctgtccgtttccaaacgaaatccgctacatggcggaatcctcgacaaacgacggctccaccgcgttttaggggtctccgggcgggatgcgcgcgacccttatgagggctcatggatgagggctcgtatcgacgtccgccgccgcatgcgcgccgggtagagtagatggggcacaccgttccaaagcgtcttcggaggatcaaccatggccgtcagtgtcgatgaggtattcgacagcatcgtcgaggagtcggtggacaagcgccagcagggcacgaaatgggaacgcgccgtgcaatggttcctcacccaggatccggcatggagggaccggttcgatcatgtgtggatgtgggatgacgcgcccacgaatcctggcaggcaggacaccggcatcgacttggtcgcgcaggacatggacggcgagtattgggccatccaggcgaaatgctattcgaacacgctgtcggacaaggacgtgtccacgttcttcatggcatcgatggccgacacccgctaccggcatttcatcatcgccgacaccgcgcccgccatcagcctcgctcgtgtcgcagaccatgcgcggctgggccgacaaggactgcccatgtccatgcagccaactcaaatttagatatccactgatcggaagagcgaaaaagccgttttgcaagatgacctgtatgagccagcggggtctgggcaaagccgtgggattgagccagggaaacatcagtgactacgagacgggcctaaggcgaatcgataccatgcctgcggggaaattcgtcaggatcctgcgcgccctcggaggcatcgacccgtccatactgctggatcaaaaagaacccgtcgtgaaaacggaggccggcagccgtaccggaatcgaggcggaggattacctgaggcatgtcgacgacgcggtgaacccatccttagcacggccgaagcccgtgagaaggaacagtacgacaggcaaatcgagaaattagaaagacggatgaagacattgcggcaacagctggacgatgtgaaaaaggaacgtgacgaattcatactccagcacgttccgccgaaacggaggtgacgtgcttccattcctgcggtagggacgtcggccaaggacggggctttccctttgccattagtttttctaggacgcatccctagttggtgtttagcggacgttttcgcgctcctgccatgatggcaatgcctgcgatacgggccatggttaccgtgagtatgcgtccgaggctgttcccgacgtatgccgccgtcggccatcgtctgcttttaagggcggaaacgccgcgtatgctgggcatgtcgaacaaggttctcgcggaaaggagtagacatgggcgttcccgtcgtgtacacggatttcgacggcgtgctgaacgcgttccccgaccgcaaggtcctgcaacgcggcggcgtgaaccgcacgcaatggctgaaggacggcgatccgcgcaaagccctgtacagtcccgaacgcgcgttccacctggacggcaacgcgcaggcgcgtcttttcgtgggccggttccgcatccactggtcgcgcgagctgtccgacgccatgtacgggctcgccaggaacggccgtatcgaactgaactggctgaccacctggcagccatactgcacgaacacgttggatccgatgctcggctgggatcccggaatcgtccgtaccgtcccctggtacgacccggtcaccatggaacgcaggctgacgggcaaacggtcgacgatactgtcgcgcatccaagcggaacggaagtcggcggacccgtcgccggccatatggatcgacgacgaggaatgcgaccaggccgccatggcggaaatcagagcggccgagcccgccgctccggtgctgatggtgcggcccgactggcgtatcggcatcagccgccgccaatggcggctcgtcaacgacttcatcgactgttgggacggttttccgtccgtcacgttggatgcggaggacggcaggcacggccactgcggccatatcggactgtaaggaaaaggcgaatggaagatatcgggaacggggaacggcacggcgacgttcccgaatggggtttggaggatctgaccgacagcgtcctgtacgacgtgttctacgagtcgacgaccatgcttgccggcaggatgctcgcccagcaacgattggcggcgggccaaggcaaccggtacagggagcattgggccaggatgaaccggtacgggctgctgtccgaccgggacagggtcgacccgaccgaccgcgaggcgcttgtcatgtccacgcccggcatacgtccgcgaacgccttcagccgctccccctcgcagatggcttcgatgcccgtgggcatgatggcgttcagccgcgcctcggcgcgcttccgttcgccgtccagaccccgcggcatggcaggcatagtcatgccgccgacggcggcgtcgaccacgtccacggcccagttgagcagtgcgcatgacggcaggagcctcgccgggcggggaagtgacgccatggcgtcggccatgcccttccagtcgagccgttcggccgcttgcgcgaacgcgtaccggacctgccgatagtggagctgggccgggtcgtccgggtcgggttcgtatgcgtcgaacaggcgttgcagcataccgtcgtcgaccgcatgcgcgacggccaggcgggcgggcggaccgtccggtgtgagccggtgggcgagcgtcaggtccgcgggtaccgcatggatctggccgggcgtcaggttcttgcatgtcatgatccctccgtcatacgtggtcccgacgtcgtacgacgcggcgttgccgtggaagtcgcggtggttcaccatgacgacgaagccgacgccgtggcagtcgatcagtacgcgcgcgaacctgcggaattccctgtccatgcgaaccaccttagcccccgacgcccgtcagcaccgccatcaggcttcgagctgccctgcgagccgacgggcgcttcgacgccatgcattggatttccgtcgagcagaccattcgtcacggcctgttcgagtgcctgggtcaagaccgtcctgtccatgcagaccgtccggtgtgaatacagcctttcggcatcggcttgccatttggtgagcagttggggagtgagtcggtcgagtcgcgtttcgccgatgagacggctgacgcgtcggcatgcgcacatgtagatctcctgcgtgctgggtcgtagtcggtacgcgcgggtctcccgccaatgcgtgagccattcggacaggggcggcagctgcgcgccggacggttcgccatcaagctgcgcgttcttgatcttcgtcttcagacgttcgacggcggccgcgcggcttttgccctttgccgtcagccgacgtcgtttgccggtccgtggatcgggaggtagttcctgggtggccacccagacgccatccttccgttggtacaggctgcctgcgccgcgcgtccgtcgttgatttttagccattttcaggctccttccgcatcctttcgcggggtagcctaagggtaggcatttattgatgcctgtcgcgaggatccgcacgaaaacggccccttcgcagtgtttttccggtgcggggtcaatcctcgtagaacggcggagttacgccgttctacgggcgtccatgcgtactggatccatagtatccaagtcaggaatatccggaccgcagccatgcatgattcgtgaaaagcgtcggctgtgaggaatcgtgcacggtcccacccagccttcgggaaccactaccccaaggaatggcggaagcccaatggctccatccccataaagaatgggttcctccgaggcgaatacccattgggcacgaaaataacaacacgatcccggaaaagcgaagttttccggaatcgtgttctcgtcagaagagcggatcaggcttcaatccgactcagccctccagcttggccttctcggcagccagacgggcggcctcggcctcgcgacgggcggtcagctcggcatcgaagcgggcgagttcttcctcaacggcctccggcggaatcttcgcgaagatcggatgcggcttcggtaccggggtaccggccacaatcggttcggatgcccatggatgcacggtctcgcccatctcgtagtcaccggtgataatcgggtacatgaagcccggtttgtcgagatcctcaacctcttcaagacgtggcaacggcgagaacgtgccagtaccgcccaacgcctcccacactttctgcgcggagtgcggcaggaacggagccagcagatggttggcatcggacacggcctgggcggcgacatgcagtacggtgccgagacgggccggattatccttgatcttccacggttcggtggcggagatgtacttgttgatgtcaccgaccacgcgcattgcttcggacagcgcattcttctggcgatggttctcgatcagcgaaccgatggagtcgaaggcacctgcggtctcggccagcagggcacggtcctcatcggtcatcgaagcctcatcaagcgctggaatctcaccgaagttcttgttcatgaggttggccacacgattcaccagattgccccaggaggcggcgagctcctcattgttatggcgcacgaactcggcccaggtgaagtcggagtcagagctttccggacctaccacggagatgtagtagcgcacggcgtcaaccgggtagcgcgacaggatgtccttcacgtagatcacgatgccacgggaggacgagaacttcttgccctccatggtcatgaattcggatgccacgacctgctccggcatgttcagtgggccgagcttgccggtttcgccgcccttggaaccctgaccgttgtaggccagcatctcggacggccagatctgggagtggaacgtgatgttgtctttgcccatgaagtagtagcccggagtggtcgggtcgttccaccaagcgcgccacgcgtccggctcgcccttgcggcgggcccattcgatggatgcggacaggtagccgatcacggcatcgaaccacacgtacagcttcttgttcgggttgtcgatccagccggcgaccggaatcggaatgccccagtcgatgtcgcgcgtgatggcacgcggcttgacttccttaaacagtccgatggagaagttgatgacgttggtacgccagccttcgcgggtcttgagccatgcgagattggcctcggcgagcgccggcaggtcgaggaagaagtgttcggtctcctcgaagcgtggggtttcgccgttgatcttggataccggattgatcagctcgtccgggtcgagctcgttgccgcaggtatcgcactgatcgcctcgggcaccgtcggagccacagatcgggcaggtgccttcgatgtaacggtccggcagggtacgtccggtagacggcgaaatggcgaccttttgcgtgcctttatagatatagccgttctcgaggcactgcgtgaacagttcctgcacgaccttttcatgattgccggtcgtggtacgggtgaacagatcgtagctcaggcccaaatcgcacagatccttggcgatcacacggttgtagcggttggcgagttcctgcgcactcacgccttccttgtcggcttccaccaggatcggggtgccgtgctcgtcggtgccggacaccatcagcacgtcattgcccttcatgcgctcgtagcgcgcgtacacgtcggacggcacgccgaagccggcgacatggccgatatgacgggggccgttcgcgtacggccaagcaacattcaccaaaatatgactcataaggcacgattatcggctcagatagcgacaggaaggctctgcagcgtacctatgcccgcatgacgaccacgtcagtgcgcaatccccctgattatgcacattgttgtatgacgaaacaactgttgtccacatatccacggattttcgtaagccgatggcgcagacgccggccatccgttacggtaccgtcatggatatcgcaatgacgcttgccacgggaccgctcgcaccgctgctgcgcgacggcgatctgccgggaccgatgaatctcaacagattggccgatttcggcacactgtgcaaactcgacagtgccaatgcctatacgttgcaggattcgaccacgctgtatggccgtgccaccatcgtcgcgaccgtgatgccacgcaatgccgtagcctgcggcttcacggccgcatggctgtggctgggcggattgtttccggaaaccattgacattctgtcctcatcgcatttccgcacgttgcggcacgggcgaaaggtgcgggtgttcaatcgcaaggcacccccggaccatgtcattcaggtcggtccggtacgcacgaccacgccggtacgcaccgcctgcgatctggcgttaatcgccaccgacgagacgaaagacgtcatgcatgaagtgatctgcatgctcatgcaggaatatcgtttccggcccgacgactgtctgcaggcgctgcagcagagtcggcatatcaggaatgcgtcgcaggcacgcaccctgtttcatggaattgcgggcagagccaatgagcatccgacggcgcaataagcggcatcgaagtccgccggagtaccggccggagcccaagccgagggctctggtggagccgccacgcccgccactcgaattgacgccgctcatcgcctgcagtccggaaaccgacccggaagtgctctggcatatcgcgcgggagtctccgtcgctacgcaagtggttggtggcgaatccggcggccagtccggcgatgctggagtatatcgggcaggtcggcggcccaggcgtaggcgaagcgttatgcatactgctcgattcgctggatggccgggccgactccgccatcagcctttgagagcgagcactgcgttgtagacctgcttgcgattggcgagggaaccgtcggccagcggatgctcagccacgacctgcgcaatggcgtccttgatgcgcagattgtcttcctgcgcacggtcgatcgacagtacggccagatcttctatggatagcgaggccggcgcggccgcgtcggcctcctcatcggaggcaccggcgatgaccagtaccatttcgccgcgaggcggctcgtcgatgacgctttggtggatttcggcgatggttccacggcggatctgctcatagtccttggtcagttcacggcacaacgccatgcgccgattcggcccgagcacttccagcaggtcggccatggagtcgtcgatgcgatgcagggtctcgtagaacacgatggtgcggcgctcggactgcagtgcgcgcagatgctgcacgcgttcggcatgtttgcgtggcaggaatccctcatagcagaagcggtcggtcggcaagccggacaatgcgagcgcatccagtacggcagaggggccgggcgcgcaggtgaccggcaggccgcgttcgatagcgcggcgcacgatggccagtcccggatcgttgatggtcggcatgcccgcatcggagacgaccagcacggtggcaccggtttcgacctggtcgagcagaccgtcggccttatcccgctcgttatggtcgtgataggcgaccacacgaccggacacatggatgccgagacggttggcgagcgcatacaggcggcgcgtgtcttcggccgcgacgatgtcggctccttccatgagcgcaatcagtcgggcggaggcatcggcggtattgccgattggcgttgcggcaagaatcaccgtaccgcgcggaatgccgacgccgtccaccaacgcatcgagcgcgccggcggcggtaatccggccgccgtcatccgtcccgtccgtgaattcggttggctcctgtgttgattgcgcttgtatgctctccatatcttccagtatctcctactgtgtatccaagggcatgtcttgcgggcgaaacgaggcgacgatgagtatacagacggtcaaggcgaatgcgcgatacgccgcactccgacgacggtggcatcaacgtgacggctccgatgcctctcctgaaccacgttggaccgcctccaggcctttcgcatggttgatgacgattcttgtggccgctttcggcggaatcctgcgctttgtgagacttggctcccctcgcgcggtggtattcgacgaaacgtattacgtcaaagacgcgtggaccatgctgaacaccggcgaggcgcgcgattggccgaaactggtgaccatcgacggcgtggatgtcgaaatcgaccgactgttcgcagccggcgacaccgaccgttggcttaatacggccgaatatgtggtgcatccgccggtcggcaagtggatgatcgcggccgggctgaaactgttcggcggcgccgacaatcccgtcgcctggcgtgcgagcgttgccgttgccggtgtcgtcgccatcgtgctgatcacccgcgtggccttgcgcctgttccacaatctgccgattgcgttgattgccggcctgctcatgtcgttggacggtctcggcatcgtgatgagccgcaccggcctgctcgacaatttcatcatggtgttcgccttgggagcgttttcgctgatgttgatgcatcgcgattgggcccgtgcacggctgcgacggcaatatgcgattgatgcggccgcccgtacggcacgtttcaagccgggaaggcgcggcttgatactgcaacggcgtgggccgatgatcgccttgtcgtggtaccgcgtaggtgcggctttcctgcttggcatggcgaccggcgtgaagtggtcgggcacatatctattcgctgtgttctgcgtgatctcggtgctgtgggatgcgtgggagcgccggcggatcggctatcgcgcatggttcacgaccggtttggtgaaggatgggctcgtggcggcctgctacatggtgccgatctacgcgctcacctatttgggtggatggctcaactggttcctgcatgccgactcgtatatgcacgattgggccgcgaatcatcccggcgagggtgtgacctggctgccggaatcgttgcgttcctttgtggcctaccatgcgcagatgtggcaattccacaccacgctcgacgcgccgcacgactacaaggcgaacccgcttacttggccgttgcaggtaaggccgaccagtttttattgggagaagctgtccgggcatccgggactgtgttcgttggcgccggattcgcaatgcgtggcagcgatcacgtcgctcggcaatccgttgatctggtggacgggctcgctatgcacggtggtggcgatcatcatcgtcatcgtcagcctagtgcgcgggcgcattcgtggcggcgccgcccgcgaggacggcggctattggcggatttgggcggtgttggccggctttttgggtggttggctgccgtgggcgcagtacctgaatcgcacgacgttcacgttctattcgattgtgattctgccgtggatcgtgcttgcgatctgttacgtgcttgattggttgcgcacgcatgcgacaatcggcacctaccgtctgatcgtcggactgggccttacgctgatcatactggtttcggccttcttctacccgatctggacggcgatgccggtaccttatgaattctggctgtcccatatgtggttcagatcatggatctgaccacatatgggaccttacgcggcaaaccgctcacttcgcctaccggcagtccaccggactaccggcctaacggctcagcatatgtggttcagatcatggatctgaccacatatgggaccttacgcggcaaaccgctcacctatacagaggcggaagggcgtcggcgagacgcatgaagtcgtgacggacgaatcgtctgaaatcatcggcataccgcgaaccggcaacgggcgtgccatatgctccggtgccagcggcatccggatcattgcgccacggcaagtaccacagtgcgcggcgggcgtattcgttggcgagcgcggcggccagcagatacttcgtccatggcgaatccgacaacgctgagccatcttcggccgcagtgtcatcattggcgccgatgatggtgagatcgtgggagtcgcagacgtacgagtcggcgaatattcccggagaaccgacttccgtggccgcggccagcttgccgcgctccttgccgaggcgaccgaccaatgtaagcatcgcaatcagatcggcatggcgggcctgcggatcctccgcgcttttctcggcgggcgcgatgtcccagtaatcgtcgaagccgagcacatcgacatagtcgtctccgggataggcatacagataaccggtctccaacgattccggcgtgctcatatcgatgcggctacggtcgggcgagtaggcatagagcacattgtgcacatgcttaacgtcacgcaggtattcgatggtcatgcgccacagttcgacgaactgttcgggcgtggtgtcggtcgggcgcgcgggagaaccggtacaccaccagaaccagtcgccggtatgctcatggaacgggcggaagacgatgggaatcggttcgccgttcgtgtccgtgacggtggtgagcgcggcggcaatgcggtcgagccagccgaggaacttctcatgcgcttcaccgccgggcagcaccgctttgacggtgccctcggccatgttatggccgtaaccgccgagggtgagcgggttggcggaatgccagctgagcgtgttgacggcgcccatgttgaaggctcgaagcatttcgtttcggatggcttcggctccgaatccgtcgagattgcgattccggtccagctcgacgccgcccaagtcgttgccccacacagccgggtaggaaccggtcaccgcatgcacatcggagtcggtatgctcgccgattacgttgctggtttcgttctgatggccgaacatggcgaattcgcccgttgcgcggtgcaatgcgtcaaacagcgcgcgagtcttggcattgagatcgtcatccaccggctttgacttcatgatggtgccttcttcggccataccagcgctccttcgtgtcgctccatgtctttcacccctactctaccggcgtccgcccgtgcccgcctccgccatgccggcgattcggattttcgcctctatgggattcggattcccctttcctacgattcggcttttcccagaacaccacggaatgaggtcggaacgagcccacgcaacacggtcgaatcacttatttataaagttataaataacgtggtatccttatggggaaacgcaataaccaacgaacactggccgtagccgtgcgcaacgccgccccgcgtatgccacgcccgcagccagaagccgcaacgaagcagtctgaaaggattcccatgaagtacggccacttcgatgattccgcccgcgagtatgtaatcgaaactccggcaaccccgctgccatggatcaactacctcggcaacgaggacttcttctccctgatctccaataccggcggcggctactccttctacaaggacgccaaactgcgtcgcatcacccgctaccgttacaacaacgtgcccggcgacaacggcgcgcgcaactactatctgagccttatggactccaacgccgtcaacgccaagccgattgacacgtggtcgccgaccttcctgccatgcaagacgccgctcgactcctataagtgccgtcagggcatcggctacaccgtgttcgaagccgccaagcatggcatcgaatccaagctcaccgcgttcgtgccgctgaagaccaatgccgaagtcaaccgtctcgacgtgaccaacaccaccgacgcaccggtcgtgctcgacgtgaccggttccgtggaatggtgcctgtggaacgcagtcgacgactcctccaacttccagcgcaacctgtccaccggcgaagtggagatcgagaagcaggatgacgccaccctgatctaccacaagaccgaattcaaggaacgtcgcaaccattatgcgttctttgccgttaactcccccgtcgtcggcttcgacacgagccgtgacgaattcctcggcaagttcaatggttggggcactccgcaggtcatcaccgaaggccaggcccacgattccgtggcccacggctggttcccgatcgccgccgaccgcgtacgcctcgagctcaagccgggcgagaccaagtcgctcgtattcgtgctgggctacatcgaagtcgccaaggaagacaagtgggaggatccgaacgatccggccaaggtaggcatcatcaacaagaagccggcgcatgaactgttccgccgcttcgccaccgtcgagcaggtagaggcagccctgaaggagctcaacacctactggaccgaactgctgaccacctacagcgtggaatccggcgacgagaagctcgaccgcatggtcaacatctggcaccagtaccagtgcatggtcaccttcaacatgtcccgttccgcctcctattacgagtccggcatgggccgcggcatgggcttccgcgattccaaccaggatctgctcggcttcgtgcacctgattccgggccgtgcgcgccagcgcatcatcgacatcgcctccacccagatggaggatggttccgcgtggcaccagtatcagccgctcaccaagaagggcaatgccgacatcggcggtggcttcaacgatgacccgctgtggctcgtggccggcgtgaatgcgtacctcgccgagaccggcgacgcatcgattctgaccgagccggtgccgttcaacaacgtggaaggctccgaagtgccgctgctcgagcacctgcgccgctccgtgaacttcaccatcacgcacaagggaccgcatggcatcccgctgatcggccgcgccgactggaacgattgcctgaacctcaactgcttctccgacactccgggcgagagcttccagaccgtggagaacaacgacaccggcgttgccgaatccgtgttcatcggcggcatgttcgtgctgtatggcggccagtatgccgacatcatcgaacattacggtcagctcaccggcatgaccgatgccgaaatcgcctccgaggcagccaatgtgcgcgccgaaatcggccaggtctccgaagcggtcaaaaccgccggatgggacggagaatggttcgtgcgcgcctacgacgcctattcgcgcaaggtcggcacgcacgaagacaccgaaggccagatctacatcgaaccgcagggcatgtgcgtgatggccggcatcggcctcgatgacggcaaggcccagcaggccctgaagtccgtgaaggacaagctgacctgcgattggggtaccgccatccttgccccggcctattccacctaccgcatcgagctgggcgaaatctcgtcctatccgcgcggttataaggagaacggcggcatcttctgccataacaacccgtggatctccatcgccaatgcgctggccgacaacaacgaggaggccttcgcggtctaccagcgcaactgcccggcctacgtggaagacaagtccgacatccgcaaggtggagccgtacgtctactgccagatggtggccggccctgaggccccgaccccgggcgaaggcaagaattcctggctgaccggcaccgccgcatggacgttcgtggacgtgtcccagtatctgctgggcgtgcgcccgacgctcgacggtctggctatcgaaccgcatctgccggaacagttcaccgacctgaccgtgacccgtgtgttccgtggtgtaacctatcgcattgccatgaagcgcaccggcgagcgcacggtgagcgtcaatggcgagcagcttgcaggcaacgtcgtgccggtcccgaccgacgacaccaagttggtcgaggcggcagtcaccttctgatggccgaacggcagccaagtagctgccaaacggctgaaacggggcgcatggacgacatcacgtcacccatgcgcccccttatgaattgactttacgaataggatggatccatgcagtatttcgaacatgagatttccggcattgacggcaccgccgccaagttcgtcggatattgccttgacaacagcgaagaagtcatcccggattacgcacgcccgtccgtgctggtgattcccggcggcggatacgagatgacgtccgaccgtgaggccgagccgattgcaatgcagtttcttgcggccggctacaacgctttcgtcctgcgatattccgtgaaaccgtccgtctttccggttgcgctgttggaagcggccgaagcgatgaagcagattcgcgaacatgccgccgaatggcatgtcgatacgaacgccatcgccgtgatcggtttttccgcaggcggccatctcgccgcaaatctcgccacttccgccagtgacgaggtgatcgcggcgcacggctacgatccggatgcggtgcgtccgaacggcctgatgctcgcctacccggtgatcacgtccggcccgctcgcacaccgcggcagcttcgattcgctgctcggggaacgcaaggccgacccggaagcgctcgaatccgtgtccatcgagaagcatgtcgatgccaagacgccgccggtgttcgtgtggcataccgttcccgacgactgcgtaccgtatgagaacacgcttatgctcatcaatgcctgcaagcaggccggcgtcagtgtcgaggcgcacctgttccccagcggcggccatggcctgtcgctcggtaccgccgaaacggcatggcagggtgtccacggcatcgaggaatgcgtgcaggtgtggccgcagttggctgccgcgtggatgcgtaggacgttcgccaaataggctcatagcgagcggcacagcgtgagggtcccggccaataggccgggaccctcacgtttcaggtggcttttgcctcgaatgataccgggctatttctcgcggctcgcatactccttttcgattgcctgacgcgccttgaacatatccttggtgttcttcatgtcgacgtcatagaccttcttgtaaccgagaccgtcaacctctttctgcatcttgctccagatggagttgaactcgtcatcgctcttggagaacactgcctgccagcaggcgttcaccacggcggtcttcagctgtccacgggtggtggagatcacggagtcttcatccggagtggtgtacgaggcgcccggaatgaccgcgagtttgccactctgctccagatactccatggtcgtgcgcgcaccgcccatatgctcttgccaatctttgtcgagtgcggtatcacgcttggcgagttcggaatcccacatctgatagttgtacggcgcgttggttctcggatcgatgtccttgttgagcacggtggagacgttcaactgggatgcgccgtcagagtaaccgccaccgccgtactcctccggaacgttgacgctttcgccgcccatggccttgacaccgaaatcggtaagtaccggtttgccgtccttgatgtcccaggtcagaccctttaacccggcagcgccattggtctgggaacccgcagcttggataccctcaggcgagtaaagccaatcaatgaatttgaccagacgttccttgttcttggctttttctccgacgccgatgaacgtggtggtgccgttcggctgggcacccttggatgcgatcttcatgtcatcgatgctcagcatcatgaaacccttaccgtccttcttatgggcgtccgtgttataggccgcttggccgagccaaggccagaaggagaacaggatcttgccttccttgtacttggaatacatggtgtcgtagttctgcgtggtggattccggatcaaccagacccatctgctcggccttgttatagaacttcagcgcacgcacgtaaacgccattctcgtcgatcagcgattgagcatccgtgccgtcggcattgctcatcacgtaaccggtcccttcggcatagccatagaacgccggaagctggaagccattctgcatggcctgatcgtcccaatccttgaacagactcagcgcgtagacgtcatcgctgccggtctcttcgcgcgccttgtcctgcatctgcttgaggaccgggagcagatcctcaagcgtggcaaccttggggtagccgatctccttgtagtaatcccaacgtacgaacgggccgaaagtcggttcgacaccttcgctggactcggtcggagacaaggatgataccgaggtcggaatgccccacataccgctctcctggttggcatccttcgtcaactgatcgatggccccctgataagtcttgagatacttggtgtttttgatatacgaactcaggtcagtgacgagtttggacttgaccactttttcggcctgaccgctgccagagccgatgatcacaatgtcgcccagattgcccgcagccgcgcgggtatcgaacagcgtgttgccgccgcctgcgacgttcggagccacgatattgagcttgatgttgaacttgtccttgatgaccttggcgaaccagcccttctgctcgccctgatagttcgccagttggtcgaacacctcgaccgtcatcagcgaattgtcatcggcatcgcttgcggtgtcaccgccgcaggccgccatcgtgcatgccatggcaagcacgccacacgccgcgacgagttttcttccgacactacgcatcttccctcaccttgtcctttcgtagctattgtcacgagcatgcaaacgtccacaatcatgacgattccgtcgtaaatcgcgcgtaaccgccgcgaatgcgcgtatacaagcaaccctgcatttgctcgtcctatggcttcctcaccatgccgtggacgtttacgatttcagggtacaaggccttatccttcattgtcgaatcgtttcgacgattttcgacaaaaaagcttgcggcacattcgattgcgccgccttccttcacgggcagagaaatatcacacgcctttcgaaacgtcatgcaccgaacctcgactcaaatacttcaccgcaatcagctcctttgtcccctgctcggacatccgacgcttcccctcgatgatctccatcaacacatccaccgcacgggcacaggtggcgtatggcctcagcggaatctcatcgagcggcggattcatcactgacgcctgaccgaaggcacccaactggatgacggagatatccttcggaatgtcataaccacgcgattgcaaggccgacttgagattcgacatcgcgattaatccaacttgcccgagcaccgcagttatccgcggatccgaagcaaaggccctttcaaccacacattccatctcatcagcgtcaccggtatcgattacatcgcacgtcagccgcataccggccttctcagcacagatccgcaccgaatcacgcgtacggatcagaaagttcacgccctgctcgtatgcatgggagttcgcaccgagaaacagtacatgacgatgcccggccttcatcagtttttgtaccgccatctcccccatctgctcgaaatccaaatccaccgcatagactccatccaaatcgtcagggcatccaatcgatgcgacgggcacccgggatgtcttcgccgcgcgggcacgcgggtcgctcatcgcaacatccaacagcagtactccatccaccaaaccggagtcggacatgcgcaccaactcctcgttctcatcctcacccatcagcaacaacacgtcatagccataatggcgcaggcgacgggccaccccgaaaaagaacggcgaccaatcgccatatgccgtctcgtcactcatcggagaactcagcgcgacgagccgcgttctttccccacgcagcatgcgggcaccggcattgggaaaatagttcagctcgcgggcggcctgcatcaccttgatcttggtttcattccgcaccgaacgcttgccactcatcacatacgaaaccgtactgatggagacccccgcgcgcaccgcaacatctttgattcccgccatcaacacccctcatcacgagatggtcatcatccatgatgccgtaagcatactgtcctacaaaatttgtagtcttgtcttgcgtagattttcaagtatttcgacggatttcggatataatcaaaagaattgacgaatgcgtcatccggcaatcttcgcgccattttgcaaaggaggaggggcaatgagcgttgcagcgtggtctcagtttttggaagcccaatccggctctggcccggacacctccagcaccagcatcaccgcacgtgacaccacgtcaaagaaaacctttgaaaaacgcaagcgcatgagtcaggaagagcggcatctgcagattctgcaggccgcagccaagatcatcgccatcaaagggttctggggtatgtcgctgcaggatatctcagacgagctcggcatcaccgaagccgcactctaccactacatctcctcgaaagacgatctgctcaacatggtgctttccgaaggctatgacactccggatgcagatgaatacaatgccgtgaccgctgcggtgatcgacgctgacggacatcgcgtctactattatccccgatattgcctgaacatcgttcgctataacctgcagcgtccggaaatggtgcaactctattccgtactcaacggtgaggcgctcagcccggaacacccggcacacagcttcttcatcggccgccatatgcgcaactgggaaatgatctgctccatgaattggatactgccggagtacgtcgacgaggagcgcttctacgacctgtacacgcttgccatgagcgcgatggacggtctgcagtaccgctggctgggcgacgattcaatgaacctgcttgagcagtggatttcgatttccgacatcatcttcccgccgagcgaatgggccggatacaccgatccgagcgaatacgagagcgccagcgcaggttgcctgctaccgaagacgctttcggcacggcagtaggcaacctgcttggatgggtttcagcggcttggctagaacctacccggagtggaggtgctgatgagtttgaggttaacgaattcgttgatccccaacgctcccagttcacgcccatagcccgaattcttcacaccgccaaacggcagctcgcaggaatcagcaccgacttcattgatgtaggtcataccggtttccagagcgttagccacacgttcaccctgttcaggatcggtggtgaagacatatgagccaagaccgtacaccgtatcgttggcgactttcacggcttcggtctcatctttcacacggtagaactgcgccaccggtccgaagaactcctcataccgcgccggagattcttcaggaatatccgtaagaatagctgggcggaaataagccccgtcattcacaccgtctcccaatgccaatgtggcgcccgattcaacggcctcgcgcacctgttcggcgagatgcttggcagcggccttggaacacaacggcgccaactcaagcttttcggatgctttggcaaacttactgaggaactcgtcatacagagaatccacaacaatgaaacgcttcgcgccattgcagatctgcccgcaattctcataccgtcccccgatggcagctgcgacggtggcatccatatcatcagtgctcagcaaaatgaacggatcggaaccgccaagctcacataccaccttcttcagcgcagcccccgcttcagaggcgatagccaccccggcacgctcggaacctgtcaggcttatgccgcgaacacgatgatctgcaataacggccgcagactgttcgttggtgatgtacagattggtgaacgcaccgttcgggaagcccgcatccaggaagatccgctccatggccgccgaggatttcgggcacagggaagcatgcttaagcagaatggtgttgccgagcataagattcggcgccgcaaatcgggcaacctgatagtatgggtagttccacggcatgacaccgaacaacgggcctatcggcaacttgcggattacggccgagccttcggcctcgcgttgaatcggagcatcttcaaggaaggactcgccgttatccgcgtaataacggtaaatcgcaccggaaaactccacttcggccaagcattcttcgggaagcttgcccatttcgtgatgaatgatgtccgccagttcttccttgcgttcctcatacagatcagcgacccttcgcagcaacgcggaacgctccgccttgcttgaggttcgcccccactgctcgaacgcaatctgagccccatcgagcgcggtttccacctgctcgtcggaataagtggcaaaggtctcctccacctcgccggtcgcggggtttgttaccgcataatgcgacatgacttgctccttctgctattagtcgatatccgatgtaacccgttgtgatagccacaacggcaccagggaaatgaccaccatgattaccgcgaccacggaaacgaccggggcctgatgagggcggaacatgttgttcatgatccagatcggcagcgtggtgatatcttgcccggcagtgaacgtcgtcaccactatttcgtcgaaacttaacgcgaacgccaacagaccgccagcaaacagtgaggatttgatacgagggaaagtgaccagcctgaatgtcgtccagacaccggcgcccaagtcggcggaagcctcttccgtgtgctgtccgagctgcccaagacgggcaaacacgttgttgtagaccgtaacgatggtgaatgtcacatgcgcgacaatcaacgtgaacatcgatagtttgatacccaccatggtggtgaaggcattattcaatgcgataccagtgacgatgcccggcaaagcgatcggcagaatgaccagcatattgattgcgcttttgccgaagaagtcgtatcgctgcaatgcaagcgcgcacagcgtgccaagaatcagcgagacgatggtggcgacgattgccacgccgaagctggtcagcgccgcactcagcaatcctgccgaatggaatgccctcccccaccattcgaacgtgacggaacgcacaggccatgccaaagtggcatcgccattcaccgaattgatcagcaccacagccagtggcgcgtagatgaacagcagcacaatgcctgcggcgatgccgaacaacacttttgtggatttcttcaattccattgccacacctcctgactacagacgtttcagagcaccggtacggctgaccaacatgagatacacgccgatgatgatgatcggaatgagcgcacaggcggcagccatcggggaattgttggcgacgccgacatcggtgtagatgatattgcctagaacctgtgtttttccgcctacgatgccggccacaatgtagtcacccaacgacagcgagaaactgaagatggaaccggcgaccacacccggcacaatcattggcagcagtactttgcgaatggtaacgccactacgtgcacctaagtcgctcgatgcttccaacaaggattcgggaacctgctcgaacgccgtgtagattggggtgatcacgtagggaagccacagatagacctccacaagaatcaccgcgaacaaaccatatccgggcgagtggccgccgaatggccgcaatatcatgtcaagcacacccgaaccggacaacaccgatctccaagcatatgctttgacgagatagccagcccataacggcgtagagacgagtatcaccaacaacttgcgcacgcgtggcgacgccatccgcgccatgtagaaggcaatcgggaacgccagaacgatgtcgatgaccgtcgccaacaccgcgatgaacaatgtacgttcggtcaccgtaaggtacaggctgtcggtaaacgcctggatgaggttatcgaaggtccaagtcatctccaccgcgccggtgtactcgttgactgaccacagtgccgtgatgagcaaggcaatcaaggcgacgacgtacaccaacgccatccaaccgaccggcagaacgagtaatgcccaacggtgcagtgtcggatgattgtagaggaacgaggaaacaggctttttcgctcgctgtttcatgatggtcagcccttgatttcctgccaggccttggtccactcggtataatcggtgcacttgacgtccgtacgaccgtcgatgcactgcttgatcggagtgttccagtaccagatcttcttctcgaactcctcatccccggcgtgatagacatcgcagaatttaccgtcggaagcatactggcaggcattcttgttggccggagcctcaccgaagtattcagtggcctgagcgttggccttcggactatcgatataatccaaccacttataggcgcaggtggtgtgtttggtcttggaagaaatcatccacgtatcgctccatccagtaacgccttcggatggagtggtgataccgaactttgaagagtcaagttggttgtacaccacctgccaaccggtgccaaccacagtgtcaccgctctggaaggcctgggcaagcttaagagaatcagaccagtactcgccaacgttctcgttctgctccttgagcagatcaaccgcggcctgaagctgatcctcgtctagggcatacggattcttgatcttcagttcaggcttatgggccatcagatagatcgccgcatcggcgatgtagatcggggaatcatatgcagtaaccttgccgctgaattggctggctttggactggttaaacaccacgtcccaggaagtcggttccttggagaaatcagacttgttgtacatcagcaaattcgcgccgtaaccgtggggcacgccataactcttgccgtccaccgtgttgaaatcacggttcttcaagaaactgtacacatccttgtaattggggatgagatcggtattaacaggttgcaccagcccactgttgatcagtcgtagtgtaaggtcgcctgatgccgcgaccacatcgtacttgtccgatgtcttgatgaggttgtacgcctcgtcactggtgccgtaggtcttcgacgtcacctgacaaccggtatcctgctcgaactcggatacccaatccacatccggatcgtcggaaccgtcttccacgtagcccggccatgccaggatcgagacttcaccttccgcttcgccgagtttttgcacggccgtaccgccattcgtgctgcttcccgcgcttgtcgcgccacaacccgtcatcgcgatgacacctgcggctgcgaataccagggccgtggcccgcttgatgatgtgtttgttgttcttgctcatgatgcttcctctctttcgcatcgatccactgcggaatcagtgctcctccagtagaatctgatcgttcttacgccatgcgagtctgatgttctcccccctctccggtaccgtctcgcctacaggacgtacgaccgtgaatgtttcacgagtcgtgagcttgataagaattcgatattccgtacccaagtagatgcaatcagtcacctgtccctcgaccgtgaccatatcgggatcgtcgtcagcatcgacgaagacgatacgttccggacgtacggtatagctaccggcagagaacccgttcgccataacaatcgtttccggaatgaaattcattgttcccacaaagctcgcaacaaaactgttcgccggatgattgtagatctccgccggagtgcctatctgctgcacgcgacccttgttgaagaccgcgattcggtcgctcatcaccatggcctcctgttgatcatgggtgacgaatacgaaggtaatgtgcaggtctcgctgcagttgcttgagctccacctgcatctgctggcgcagtttcatatccaatgccgacagcggctcgtcaagcaacagcacctttggttcaagcaccaacgctcgggccagggccacgcgctgctgctgtcctccggaaagctcccttggtttgttattcgctttggaatcgagctgtaccagatcgagcatcttgtgggcgcgatcgtaacgttccgcatgatcgaccccatgcaccttcagaccgtacgccacgttgtcaacgacgctcatatgcgggaacagcgcatagtcctggaacacggtattcacgttgcgctcgaacggagccttgtcagtcacattctccccggcgagttcaatggttccgctggtcggcttctcgaatcctgcgatgagacgaagcgttgtggtctttcctgaaccggaggggccgagcatggagaaaaactcgccttccctaatggacatatcaagattgtcaatggcaaggaaagagccgaatcttttggtgacgtcagtaattgtaattgcgtccattataaaccttcctttttatcatttgaatcatatagttttatatgtttaaaaaatgtggctcgcatattacatggaagaaaacaccataaacttcccgaaatcattgctacactgctagatatgaatacaccccttggccgtatgagcatctttcaaccgctagacgagaccaccaaggcggaacttatcacggaacgcctgactcaggccatcgaatcgggaatgctgaaaaacggggaaaagctccccggagagagcgagatggcccacatgtttgcagtctcccccatcaccacacgcgaggcattggaacagctacgttccgaagatctggtggagaccagaagaggacgtgacggtggaagtttcatcacatcaagtccgtcacgtaacatccagcgtctggaatccaatctgttgagcatgcctaccatggagatcaaggatcatcgcgcactatatatcgcactggtgtcaagctcggcacggctagccaccgaagaggcgtccgcacgcgaaagaaatgccattctggaagccattcaatccctggtcagtgatctggaaaccgcaggaacggaaaatgacaactatctcacgcatggtcatcatgaaatgcagctgcatatcgaaatcgcagcggcaaccacatcaccgcacttggtgaattccctgatagacctgcaagacaaactcaagcatctgctctggctccgttttgcagacaaagagcaaatcgactttctggcaaagcaatacaagtacgcggcacacctgctttccaccaatcaggatcagctcttcgaacggcgcatcaccgacatcatcaaggtcggtttttcatggctggtcgaacgtaaactcgccctacagcagcagcacgtcgaaaacacgctatcgccgaccactcccattgaggtgtcccaccagattcacgacctgttcaacgtctacgcaaagacgctacatgattgggagatggagatcaccaggcagaccgcgcactccattatcaacaagcaagagttcgattcactcgccgaacgcctcacacatcctgccttggaacaggatcgcagaatcatcggtgcgggtctgattccctccccggatttcctgcccgatgctccatggcactcctgttggtggacctcacgttggaatcaaactaatcaggcaacaatccgtccattgcgcatttccgacaatccccagtcggcatcgttctacaatttcactgtccaagactggtggaccggcccgaagaacaccgacggactgcacatcaccggtccatatatcgactacatctgctccaacgaattcaccctgactctcagccgccccttctatgtggaccaccacttcgcaggcgtggccggtttggacctcagcgccgccaccttagaacatgaagtatgcgaacagctgcttcggctcgaccgtcccgccgcacttatcagtcatgaacaacgtgtgctggcttccaccaacacatcattactatgcggtgatctggtagcagatctcaacaatacacacgccaaagccaccatcgattgcggcgcgctggccccctcaaacgcgactacaagcaagaagcaggaatccttgatcatgctcatgttctaagtaatgtagcggaaggctagttccgccgacaccatgacgctggccttccatttacctgtgaatctcgtagcatctcaagaaaatcagcacatccggactgctgtggggccatcgggccggtggccccacagcagtccggatggattccgcgcatatcagaacacgttgcatctcatatacgctacccactgaaaccgatacgggatgtcccgcagaatcagtcctgtgggtaggaatcgtcgaagaagcggcgttccagatgcacgatggtgcggaatacctcggcttccggaccgtcgatggagcagtattcgttgaccagcgcgatgagatcgccgacccatttgcggaaatgcgcgccttcgtgcaggtcgacccatcccttgtgtgccgggacctgttgcacgaccccggcgtcgaccgtgcgcttggcccatgcgagatacagccattccatgcagcagatcgcggtgatcagttccggccagctcttatcggacaacgtatcgaggtacgcaccgtaatctctgttcgcctgggtctgttcggtgtcgtcatactcctgctggctgacgtggtaggcctcgaggaaatgctggaaatacgtggcctcgttgtccgcgaaccattgcgactgggcggcaagcatgtccttggtttcctgacgcggagccaacttgatgagccgggccatcatgccgttgttgtagaacttgaaatcctgaatcaaatatgatttcaatatctcttccggcagggtgtcatccaacagctcgttgacgaaacgcgagttgatggcttctcgccaatcctcggtattcagcatgtacatccggtcggcgacggagtccgactccgcgcccaaccaagcgtagtcgccgcgcgccggctccagcgcttcgggtacgtgaatggtcatgattttcctttccttagtgatgccgccgacggatgcaccgcctacgacatgcataaaggcacgggaaacaagagagacgtccgtgcgccggcattacccggtatacgttcaaacggtcgaagcggatgcttcctctcagccttgcggcccccgtgtctgtgcccgataatacacgggcatatgcgcccttatgccggaatttcacataccggccagcagaatcccattgcgatcatgtgaacgggaatgatcaaccttacgttgaaaaccgaggtggtgccatccccggtacccccagtagggagcccaagaaaacggcaccacctcgaaatcaatccgcctctgtacacgctacggacgtatcacgccgcaacccaagaaaatcagtacagctccttgaagatcttgagcacgcgatcgtaatcgagcggcacgaagcagttcttcatgagtcgctcctgcgtcttgatcacgcgatcggcgaattccggcagatcctgttcggtcacaccgtactcatgcagcgccttcttcggcaacagcttgttgataagcgtctccagcgcatcatacacatcggccacgtcacagccgagaatgtcggcgatgaactggttcatcttaaggatctcgccttccggcttgatctccatatagttgcgtagcacgccggtgaacatggcgtagttggattcgccgtggggcacatgatattttccgcccagctgatagctcagcgcatgcacggcagcgcacccgccggtatcgaagctgatgcccgcatagtcggaggcgatcaggaagtcgcgcatcagttcgttgcgcttggcgcggcgctccggcgaaccggcgggaccggcttcggcaacggccttatagccggagatgatcatcttcatggcctcatagccgaacatgcgcgtgtatggcgtggagttcggcgaaagcgtggattccacggagtgcacgagcgcgtcgagcgagctggtggcgaacacgtgatcgggcagtccgtagagcagctccggcacgagcacggcatcgtcggcgaacatctcagggcctgcgattccggccttgcaacctaggcgcgtacgattgatggccgcgatttcggtgacctccgaaccggtgccgcaagtggtcggcacgagcacgaggcgtacggagcgcttgaagtcgggcagatggtcgattacgtcgtcgatggaggcaccgccggccaccgccacgaccttcgacatgtccatgacggcaccgccgccgactgccacgatgcggtcatagtcgaatttgcccgcatccgcgatgaattcgtcgatcatcacatcggtcggctcctgcgcgccgtacttgtcgacaagaatcacgttcgcaccgttcgcatacggttccaggaactgcttgtagatcacttcgatgctgaccagcaggtccttcggtccgagttcgaacgatgcgaagaattccttgaccgtatcgtaggtgtagatgttgtcgggtccgaccgtcaacagtttcatgatgcgtcctttccaaaacgttggctgcaaccgcgcccattccggcgattgcagccaactctatgcctgtttgcttgagggttcgttatcggcgatttcgctcgcccgcaacgattgcgtacttacttggcgctttcctcgacgatgatctccttgagtaccgccagcgcttcgttcagctcgtcatcggtgatgaccagcggcggcagcaagcggattacgttgccgttgatgccgcaggtcagcatgatcagaccttcttggatggtgcgcttggcgatgcgtccgaccagctccttattcggctccatggtgcccggcttgacgaattcgacaccgatcatggcgccgcggccgcgtacttcggccaccgccggcacttcgtcgaccagcggaccgagtacggattcgacgacctcaccgatatgtgcggcctttgccggcagatcctgctcctccataatgccgattgcagcgagcgcggcggcacaggagaccgggttgccaccgtaggtgccgccgatgccgccaggctgcacggcgtccatgatttcggcgcgaccggtcacggccgcaatcggcatgccgccgccgagtgccttggcggtggtgatcaggtcaggaacgacgccgtcgtactcgcaggcgaaccatttgccggagcggcagaagccggcctgaatctcgtcggagatgtacagcacgtcatgcgcgtgagcccattcggccaatccggacaggaagccttcggccggcacgatgaagccgccttcgccctgaatcggttcagcgatcacggcggccacgttggcggagccgacgagcagctcgatcttggcggcggcggccttcgcggcggccgcaccgtccgtaccgaagtcgtcgcgcaacggataggagaacggtacgcggaagacgtcgggagcgaacgcaccgaagccctgcttgtacggcatggatttggtggtcatggccatggtcaggttggtacggccgtggaatgcgttctccatcactacgatggcggagcggccggtgtatttgcgggcgatcttgatggcgttctcaacggcttcggcgccggagttgaccagtacgctcttcttggcaaaatcgcccggagtgtgttcgtcgagcttcttgcacacctcgatgtagttggcgtacggggtggtggcgaagttggtgtgggtgagcttagccacttcctcctgcacggccgcgacgacttccggcgcgcagttgccgacaccggtcacggcgatgccggaagcgagatcgatgaaacggttgccgtccacgtcggtgatggtggagccgcttgcggtctcggcgaacaccggcatgccctggccgacgccggcgctgacatagcgggtatgttcggccttgagggcttcggacttcgggcccggaatggcggtgacgatcttgcgtgctacctgtgggactgacatgatggcttcctttcgatccgttcctcatcactgttggttgtcacgttagaaagtttgcccataatttgttatggacgagttgtcgaaaatatcgtcgaaatatagacgaatccgttatgactcgttgtcggccggctaatctggagccatggcgattaccgtacgcaatctgcttgagcaacgctccctcaacctacgactggctgtggaaggttccggcgcgacgctggactcccccatctcatgggtgcaggtatccgaatcagccgacccaaccacatatctggagggcggcgagctgttactgaccactggtctggtaatgccggatggcacgcccgacgcggctcatcgagaatatgcctcccgtcttgcggagattggcgcacgtggagtcggattcggtttgggcatccagcatgaacatgtgccgcaatggctcatctatcaatgcgaagcggtcggcctgcccttgtttacagtgccattggcgacaccgttcatcgccatctccaaaactatcgcgcgcggcatctccgatgatacgcatcgcaacgtggaacgaatgtaccgcaatcagcaacgactgctccgtagcgtgcattcgctcgatccggtgagcacgatcatctcgcgtctggccgaactgatcggcggctggaccgcactgctcaatccggcgggcggcatcattgaatcttcccatcacacgctgccggtcgacatggactccttaagcgacgtgctcgcgttcagcgtactcggcgaggcgaagttcacggtggcgaaaggctacgacattgcgatttttcatgtggcctctcccaaccgacagacactgggctatctggtcgcgggtcgtaaaggcgagcgcggcgccatcgaccatccgttggtggcggaagccgcttcactgttgtctttggccgtgaacagcgaagcggcatccaatcgtgcgctcacgcacctgcgctccagcatgaccaggctgtgcctagaaggcgaatcgcagtcggtgcgtcgtttcgcggacgacgtatggaacgggctgccggtgcaaccgttggccgtattgcgcattatcggacagcaggatgcgttggaggatgccggccggctgttcgagccgttccgacgtacggtggcgaagaacgacaatcgtgtggtgttcggcattgtggacggcgatatgtgggcaatcgtgtcgcaatcgaatgcggcgatgtggacgcagcagctgacccgcacgggtcgactgaccgtgggccaatcctcaggtgcgacctggatcgatatgccccgtgcgcgacatgaggcatatcaggcgggcgcggaggcactgaccagcggcaaggcgctggtacagtacggcgacggcgagggcggtgcgacgctggaaggcgtggtggagccgtcgctgatgcgtgcgttcgcggatctcaaactcgcgccgatcgcgaatctcacgttcgacctatcaaccggaccgcacaccaaggcgggaacggcacgaacgacggaagccgcaccagcaacggaatcgtcaagcgacgaaacggattccggcacgcaggtacgtgccatcgacgtgctgtgggcatggctgcaaagccgcggcaggaccgaagaggccgcgcggatggccggcatgcatcggcatacgctgaccaaatatctgggagtcatcggcaaggagctgggtgccgatctgaacgatccgggaactaccgcggaactgtggtacgcatgccggttctcacggtttggcggcacgctgaagtgacattcggagcacaacggcgttgcacggcggcaatcagcgaatcggcactttctacaagccatcgacttcggtttcgaaggcgtagtaggctccgatcaggccggcgttgttggtgtggcggcaacgcttcacggacgtgcggaacgaatcccatgctggaatcttgtcaagtgccgcattgaccaacggcaacagctgctgctcacggcagacgcctccgcccaacagcacgcattcgggatcggcgaccgcggtaatgttgaacacggcaatggcaagatagtcgatccattgatccacgattttgcgcacatgcgggtcatccagcttgtggaacaacgtcgccggcacgatggacccggaaggcacgtccaattcctccgcatagctttcggccagcacgatggtggacagatagttttgcagggtctgaaaccctccgttttcataattcggaatcatcataccgagctcgccggcgcgccaatccttgccgcgtcgaatcttgccgtcaaggaacagggcgccgccgacgccggaatcgatggtgatcagcgcgaaatcatcgagcttgacggcattgccactgagtttctccgccatcgcagcacaattcgcatcgttttccatccatgtcggcaccggattatcgagatatttctgcagctctttgccgatttcatgcttatacagcatgccaagcgcgccagcggtgacggccagctgcctgtcgatatcgatgaatccgggcatgctcatggcgatgccgtcgagcgggaaacgttggttgttggcgatgtgcgcgagtgcccgatagaaggattccgcactgtccaccggcgtcgcgatagtgccggggatgcccatacggccgtcttcgaagaccacataacgggtgaagaacgtgccgatttcgaatgccagaatatgcttcttcgccgtcatttcgtcatctaacccgtctatattcgcccgatggtgcttcttcattgtagaaccatccccgacactcgcgcacaccaacctatagtttgatgacgttgacgccgtacggcctgagttcgatcgcatcgtcgatgcggccgcccgacagcagctcctcaccgccgttgagttcgctgacgcacaggcgcttgtcggtgttgccgttgttgatgaggaacgcatagcgtgtaccgtcatcggcgtagcgcaccgacagactcacgtcttccggggtgccgatcgaccccaagcccagttcgttcacgattgatgccatgaaggcatccatgccggtttcgtcgagcggagtgccgacgaagtaggccttgccggagccgaaatcgttgacggtgagcgcagaatggcctgcgtagaattcgctgccaccataggcggcgagccggcgtgcaccttcgcgatggatgatgctggccacgatctcgcccgtggcgtcgaccatgtcgccgtgcacttcgatggtttcgttcggcgcgagtgcgtcgatctcctcgacccatacgcccatgagcctgcggagcttgccaggatatcctcccggcaccacaagatcatgctcgtcatgcagacccgccatatagccggtcacgaagctaccgccgtcggacacgtaatgttccaacgtttcggcaacgcccggcagcacggtgatgagtgccggcgcgatgaccagatcatacttcttgagctcatcgagcggcgtagtgctttcgatcatgtcgacgggcacattgcggcgccacagcgcacggtaaaaacgatgcacctcgttcggatacgagaagccggcagtcgggccgacgcaaccttcgagcgaccaatagctctgccaatcgaacatgatggcgactttcgcgcgaatctcggaacccatgatccacttgccgatgcgcgccagttcgtcgccgagcgccgcagtctccttgaacacgcgggaatcttcggtgccatcgtgcgcgatgaccgcgccatggaagcgttcgcagccgccgatggactgcttcatctggaagaactgcacggtgtcggcaccatgcgccacggcctgccagctgagttttcgcacttcaccggggcgcttgaccttgcagaacgggaaccagttctgctggttcggagtctgctccatgagcatgaacggcttgttgccgccgatgccgcgcatgaggtcgtggcacatggcggtgaagctcgacggagtgtccatgcccgggtagttgtcccagctgaccacgtccatctccttggcccattcaaagtagtcgagatccttgaacgtgcccatgaggttggtggtgatcggcgtgacggcatcgtattcacgaatcgcgtcacgttcgttcctgtagcatgcgagctgcgcctggctttggaagcgacgatagtccatctgcaggccggagaccacgcatttggcgtcgccgatgccatcgccatagctgacgggtggcaccacgtcggcccattcggtgatggtgtggctccagaagttggcgcaccacgcctggttgagcgcttcgacggtgccatacttggccttgagccatgcgcggaaggattccgcacactggtcgcaatagcacaggccgccgcctccgccgtattcgttgcacacatgccagttcaccagacccggagtgccggtgtagcgttcggccacatgtgcggcgagcgcgcgggacgcttcgcggaagtacggcgaggtcgggcagaagttgtgtcggcctccgaacacgtggcgagtgccgttctgttcggtgcggattacttcagggtgcaagcgcaccatccagccgggcagggccgcggtgccggtggccatcacgatgttgaaatcgtgtttgacgagcagcgcaacgatcttgtcgagcatggtaaagtcgtagcggtcttcggccggctgcagcagcgcccacgagaacacgttgatggtgacttcgttgatatgggcgtcttcgagcatttcgatgtcatgctcccaagtctcctccggccactgttccgggttccaatcgccgccgaacaggaagtggtcataaatcggcttcatctggttctccttcttcagactgaatcttgtatgtgttcacttggcaacagctgccgttactcatcggcgacgccactgcctgcctgatagtgcacttcgttgaaatcgacgacgccgtcaccatgcgcatagacgccaagcaggattccggtgaatcctccggcgttggtgaagctcagcactttgccgggagcattgccgagcgtggtttcgtcggaagcggtgccgacggcgaaagtgtagccgtaatcgtcacctcggacgatcagtcgtaccggtccgcccgctggcacatgcacaccaccgacccgtgatatcagacccgcattgtgtacggttgcatcgatcgcgacggtatcggcttcggcggcatgcactgcgatggtcatatagtggttggcattcgcgtaaatcgcgatgccggccgttccggagacaagttgcgtcggatcggcgatggtcgccgtgaacgcacaacggaaatcggtctgccgtgtgccgaccatcggcgctcccacctccaaaccgaaatcctgccgcgcggccgtgacagtgatatgcgagcccgcatcgttcatcgtaaagcgatgcgccttgtcgatgctcggtgtgatccatgcgatctcatgctccagggcctcgccgcaaccgtcgagagggcaatcgtaggactggtcggcaagatcgggccaaccgtccttccacgtgaaccacactccatacggctcacggccaagccagccttgggcaggatactcgtcgttgttgcgcgtgccatggaacaccatcaaggttcgatcggcatcgaaatgggcgcaatcgcagtggccgatggcctgcagggtcaaatgtgtgctgcggttggtgatcagcggattgcccggatacatctcgtacggcccagtcggactggacgagcgggcgatgttctccatgtgcccggattccgtgccgccttcggcccacataagatagtatgtgccaccgcgcttgtacatgtgcgggccttccggattcgatccggtgatgcccccgcagatgcgctgacgcttggtcagcacggttcctgtggcgacatcgatgcgtgacagatagattcccgcgggttcgcgttcaccgtcgtcatccggctcggaaccttcgttgccgcagatgtagaccgaactgtcgtcatcaaagaacagactgggatcgatgcccggccatccctccacccagatcggatcggaccatccgttatgcggatcgtcggtggtgaggatcatgttgcctttgttgacgttggtgacgatcagatagtatcggccgtcatggtagcgcaacgtcggcgcgtagatgccttggctgttgcccatggattcataggggaactgggactctctgtccattgcgttgccgatacgccgccaatgctcgccgtcggcgctttcgaacacgggcagtcccggaaagaattcgaaggaactgttgaccatgtaatacgtaccctgaggggtttcgcagatggtcggatccggatggaaacctgacgcgatacgcttggcttcggttacgttgaaaagggtcattgcagggaactttcttcgttatgggttgtgttattgtgccaccgacatggtgcgcgcctcttggtagatggcttcgacctcgggatcaaagaaacggccggtttcgcggttgaggaagcgcatttccttggtggaggtgtcccataggatcgggcaggagccattggccagcgtgcagcggatgacggtacgcagccacttgatgttgctgtcgtgatccttatggtcgacgggttcggtcagaagaccgtactcgccgatgatcacgggaatgccgttgtcgatgaaacgtgccttctgtttggcgaagtcggcttcgaccgcggccacttcctcgtcgctgccccacacgtcgaccggcgtacaccagtcgctgtcatgttcggcgagcacgaattcggcgggcgagtagtagtggatcgacacgatcaggtgatcgtcgaccgtgtcttccggcagtcggaaacgttcgtcgcaggtcagtgcggtgtcggtgttgtaaccggggatcaggaggaatcggtcggcattgttgccgccggaggcgcgcacgatatcgacgaacagttgattcagccggttgagcagttcgtaggcggtgtcctgatgggcaacgtgcgggaagcagatctcattgccgccttcgaaaatcagatgatgatcgtaatcacggaatcgttccgcaatctgatgccatagtgcggagaagcgcgcgcagacacccggatagtcctcgctggcggtacggatccatccgaacgggccgttgccgccgtcgtgatgcacgtcgacgatcacgttcaatccggcctcgtaactccaatcgacggcttcctgcacggcagccatccataccggatcgacgttgccggtgtacgggtcctgccaatccttccacgtgacgggaatgcggatggtgtcgaaacccgcttccttgacgaagaaggcgcagtcgcgggtgaacggcttgttgcaccacagtcgctgctggtcttcgggcgtccacactcccccggtggtgattgtcttgttgcgttcgtcgttcagcggaaccgggtcgaaggtgttgcccagattccagccaagtccgaggccgcgcacaaactcaagtgccgtggtcattcgtattcctctctggtactgctgacgctctcgtcgggtgcaagaccttggtgggtcttccacccgacgagagtcatatggattcggttatgttgcctacttcaacgccaccgtttcgccggcaatattgaagttgacgtcgagcgtttggccgtcttggaacgtgatcgtgaaggtcacgtcgccgtcggtcactgaaccgtcgtcgaagaaggccggcagcacggtcagcgtaccgcttgcacggtcggcggaatcgtagtgcacgctgaacgatccgctgttctgcaggtactgccaccagccggagttcggtccgacgcgattaccgttttcggtcgcggtgatgtttttcagctcggcaccgttgaaggccatcggaatcgtcagaccttcactcttggtgccggtcacggttccggtggcgttcacggccggagtaccggaatgcactacgtactcgtgccagtcggcacctgcggagaacttcagcgtcaggtcggcgatgatgccgtaaccacccttggcctcgtacatcttggctagatagccctgcttgagcgtgattgtggcgctggcttcatcgtaggtgtagtcggaaccttcagtcagtccctcgatgcccttgaattcgttgccgttcaaggtcagcggcaacttgacgtcgccggtcggatcctcttcgagatacaaggtgtccagtccggttgcataggaagaacggccgttgatgctcgcttcgagcatcttgccggcaaggggcttcttccactggtagctggtgcggttgatgcccgaaccgttatcccagaacatataggagaagccgttctcgttggccattgtgcccatgtactcgtagtatttgagctcctcgcccgcctgtagtgcgccgtcggaggaagaatcataggccagcagaccgtattcgccgattaccagaccgatgccgttctcggtgaagtactgattcatgcggtcggcgaaggaatcgatgacgttgcgcggggtgcgctcgtcgccgtagatggattcgtcgaaaccggtgcgaccgagattggcgctgtacacccattcgctgtagtagtgcacggtggcgatgacgttcgcatcgttcttgagatccttgtggatgaagtcgaccgtcgcctgcagtttggcgatgtcgtcatgtgcggtgccgagtgtcggaattacgatcatgcgttgttcgttgcctgcggtggcgcggatgatgtcgtatgccgccttgctgacggcattgagcttggcctgcgcgtcgccatccgcgaactgcggttcgttgatggtctcgaagcatacggacagtggttcatcggcgaagtaggaggcgacctgtttccaatagtcgctgaactcctggtattcggcggcggaggtgtcgccgttccagttcttcagccagatccaggaatcgtgatggatgttgatcatcacgtacaggccttcatccacggcccaatccacgacttccttgtatcgcttcagccaatccgcgttgatgacgtaacggtattcgccgtccttcgcatccttgttttcgctggaacgatggtagacggtcatcggaactcgaatgctcgtgtagcctttctccttgacggaatggatgagctcgcgggtcaccttcggattgccccaggcctcttcacccttgtcttcggcactcagatcggtgttgacgccatcgaaggaattgcccagattccagccggcgcccatagccttggcatattcggtggaagacaacgtggcaacttgctcgtaggtaatggtcacgtcggaggcaagctgatattccttaccgttcacggcaatcgccgaggtgacgccttggactgtggcggtgtgctgcgcagcggatgcctgccgttgcggaacggcgtacatgcagcccgcaatcatggcgacggtccccagcacggcaatcgtacggcgtacggcaagacggccgttctcccacttgcaggagatgccgacacctgcaagacccaccgcaatcagtgcgatcgcatacaccgcggagcctgtgctgccaaggattccggcacttttcttaacggccttgttgtcggttgttttgcgctgcgtatccgtcgatacggttgcggcggtgttgtctgtgatctgctccttggttttgccggaagtggacccctccttgatgtggatggtcagagccttaccgtcctgctgcgcgaccgcggatgcgccggattgcagtccgctcacctgccatgcgtagctggctgcggcgccatccgcgagaatctcttgcggcacggtggtgacaccggttgccttgacgatggtttcactgccgttgttggtgatggtcagccggtattcgccggcggcaacccgttcggcgttgatggtcaccgcggcatgctgctcggcggccaaagcgggtgtcgtcatgccagccatcatgagaagcacggcgaacattgccgtgaccacggtcagcagcgcacccatgcgccgctggcggccgttccttcccatgacttgcggcacaacttcgtgcctcgtatgcaacaacactattttccctttctgataggcaccggccagccaccgccctacaaacaccggagcacaggcctcttcgacagctggttggtacactttcatcgacactgttgtgtcaacgtgggttggatggcgaggagttcgtaggccacgcatccaacacaatgcatcaagagcgtgcggacacaccttttgtccgcacgctcttgtcattcatttacggcatgcacggcgtatgcgatcacacgtgcaacggatcggtgcccggacgtgccaacaccggcagggtatggtagtcgtactgctcggtgtaccacttgcccggctcgtatgcggtgtcggtgatgatgttggtccacgcctggccggtgccgtcgtccggcacgtagaagcgggccacgccatcctcgcggaacaccggggcgaccagcaggtcgtcgcccagcatgtactgggtgtcgatatcctcgcaggtcgggtcatccgggaattcgagcaccatggcacgcatcatcggaacgccggtctcgtgcgtctcctgagccatcttgagcagatacggcttgagctgcagcttgagctcggtgaactcgcgggccacgtcgacggcctcgtcaccatacagccacggcaccttgtaggcggtggagccgtggtaacgggagtgggagctgagcaggccgaactgcgtccaacgcttgtacaggtccgggctcgcctggtcctcgaaaccggcgatatcgtggctccagtagccgaagccggacatgccgaagctcaggccggcacgcagggattccgccatggacgggtagttggaggagcagtcgccgccccagtgcaccgggaactgctggccgcccacggttgcggagcgggcgaacagaatggcctcatcggcgcccttggtctcgacgagcacgtcgtagacggccttgttgtacaggtaggtgtagtagttatgcatcagctccggatcggaaccgtcataatacttgacgccttcggtcgggatgcgctcaccgaaatcggtcttgaagcagtcgacgcccatggccacgagcttcttcaggtagccctgataccacttggtggcctccgggttggtgaagtcgacgatggccatgccggcctgccacttgtcccactgccacacggagccgtcttcgttcttgatgaagtagccgttcttggcgccttcctcgaacagcggggacttctggccgatgtaggagttgatccacacgcagatcttcaggccgcgatcatgcagcttcttgagcagaccttccggatccgggaacttggacttgtcccagtcgaagttgcaccattcgagttccttcatccaacggcagtcgaagtggaacacggacagcgggatgttgcgctcggccatgccgtcgacgaactcaagcacggtcttctcatcgtagtcggtggtgaaggaggtggacagccacaggccgtagctccagtccggaaccagcggggccttgccggtcaggtcggtgtaggtgttgagaatcgccttgagattctcaccgccgaccacggagtagctcatttcctcgcccggcacggagaactgcacgcgggagaccttttcggagccgacttcgaagctgaccttgcccggattgtcgacgaacaggccgtacttcctgttggacaggtagaacgggatgttcttgtaggcctgctcggtgccggtgccgccgtcctcgttccagatgtcgacggtctggccgttcttgatgaagttggtgaagcgttcgccaaggccgtagatcttctcgcccacaccgaggtcgagctgttcggagacgtgcaactggccttccgggtcggtgacgaggcccttggcacgccagccggaatgcgcgatgaccttgccgtcgtacaggtacttgaagtcgatggtctcgcccttggcgatctcgagtgtcagacggccggaggtgaaggtccacttgtcgtcggtttcgtcgatttcgacatccggatcggtttcgttcaagccgaacttcgggcagttgctgcgatccttcttgaagttgatcagcttggtggtgatcacgtcttcgcgaggcgacgtcacctcgatggtcaggatgccgccgtcgagggtcatgccggcgttgtagatcggagaaccgaacgggcagaacagagtgagcttcttcggctcgatgttggcggtatagatgtttgccgcatacttgacgctgaagccatccttgacgagccagccgccgttgaggaacttcatacattgctcctttgcattagtgggattccgctttggaggatcggtccgcgacctatcctccaaagacgttcgttatttcattttactttatttataagtttatagataagcgttatgcgacacgtccggagagacggatatcttccacggattctcccacgaacacgcttgcctccggtgccagggcgtaggctccggattcgttggaccagtaacgcaacgccttggcggcaggcatcgccacggtgacttcgcggaactcccctgcgtccagctcgaccttggcgaatcccttgagttccttggccgggcggtcctcgccggtgccttcaagaccgagatacacctgagcgaccgccttaccggcgcaatccccaatgttctcgacggtgaaggtgacgcggatctcgtcatccacctgacgcacgtcaagatcgcggaatgcgaagtcggtgtagctcaggccgtgtccgaacgggaagagcaccggaacctgcctggtgtcgaagtaacggtagcccacatagatgtcttccgcatagtcgacgtggccttcgagtccgaaggtgccgatcctgtgcgcaggttcgtcggccagcgcgatcgggaaggtctccggcagatggccgctcggatttacgcgaccgaacagcacctcggccagcgcggcgccggattcgcaacccgcataccagttccacacgatggccttggccttgtcggcccacggcatctcgatcggggagccggccacgaaagcgagaatcgtattcggagcggcttcgagcaacgcttcgatcaactcgtcctgaccgtacggcagacgcatgtcggtgcggtcgcgcccttcgagatcatgctcgtggtcaagaccgccgatgaacagcaccggatcaccggcagccgcgtattcgcgcgccttggccacggcctcttcgcgcagttcgtgtgcgtgcagctcgtccttggcgtcggaacccttggagttctcgaggctttcctcctgccaggattcgtcctgattcacctgcttggcgtcatagccgagcacatactcgatgtcgacgttgccgccgagttcgccgttgagccccagcagaggcgaaatctcatgcagcgccttgatcacggccgaaccgccgccgttggagtgaatgcgatcggcgttcgcgccgatcaccagcagacgggtcataccgcgctcgtcaagcggcaacaggttttcgtcattcttcaacagcacgatggattcgcgggcgatctccaatgccttcgcggcatggtcgatggtggcgtaacgtcccggcttgcgggtcgcacgggcgtcgcccagcatgtgcaacgcatccatgacggcgatcacgcgttcgactttcacatcgacgtcgctttccttgacctcgccgttctcgacggctttcttcagcggattcgcgaaatagtaatcatcgaagttcggcgtcaccgacatctcaacgtccatgccgacctcggcactggccttggtgtcacgcaccgcgctccaatcggagacgacgaagccgtcgaaaccgtattcgtcacgcagaatgtcgtcaagcagttgcttgtgttcgcagcatttggtgccgttgacgagattgtaggcgcccatgacggagagcacgccgccatcatgcaccgccgcctcgaaagccggcaggtagatctcgcgcaatgcccgctcgcttacggtctcgtcaacgtcaagccggtcggtctcctggctgttgaccgcgtaatgcttcgcgcaagcggccacgtcggattcctgcacaccctgaatgtaggccacgccctgcgtggcggtcagtaccggatcctcgctcatgtactcgaaattgcgaccgcacagcgggctacgcttgatattgatggacggtccgagaatcacgtccttgccgcggccgcgcgcttcctcgccaagtacctcaccggtcgcgcgggccagatcgggattccatgtggaggcgacggcggagccggacggcaggtaggtcacatagtcacgggtgttgtacagcggcgcccagttgtcgttatgcaactctgcccgcacgcccatcgggccgtcgtccatcttgagtgatgggatgcccagtcgttcggcgcagccattcctgaacaggccggcggcgtgcacgatggcgatcttttcgtccaacgtgagtttggcggtcaggtccctggccttggtcttgttggcttcggtgattacggtcatgtcttcttctttcttcgctcccgtcagcgggaagctggctgaaagcggtcgctacgttgttcttctcgtcaaccgacggttatcttgaatccgatcggcaggccttgctgatcgggttcccttggcagcggtgagatctccaaagcctcatcgccgcgtttgaagcgcaccggtcccgcccccagctgttccaccgattcgacgatgccgttgaacggcggtttgacgccgtcgtgatacgcggcgaacgtcgacactgcaagtgtttcacaagatgtttcacaactatccgcaatgtcattgggatgcaggcagaatgcgtagatcgcgccgtgcttcgtggtgaatcgccaatccgcggcggtccattcggtcggcttttgatcggcgaacatgccgtcggcctgcttcgtaggcccttcctgcgtgagcctccatggtcgggtgccgtagatgccctcaccgttcgtgcgcaaccaatcgccgataccgagcaacagctcacgatcatggtcggcgatcgaaccgtccgcacgaggacctacgttcagcagcagattaccgttcttcgataccgcgtcgaccaacgcgacgatcagctcggcaagcgtcttgtactccagcgagttcgtgtagcaccacgaattacgggcgattgcggtatccgtctgccagacgaacggcgtggcatcggcaaaacctccgcgttccacgttgacgatgcccgcgccccaggcgagaccgtcgtacttatagcagattgaaacgttccgcccccactcgacgccacgattgtagtagaaggcggcaagcttcctcatgtagggtctgaacgattcgtgttgcacccaccaatcgaaatacagcagttccggccggtaatcgtcgatgatctcgcagacgcgcagcagccagtcctccagatattcggcggtcggcgtgggagtgctgtgaatgtcgaattcgttcggttcgggcatggccggccaatagaaatcgcccttctgcaacggctccttgatatcggagtcgaagtccttgccatggcccatgaaccaccagtgctcggcgcgatggttcgacgtggcaaaatgcaggccgtgggcatgcgtggcgtcacgcaactcccccagcacgtcgcgatgcggaccggtttcgaaggtgttccagtgcgacaattcgctacggtacatctgatagccgtcatgatgctcggaaaccgagaagtagtagcgcgcacctgcggcggcgaacaggtcgagccactcgttcgcatcgaaccgttcggcggtgaacatcggaatgaaatcccgatagccgaactcgttctgtggaccataggtgttcacgtggtgttcgaattccgggtagccctcgatgtacatgttgcgcgaataccattcgttgcggtattcgggaacgctgtagagaccccagtgcgtgaagatgccgaatttggcatcggtgaaccatgccggggccggagcctggctcaacgactcccaggtgtcggcgtagggcccggaggcgatgaccgcctcgacggtgctcagatcaatcatcgaacgtggtcctgttccaatcgaagcccacggcctgacaccatgcacgggcgatgatcatcgcaccacgctcgtacggatgcacacgatcctggctggccaagcatccgtgcaactgggtgagccaatggtccacggccgcctgcgtatcgacgaaaatcgcgccatgacgttcggccacacgcttggacgcggccgcgaactcctcaaccttggcgcgcatggcatcctgtgggttcggctcgaacatgaacggacgcatgacgatgatccccttaagattcggtgcatcctgtttcacgcgttcaataagctcatcatagatacgctcgtaagtttccacggtgttgaggcgagcctgccacagcggaccgtcgaaataacgccaggcgtcattcacgccgatcatgatggacacatagtccggattcatgtcgatgacgtcactctgccagcgttcggacatgtcgacgatatcgttgccgttgatgccttcgttgatggtgcacaatgccttatccggatatacggccgtaagaagattatgcaatgtgttgacatacccatgcccatatccccagcctccggggatagcagtacggtcgcggtcggcgtccgtgatggaatcgcctacgaaaacaatgcgtgagtgcttttcgaaaatcaactttgattcctttggtgtcatacggcgttgtaacagcgctcggttcatatgaacggtcggattgatgggttggtatgtaaagaaaggcggggcgccagataccggttcagcacatctggcgccccgcctctttcagttatttggattacgtggtggggactaacgcctcatcactcggaggaggaatcggagctggaggacttctccttgttctgatactccttcaggatgttcttacgggccttgtcctgatccttggcgttcttcatgtcgaccttcagcacggaatcgatgtccagaccgttgacggtcttgatcatctcgttgaagatcttctcgcattcggactcggagctggcgaaggacgccttccaagaggagttgacgatctcggtcttgatggagccacgcaacgtggagatctgggagttctcctccggctggacatagctggagccagcaccgacgagcagcatatcgttgttctccaggtactccatggtggtggaggcacccatatgctcctgccaatccttgttcagcgggttctggttggccttctcgatctcgcttggccacatgaccgggttgtaggtgtaaccggtatccggatcaatgtcgttcacggtcacggtggtgaagttcagagcggaaataccgtcggagtaggagccgccgccccactcttccggcacgttcttggattcgccggaaagcaccgcggaaccgaattcggtcagaaccggcttgccgtccttgatctcccagttcagacccttcggaccagcggagccaccggtctggttggaggaagcatagacgccttccggagagtacagccagttgatgaacttgaccaggcgctgcttgttcttggccttggagcccagagcaatcatagtcttatcgccacgaggagcggcgccgtatgagaagatcttcatgtccttgagcggagccagcatgaagcccttgccctcagccttgttggcgttggtgttgtaggctgcctgtccaagccacggccagaaggagaagagcaccttgccgttcttgtacttggagttcatggtgtcgtagttctgggtggtggattcaggatcgacgatgccggcacggttggcggcattgaagaacttgatcacgcgctcgtagatgccaccttccttggtgatggactcgaagtcggagccgtcacccttggccagcacgaagccgacttcgtcaaagccgtagaagcaggtcggctgcttggcgttgttcatcatgttgccgtcccagtccttgaacagagacatggcgtagatgtcatcggagccggactcttcgcgagccttgtcctgcatctgcttgagtaccgggatgaggtcctcgagagtgtcgatctccggataaccgatttccttgtacagatcccaacgcaggtacgggccgaaggtcggttcgaggccttcggacggctggtcgggagtcagggtgtcgaccacggatgccggaacgccccacacaccggacttctgaccgatctgttcgttgacgtaatcggtggcatccttgtacttgttgatgtacttcatgcccttgaggtacggggtcatgtcctcgatcaggccggacttaaccagcttggcgcccttaccggtgtcatagccgtagatcacgatgtcgcccagattgcccgcagctgcgcgggtatcgaacagggtgctgccgccgcctgcgacgttcggagccacgatattgagcttgatgttgaacttgtccttgatgatcttggcgaaccagcccttctgctcgccctgatagttcgccagaccgtcaaagacctcaacggtcatcagggagttatcatccttttcggcggccgtggtgctgccggaccctccgcaggcggagagcgacatcattgctgcaagcgtcactgccgcagcaatggttaccttctttttgagggacattgcgtccttcctttctctatttccttttattttgcagggatgggaattgagattgcggggccggtccgaccggcagatctcgccggcccacaatggctatagggagtaccgaaccgttacgaatcagcccttgacagcaccgagcatcatgcccttgacgaagaagcgctggaagaacggatagacgaacagaatcgggagcaccacgattacggaaaccgtcatacggatcgaggtaggcgtctgctgcgttgcgagagccgctacgttcatggcactacctgcactcgctcgaaccgaagcggccagtgcatttgcctggttgatgtaggtgtaaagcacgtactgcagggagtagagcttggaatccgtcatgtagatcagggtgtcctggaaggagttccactggccgacggcggagaagatgccgacggtcgccagaatcggggccatcatcggcaacacgatcttccagaagatcgtcagcgtgccggcaccgtccatttccgccgcttcctgcagggaggcggggatggactcgacgaaggtcttcaccaggatgatgttgaacggctgcacgatggccggcaggatgtagacccagaagttgttggtcagatgcaggttcttcatggtgatgaacatcgggatcaggcctgcgttgaagtacatggtaatcacgatgaagcggtaccagaacttgcggtgccacatcttctcttgggtgaacatgaagccgaggaacgcgctggcgatcacggtgagcacggtgccgatgacggtacgagccacggagatgaaggccgaggtggtcaggccgctcagtgcgaagacctgcttgtagttctcccaatggatgccctgcggccaccagttgacctggcctgccgcggaggcgttgttgctggaaatcgagttgatgatcaggtagtagaacgggtagacgcagatgaatgcgaacacgaggaagaacaggatgttgaagacattgtagacttcctcacccttggtgcgcctcatagccggtgcgataccctgcttgattttctttgccatgattgcttccttactctttcctcatcagacgatcgatacgccacgggtacgcttggacagccagttcacaacaatcagcaggcctacgctgaccagcgacttcagcatggagattgcggttgcatacgacagggagttgttgcccataccgacgttgtacacgtacaggtcaaggacttggatgtgcttggtgttgaaggcgttctggaacacgaagtactgatccatgccgttgttcaggaagttggagatcgacagcatcaacagcacgaagtaggtcggcagcaactgcggaatcgtgacgtggacgatctgctggaagcggttcgcaccatccacctgggcggcttcgtacagttccgggtcaatgcctgcgatgccggcgaggtacatgatggagccccaaccaaggcccttccataggccccacagcaacatcttcagccaagtgtgcgaatcggaatcaaggaacttaatcggctcgctgatgatgtgcaagttctgcagcatctcgttgagcatgccggtggtggagaacatggcgaaggccactgcgtagaccagaacccaggagatgaagttcggcagcgtggtcagcgtctggataaggttcctgaaccacttggcgcgaatctcgttcaatgcgatggcgaagaacaacgggaagaacgaggtgaggatgttcaggccggacatggcgaaggtgttgatgagcacctggccgatggtctgaagctgcgccgggttctgcaccatcatcttgaaccattgcagaccgacgaattcgctctgggacagcggaatcggcggctgataatcatagaatgcgtaaacccagccgaacagcgggaggtagctgaacagcacggacagaatcaaaaatggcgaaatcaacaggaacaacttaaatccatggcgcttcctgtcgctttgctgttggctcagcttctcggccttgcgcacggctcgccgtgtttttttatcggaaagcgtcatagcacctgaaccactgccatcagcagatgtcaccacactctccattccctcttgtgactgcatcattcctcctttggttcggcgatgcatccgatggccccttcaggaacgcaacacttccttgatgccgtcccatctggtaaccttcttatttattgcttaataaataagctgttaggagctatagtatattcgtcttactaacttgtcaattcagcgcgctcaacggcgagtatgcttggaatatcaacgaaaacggaggtccaatgcactacaatcccaatagccccgtatggcagttcgtctcgctctgcctgcggtatttcatcctcaacctgttcttcctgatctccatcatcccgatcgtaaccatcggaccggcccgagccgcaatgtacagcaccgtgtttgccttcagcgacaatgacgacatcaacctcggccgcgaatacatccgacgcttcaaacgcgaattcaagcgcggcatcggctcttccatcatcttcgtggtgctgattgccgccatcgtgttcgccatcgtgttctggaacgcgctcgacaccaacgccgcctacataacgcttccgatcctcatcatcttcggcgtgctcacgttcctgaccttcgaatactactatccgcttcaggctcgctatgagaacaccttccggcagacgctgcgcaactccttcatgatgccttgggcctgtttcggatacacgctcggcatcctcgccatcgacgtggccgcgggtgcgatcttcgcattcacgccgtatctgcgattcctattcatcctgctcggcttcgcatggctggcctatgctaagtcactgctctatctgcgggcgttccagcgtgtcagcggcgacccgaacacgccgcgagaaaagcctgattactcgttgcccagcgcctccatccaataacccgtatctgcgcatcccctcgaacgcacggaacgcgaccgcctgccctcttcacgattgtgtaaggccctcattagcgagaaccgcaccgctgctcaacaaccaggacctcaaacacgcatgttagaggtcctgatttgcgaggaaccctgcggtactcgcaaatcagggccccaaacacccggattaaagtccgcaagctgcgagtacaccccgtctactcaacacaaaacgccactgagcacaacccagtggcgtttcgatcctcgccccatccggttcggaaacgacggttccgaaccgggcagtcctacgacagcatcaccctgccttccgaagcggccacgacctccccgaatcccagacgtgcggtgaacgctcggccgtccgagctggaaacctccacgccattggccgtctttcgagccgagaacgtcacggaggaaccgtccgcctcggtcaccacggccttagcagcatcggtgccatcgaggaacacggagaccagcgcatccttgccatattcgtaatccggagtctcggcccccggcttggtaaccagcacgctgccctcgcgcacccacaacggaatggtgtcgaagccatgccgctcattgcgccacacaccatgctcggaagccaccttctcgccggtgaaccagttggtccacacgccagcaggcaggtaatactccacatcaccggagtaggtgaacaccggagccaccaacaggttcgggccgaacatgtattggcggtcgagcgtacgacaggtcggatcatccggaaactccacgaacatggagcgcatgaccggagtgccgttcagatgcggctgcaggccggtctggaacagatacggcatgaacgaaagcttgagcttggtgaacgtgcgggccacatcgacggcggtctgtccgggcgcattcaccacaccgttcttctcatcctcctcgtcgaacaaccacggcacacgatacacggttgatccgtgcatgcgtgagtgcgatcccagcaggccgaacgccacccagcgcttgtagaccgccggatccggacgggctccttcgaaaccgccgatgtcatggctccagaagccaaatccggaactggtgattgacagacccgcacgcaaggtctgcgccatgccattgaacgtcgattcgcagtcgccgccccaatgcaccggctgctgctggccgccgacggtcgcggagcgggcgaacaggcacgccttacccttgccgtacgtctcctcaatggcttcgaataccgcctggttgtacagctgggtgtaccagttgtgcatggacaacttcggagagccgtcgtgccagaccacatcgcgcgggatccgctcgccgaaatcggtcttgatggcgtccacaccttgatgcagcaacgccttgaccttgcccttgaaccaatcacgggcctcgggattggcgaagtccaccagacccatgccggcctgccagaagtcggtctgccacacctcgccgttggctttcttgaccagatagcccttatccttaccttccttgaacatggagccgcgctgaccgatatacgggttgatccacgcgcagatatgcagccccttatcctcatgcaaccgcttgagcgtggattcgatgtcaccgaagaaacgcttgtcccattcgaagtcggtccaatggaattcgcgcatccagtagcagtcatagtggaaggcgctcagcggaatgtctcgctcggccatgccatcgatgaaggagttgatggtcttctcgtcgtacttggtggtgaacgaggtggtcaaccacaggccatagctccatgcgggaacattggcggggcgtccgaccagtgcggtgtaacggtcgagaatctgcttcggcgtcggaccgtagatcacacagaagtcgatggtctcccccggtaccgagaactgtacggcctcggtattttcggagccgacttcgaacgacacatgcccgcgattattcaccagcacaccgtatccgttggaggtcatgtagaacggaatgtccttgtacccctgttcggaggcggtgccgccgtcttcgttccaaatgtcgatggtctggccgttcttcacatatgcgccgaaccgttcgccaaagccatagacgttctctcccactccaagacggagctgaatcgccgtgaatacgtcgaattcatcgtatgcggagccgtccatggtcacaccgaattcaccgaccggctgggcggtcacgttggacaggccgttcagtgtgaaacgtcccaaggacttgcccgacgactgggtgagctccttgccgtccctgccgaggaaggtcagattccagggggagcctttgaccacttttgccgtcaatccacccgacgtgagcgaaatgctcgcgccatcctggcccacttcgccgtcaccgtcgccttcggccgccgttcgtacataatcccgatcgcctgcatcgtcagcgttcaaagggaatcccggataatcggtcgctccctgccagtgaccggcgaccacacgaatcacaccttccgccggggcagtgacatcgatgttgaatgtgggaagattcaacgtatcgtaacgtccgtggactacggaagtcggagccaacacattcagactttccttgtcttcgccgacgttcagctcatatgcctctcgcgcgtacagtgcgttgacgccgtctcgaatcatccagtatccattggtgaacttcattgtcgctactcctgatataggttcccggctccgaacaaggaaatgaggaaggattcggagccgggattgatttgctgaaattacgattttccgctacttgacggcccctgcggtgatgccgcgggacagcgtgcgctggaagatcaggtagaagatgagcgtcggcacgatgctgatgagcgatgcggcggcggtcgtcgtcacgtccatcagacggtcgccggtcagcgagctgacggcaatcgggatggtctgcgtcgaattgtcgatcaggaacgccatcggaatcatgtactcgttccatgtccagatgaagaagaagacaagcatgacgctgagcgtcggcttggaaatcgggaacacgatcttgcggaagatggtccagcggctggcaccgtcgatggtcgccgcctcaagaatcgacttggggaacgtaccgtagaccgatgacagcaggtatgtgccgaacgcgctctggatgacggtgaagatgatcacaatcgcccatggcgagttgtacaggccgattttcttgaacatgatgtacagcgggtacagcatggcttcctgcggcagcatgttggcaagcatgatgagcagcacgatccagcggcggcccttgactcggccgataccgagggcgaaggcgttgaacatcgacagcaccacggcaagcacggcgaccagaccggaggtccagatgctgttccacagcttctcgggatagttgacgcgattccagaacttcatcaggccatcggcgctgaattcctgcggccaggacagcggaccggacgagttgtaatccgcggtggtcttgaacgcattgagcaacagcacgatgaacgggaagagcatcaccaggccgactatgatgagcagggcgagaaccacccaatctccagcggtgcgattcttcctgacatgcacgggaatgttggttgcggaagtcatgatctcactcctcgtcttccttcgcgaccttctcctgaaggttcgtgaacattacggccacgatgatgatgacgacggtcagtgcggtcgcgatcgcggcaccgtagccgacttgctgggattggaagaactgcacgtaggagtagtacgacggcacgatggtgctggttcccgggccgcctttggtcagcatgtagacgggtccgaacactttgagtgcggcaatggtgcaggtcagcgccaccacgaagatctccggcttgatggccggcagggtgatggccagaaagcgttgccaccagttggcgccgtcgaggctcgccgcctcgtagagttccggatcgacgcgttgcaggccggacatgaagatgaccagcgggtagccgatctgaatccagatcatgatgagcatcagaaagatcagcgccgtatccggtttgccgagccaatcatgctgcagtccgcccagaccgatggctttgaacaatgcattcaacgcgccattctccggccggaatatccaacccatcaccagggacgcgaccgcaatcggcagcagctgcgggaagtagtagacggcgcgcatggtggaagcggttttcggaccgaatttcttctgcaccacgtcgaacaccagcgacgaaaggatcagaccgatcagaatcggaatcaccaccatggcgatgatcatccagatcgagttacggaacgacacccagaacgtggtatccttcaccagtctcgcccagttggtcaatcctgtgaatttcggcggtctgatgcctcgatagttggtgaagctgagatagatgttccagatggccggcacgatgatgatccacagcagcatcaggaagccgggaagcaggtagagccagaatcggcttgacggattgcccggaatacgggacatctccttttcgcgcgcggtcggttgctggccgtgcggtcggttgtgttttgcatgagcgttcataacgtagatcacttcccatgattcgcatcccgataatgatccggacccctatgtccggtggcgatgcagttgggttaacggtgcgccgacgtcatccggtcggcgcaccgacgatattcagttatttatcggatttccgaaggccttaggacttgacgcctgcggcttccacacccttgttgtagttgctttccagttgcttaagcacatccttcacgtcggcggtgccgttgaccagctcctgcaacgcggagttcagctcgtcgtagaaggtggaggtcggccaatccgggtagaagccgagggcgttcttctcaagcacgctgttgaaggacgtgatgagttccttggtcttttcgtcggtgatcttgtccgggtcggcggcaatcggcagaccgccggaattgcccatgagattctgaacttcgtcgctcagcgtgatgtcgatgaactgcgcggcgagatccttcctcttggaattctccggaatgacccagatgttgccggaagaacccacgaccttatcggtgttcgggaaggtggagaaggtccagttggcgttcttcatgtcgctctggaaacggccgaaccaccaagtgccggagaagaacatcggataggtgccattcatgaaggactgaccggcgtcctcggccttgatgccggtgcaatccttggaaatgtatcccttgtcgacccagtccttgatggtctgggtggcataggtggtcgcttcgccctgccagtcgacgtcgccatcgtacatctcataggctttgacgaacttgtcgtttgccttggacagcaccaactgccaccacaaatgttgcaacgggtattccgcggcaccttcggagagcggggtcaccccgttatccacgaacttctgcatggcggacttcagctcgtccaaggttttcggaatctcgatgccgtacttgtcgaacatgtccttgttgtagtacatcacgacatcttcgccatagttcgtaatgccataccagtcgccggaacccatgacgcccttgtcgtcgtacttgccggtgtcggccagggtgccgctgactttcttatcccacttgtatttgctgacgtaatcgttcagattggtgagcaggccctggctggccagcaggccggcggtggcgttgcccttgttgtactccatgacatccggagcttcatcggaattaaggatctgggccgcattctggcgaatctgctcgaaggacttcttttcgaattcgaccttgacgccggttttcttttcgaagatttccatggccttggcccaagctttgccttgggccccgttatcttcttcatagtgccagattttgatggtcttcggattgctctcctgtgcgccgtcatcgccgccacagcctgcaagacccagtgttccgaacatggtcgccactgccaatccggcggcgacaagtttacgggtggacttcattgtttctccttttcagcgcctttactgaaatgagtttcgaaatatattcgagggactcattacccataaactaaaagatttccgccttcttttcaatttgtttcgacattttttcgataagtcatcatattgtcgtaaacattgggagaaactacaggatgttacacggccccatcgtgccgcgggcaacatattttcccggcaacagctcaacggcaccgacgtcatgacgacgatactcgagaatctccatcatggtgtcgaccgcacgagaacataccacattcggctccatcggcatctcatcaaccgcttgcggcaattgctgcaatccgtacgtgcaagcagccatcaccgaaatgtcttgcggaactaccagattacgctcatgcagcgcaatcaacaggttgttgacatgcgtggcattggtctggcacacaatcgccgtgatttcaggatcttgagcgaatgcggaatccagcagcaaccgtacatcagccatgccatagcccgtggatggcatgaacgacactttcatattcagatcgttgccccgtttaacgaccgcatcgcggaagcgaatcaggtagttcgaaccatcttcgtaggcgaatccgctgttgccgacgatcagtacatgcgtatgccccaatgcagaggccttttccatggcctcgcgccccatccgctcgaaatcaagatccacggaatacaccgcctcggaattcgaagggtatccgacgcagaccaccggcacatcaagcatggcagccacctcggcacgcgaatcggtcatcagcacgtcgagcaacaggatgccgtcgaccatgccgctccgcgcgatgcgggtcagttcccgatcgccatattcgtgcatcagcagcagaatgtcatagccgtaccttttggcacgggtggcgagcgcaaagaagaaaatcgcgtaattcgagtaatccgtatactcatgcagcggcgagctcaacgccaacaccttggtccatccgccgtgtatggcacgagtctggccactcgtgcgatagcccagttcgcgggcggcccgcaagactttcagtcttgtctcctccttgacggagcgcttgccactcatcacatacgagaccgtgctgatcgacaccccggcccgagccgctacgtctttgatgccagccatgtcggtctcctgcaactgtccgttgaatccgcccgtaggtttttatagtatgtcagtctatcgttcgacgttcatcgcaatgcgattcactcacagcttcagcccgtcagccgaattgggcctaccgaacacccgcttcagcggagtttcgactagactatccgcacgaaggccgctgagtcatactcagcggccttcgctcaagtcaaccgacgaatcatgccaagaaccaggcgatgccctcaccgcggctggcggaaatgccggtcaccgatcggctcgaatggcgtgtgcggctcgagctgataccagtaggccaccgaggcgacatcgtcctgccgttcgaaattgccggcctcctcagtgccgatctgctgccattcaacgcgcaaatcggaatcgaaatagatcggatcggggatatgccaacggtatagaccgcgcgtcaccggcgtattgatgtcccagtaggcgctttcccgattcgcggcgagttgctgcgaatagaacgggaaccccagatatggcccggtaaacgtccgttcgctcatatgtccgttgtcatcgaagtcggcgaagctccatgcgccgccgaaatagtcttccgcaccagtgctgcaccaggtcggatattggctgtcgccatcgatatacatcttgaactcgccctcgccccaccaacggctttcgagcgcggtgagcgccaggtaggtgccgatataggcgccacggccgcgcacgccgtcgagcaccacatagtcgcgtgcgagttccgtaacccgctcacgacgccactgtgcatggaagcgcatggcatcggccggcagttcgtcgtattccgtgtagtcgatctggtagaagaaggccggcacgtcctcgttgtggtcgttgcgcaacacgatacgcgcatgttcgaacggcatggtgaagtagcagttgaagccacggttgggcaccaccatgaccgggatggagttgatgcggcaggcctgcgcgtggccgcagcagaaaaagtcaccgatcgggcattgcacggacggcgactcctcaccatcccaatagcattcgaggatgagattgcgcagcacattcgggcctgtcggcgacgtccgatcggtgacggtcatccagatgtgacgaatcacgccaggaccgtcgacgtccatcagcgttacggcatcgccggcgcgaacggtctggatgcacggactgcctttgcgagaagggccaagtttgctggccgccgtcgcggccatgcccttgccgccggtcggattttccgcgttcacgcaacgggtgcgaccgtggttcgcggcgagcgccaatgcgtccaatgcattatgcccgaagcctgcggaaccgaagccgatagtggtcggatctgtcatgattgctcctttggaggggttggcgcatcatatgccgttatcagctgcattgcagctcctccgcatatggtgcgccagttatgtttcctgcagtcatcgccttacttgaccgcgcctgcggtaatgccctgcgacagcttacgttggaagatgatgaagaagatgatggtcgggatgatgctcagcagcgatgccgaggccaatgtggtcgcctccattgtacgctgcccctgcagggtggcaagtgccagcgggatggtctgcacgtcatcgcccatgaggaaggccatcggaatcatgtattcattccaagtccacacgaagaagaacacgaacagcacactgatggtcgaccaggagatgggcaataccacctttcgtagaatctgccatctggaggcgccatcgattgcggccgcttccagaatggcctgcgggaacgtgccgtacacggaggaaagcagatacgttccgtaggcgctctgaatgatggtgaagatgatgatgatcgccagtttggtgttgtacaggcccacctgcttgaacatggtatacagcggatagagcagcgcttcctgcggcatcatgttggcgagcatgatggccagtacgatccatgtgttgcctttgactttgccgatgcccagcgcgaaggagttgagcacggacaacaccacagcggccacggccacgaccagcgagatgacgaggctgttccagaatttgagcgggaacttcgtggtggtccagaaggaaacgatgccttccatggtgaagtgcttcggtagggagagtgggccggtggcattgtagtcggcggaggtcttgaaagcgttgacggtcaggaccagcagcgggaacagtaccagcagagcagccacgatcagcaggatcagcgtgatccagtctccggttgagcgaacatgttgtgttttctttgaggccttgcgcgcggccgccgcggacatggtttgggtcatgattccacctttgctttcagacgagttccttttcgacgcgcttctgcacgatcgtgaacacgatggagaacacgatgatgaccgcagtcagcgcagtggagatcgcagcaccgtagccgacttgctgcacttggaagaattggttgtaggagtagtacgacggcactgtggttgcggtgccggggccgcctttggtcagcaggtagaccggggcgaaggtcttcaacgcaccgatggtggctgtgaggatgaccaccagcaattcggggatgatggacggcagggtgaccacgcggaatttctgccaccagttggcaccgtcgagtcctgccgcttcgtacagttcgggatcgactcgctgcaagccggacatgaagataacgatcggatagccaagctgaatccacacgaggatgaacataagcaccggcagtgcgctgtcgggactgccgagccagttatgctgcaggaatcctaacccaagtttggaaagcagggcgttgaccgcaccgtcttccgggcggaagatccagcccatgatgatcgccgcgaccgcgaccggcaacagctgcggcaggtagaacagagcacgcaggaaggaagccattttaccgccgaacttcttctgaatcacatcggtcagcagagaggagatgaacaggccgagaatggtcgggatgaccacgatggcgacaatgatccagaatgagttggcgaaggagatccagaatgtggagtcggagaacagtcgctgccagttcttcaggcccacccacttgaccggacccactccacgccagcgagtgaagctcagatagatgttccatgcgaacggaatcacgacgatgatgagcaggccaagtaggcccggaacgagatacggcacgaattttgcggagcggctgccgggaagccttgacatcgagatgcctccgcgcttggtcttatgcgacattacagaatcctttgatgaagattgatgcattgcaggtgtggcccgcccgcaaacgggccacaccgatggttggctaccgaacgatgcgccggactgattgcgccttagtcgttcttgacgcccatgtcctcgacgccggtgtcatacttttcgtggatgttcttcagcacatcggccggcttcttggtgccgttgaccagttcctggaaggccgccggaaccgcgtcggtcaggttggatgcggcatagtccgggtagtagctgagcttgccgtcatcggcgtaggaagagtattcctcgatcatggccttgctcttttcgtccgtgatcttgtcggtatcggcggcgaccggaatgcctcccgcattgccgaggaagttctgcacgtcttcggagagcacgtagtcgatgaatttggcggacagatccttgtgatgcgacttttcgggaatcaccaacaggttgccggcgcagccgatggcgaagttggattccggcatgacggcggcgtcccagtcgaaggaggtgatttgcttgacgaagcggccttggttccaggtgccggtctggtagatcggatattcgcccttgatgaaggcctgcgtagtgtcttcagccttcataccggtcgcattgcgggaaatgaagcctttgtcaagccagtcgttgatggtgttgacggagttggtcagaatcttggagtcccagtcgacatctcccttgtacagctgccagttgtcgatgaacttggagtcggcgttcttggagacgagctgccaccacagccacatcacgccgtattcctgcgcgtcggcggcgattggggttacgccggcgtcgacgaatttctggcatacgtccacgaattcgtcgtaggtggttgggatttcaagaccgtacttggcgaagaggtccttgttgtagtagacgcgctggaattcggcatagctggtcatgccgtaccaggtatcgccgtccatgatgccgttctcatcgtacttggcgacggccgcgttcgcgccggtcaccttcttgtcccagccgtactgggagacataatcgccgagatcggtaagcagtcccatggtggagagcacacctgcggagccattgccacgattggattccataagatccggcgcttcgtcggagttcaggaactggctaccgttctgggcgatctgcgtgaaggatttgcgttcgaacttgatttcgactccggtttccttttcaaaggcttccgcggcacgcttccaagcctgggtctggccggcatcgtcctcttcgtaataccagaacgacaggctgtccggcttctcctcatcctgtgcgttatcgctgccgcatgcagcgagagaggtcagcgccagtgctgcgatggccatcgtggccagtcctcttttcatattcatttcttttctccttgttttccttctagagcgccttccttgcaacgctccaaaaaccgtgattgttgaaacgtttcgacactgtgcatggagatcctccttgaacgagccgttgcagttgccagtcgacgtcgaccattgttgaaacgtttcgattacgcttatgaaattatgccgggtgaatcacaccgaaaactccgccgttttaccgcgaagccaccttcagggccctttcgccgggactgatctcggcaacggaaccgcgaagcttcaccgcgggagcctcaagctcgacatcacccttgatcttgacgccttgctcaatcgccgagaccaaaagccccatggcctgcaagcataacttctctggcatgaccggcatctcggtaatcggacgcgacatcaattcgccgtcgaaatacgtgccgcatgacagcaccgaaacatcctccggcaccgatagccctgcgaccgacagttcctgcagtacccggttgagcacattggcgttagcctgattgattatcgccgtcggacgatcctcatcagcaaaggtctctcgcacaaagcgaatcgcgtcgaaacggtcatcctcatatcgcgaggattcaacaaccgtcatgccgcgttccttcgcacgcgacagcatgctttcgcgaaaaatcacgacatagccggaacgacgctcataatcggcctcgttgttgcgcaggaacgcaaccttacggtggcctttgtcgaatagaaaatccaccgccttgcgcccggcctcggcgaaatcgatgtcgacgcaggcacaaccctcatgcgcctgcgggtagccgatggctatgcagggtttggagaaatcgccggatgaggccgcgcgctcgtcatcctgctcgacatcgagcagcaccacgccatcaaccaaattgctttgcgtcacgcgacggatgtcgttcaccgcgtccggtccggtcagcagcaacacatcataaccggcattcctcgccgcccacgcggtatgcaggaagtaggcgttgtatttggcctgattgatgtcgccacgaatcggcgcatttaatgcgatgacctgtgaacgtatgccacgcatcttgcgagcgctggcgtccggggtgtatccaagcttctccaccgccgccatgaccttgtcggacgtcttggcggaaatcgaacgtttgccggaaagcgcatacgagacggtgctgacggacacccccgcttcacgggccacatccttgatgcctgccatcgtcatcgcctccttcggcttccctgcgttctcgacatcgtctttcgcgtccttcagcgctgcaatgcgttgcatcgacgctagtcgtcactggcgaaacccctcgatctcactaatcgaatcgttttgtcgaaacgtttcaataatcatacccccacacagaaaatatgccaaacgtttcgacacgctgaaggcggtgccttcttgcgactacaagaccaccatctgcgagcagcaggcctctcctcggcagcgacggccccaaaacgtcgatttagaggccgtagccgtcgagtagtcgcaagatactcgcaacctacggacgcaaccacccgcattagcaggcagattcgaacctgacgaacggaaaaaagaccccttcagcggacgagactcatgaatcaggccacagtcgccgacatacacggacggttcccacccggtgtttgctggcgtgacatctgccgaccaaacggatgccctccggtcgggttcgctggcagaagtcggacgaccgccaacgagtttccgatgcgcctgcagaccaccggaatcatgctgattgagcagagccatagccaccgtaagcattgacggattgtgcagatttgccacccttcgtcctccgctcggtctcgccctagagccccactggtaggctttagccttggttcgtatacccgtatgcctacatattcacagagagaactccatgggaatcatcaacttcttcatcaatctgctcaaggacccgcgcactgcgattgccagctggatcgccatgggcgtcgccccgacgcttggattcatcttcctcatcgtctttatcgagacgggcgtggtgttcttccccttccttccgggcgactcgttgctgttcgcagccggtttcttcgccgcacccgacgccaagaccggcgtcgccgctctgccgttgttcgcgctgctgccggttgtctggtgcgcaccgatcatcggcgatcagtgcaactactggatcggccatttcttcggtcgccgcatcatcgaatccggcaaagtcaaggccatgacgccggaacgcatcgccaaaacagaagccatgatcgataagtggggcccgctggccgtgttcctcggccgcttcttcccgttcatccgcacgttcatgccgttcatttccggtatttccggcatgcgctggagccgtttcacgccgttctccgtgctcggcggtctgtgctggtccaccctgttcacattgcttggctacttcttcggcggcattccggcggtgcagaagcacttcgaactggtgatcgtcgcaattctcgtactgtcgctgattccgacgatcgtaggcctgctcaaggccaagttcggcaagaaggctccggctaccgaagcctgacaggcataatcattcccagccatcgtttcgggtgggcagcgaatcgggagattttgccgcccgcccgaaaggcatcgcaacacgcgaacgtacagaattgcgttcgtacacacttcgtactagagttctgagagttgccctgcgaagcaaggtaacatccaaggggctgtagctcagttggtagagcgcttcgttcgcatcgaagaggtcgcggtttcgactaccgtcagctccacgaagcccgctgcattcattccaccgcggcgggctttttgattttcatattgcgaggcgtcttctcagggcctcttccagtcgccgacgccttagtgcgatgactcttctcggaggccggattcacgcaccgacgcgctgacgcacataggcatcaagtacgtcggcggtgatgccgtcatatcccttgatcgatgcgaattgcgggccgttcgaattgtcgagctgcatgaaaccggtctggccgatcgtggtggcaccggaggcgacggcggaacgcaggccgctcatcgagtcctcaatcgcaatgcaatatcgcatatcctccggcgcgatgccgagacgccgacccgcctccaaatacggttccggcgacggtttcttcgcaacgtcatcatcgccgcacacgaatccggcaaacactccggccggcgcctgatcgaccagattctgcgcaagatgacgaggcgacgtcgtcaccaacattgacggcacacctgcggcagccaacgaacgcagcacatcctcgacaccggcgatccagggaatcctttcgaattccttctgcgcgacataatcaatcatgcctttgccgatctcctcgatcgacagctgacagccatgctccaccatacggcgcgccacgtccggcaccggagtaccggaaccctgccaggccaagtcctcatcccagtagccgccatgttcggccgcgatcttcagctccccctcgtgccaatacggttcggaatcaatcagcgtgccatccatgtcccagaacacggccttcagcagcagcccgttatcgcccacaccattcgaaacagtcatgacattccctccttaataccatgactatttcagcagaccagcgcgaccatgccgtcgtgcgcccaacgcagccgaagacagtaacgcctcatcaagggccccatatggaatcgttccgcaggatttgccaccctgcggaacgattccgtgtcaattaccctgcgactactcttcagcgtcgtcgttcttttccgcgtcgccttgctcctgctcggctttcgcggcatcctccgccttccagcgggcaatgcaacgttccacacgcttgtacccgatgattttcggatcaagcccggcctcgcggaaaatcgccgcaggtgaaccaccttcggcatatcgcctcatgcagtcgtcacggaattccttcgaatagcaaatacgatactgggtgaccgattccacggcatccagagtcccgagatatttccgggtcttggcagtgaacgcaactcttggcactgttcgctcctaactcctcgttccacacaccgtaaggtcgcccatccccgaatctccttcgggaaatcgaactatattctacgaatcaatcgactcatcgtaagaaaaacagccgaaatacggataaacactattatttctcacaataacgacatcatgtcaaatagtaggggttattttggcccactatataacaaaactgggcatcaccccgtcaggcatgcccagttttgaatgttttccgaaaatctgctgtcaactttaacgaattccccaaatcaccatggatttggactcctcgccttcacccgatccgctccgtccggatggcaattcgcgtgtgttgacatgaatctgccgccgccacatgcgagccctgcgagaacgttcgatttccacgatgccaccgtccgcgtcagccgcgaatacgctggagccggccggcttgcgcaaccgctccacctgtcggcgcaactcacgattctcctcttcaagttcgaggatccgcgtgattccagccagattgatgccctcttcctgactgagttgctgcgcctgcacaaggcggaatacgtcccgcaacgagtatcgacgtgcaccgcctcccgtacgccgcggcacgaccagcccgaggcgatcgtactgccgtagcgtctgcggatgcacattcgccagctcggcggcacggccgaccgtgaacaccggcagttcgatgtcgaagccgacttcatcggcaccgtccagatcagccctgccggccacaatcgcgatggcacacatctcatacagctggcgaacctgctgctccacgcgtgaccgtgccatggtactcagcgctccttggcgagctcatcggcgaagtcaccgcacgccttgtcgaactccttcgcagtgcgcttgaccgcaaggcccggcctgtcgggaatgcgtatttccacacgaccgatcagatcaccgtcgccgcgcggattggctacgcccttgccggaaaggcgcacttcggtaccgctcgaagagccggccggcaccttgaaagtgacttcgttgccgtcgatgtctttggcgcttaccttcgcaccggcgacagcctgtccgaccgtaatcggcaaggccatgatgatgtcacgcttgcgcatggtgaacttcggatcctcggcgacggaaatctgcagatacagatcgccgttcttgccgccgttgcgcccaggcttgcccttgccggcaagacggattttctgaccatccttcacaccggcggggatatgcgtcttgaacttcttgccaccggcactcagggataccgtcgcccccttgaccgcctgacggaaagtcaggttaatcttggaattacgatcctcgccatcctcaggctgcgcggcttgttcgtaggcgccgtaagggctacccgcgccagcgccatacgctcctgcgccctggcccgcggctccgccgaacatcgagaagatgtcgttgagattcggattgccgccgttggtctggaaacggatgcgcgacccgttgcctcccatgccggctccgccgaacatcgatccgaagatgtcggagaaaccgctcgcgtcgaagccgcccgcaccggagccgccggcgaaacgcgcgccacccatgccgaactggcggatagcgtcatacttctggcggctttccttgttgttcagcacgtcgtacgcctcggaaatgtccttgaacttttcctcggcttccttggtcttgttcagatcaggatgatacttgcgcgccagcttgcggtatgccttggtgatctcgtcgtcggtggcctccttggagacaccgaggaccttgtagaagtctttgctcagccattcattctcagccatgatgtgcctcctttcgtgaggtagctgactttagccctgcggggaagccacgaccacacgggccgcgcgaatcacacggtcgccgatgcggtagccggcttccaccacggtatcgacggtttccttctcggcggtcggatccggcttgtgcagaatcgcatcgtgcttggtcggatcgaagtcctcgcctttttcgccgaacttctcgacgccgaacttctcgaaagccttgtcgatctttgcggatacggccttgaaggagtcgtccatctcgctgtgctcgcggatgcggtcgatgtcgtcaagagcaggcagcaacgcagtaagtacgtcgatgatgccgtgctgacggaagcgatcctgctccttctgcgcacgattgcggaagttgatgaattccgcacgctcacgctggagagcctcaagatattccgcggcttccttcttggcctggcccagcggggtcagggtgtcgtcggcagcggcgtcttcggcgtttgcagcggtggcggaaccctcagcctgtgccgagtcggccgccgtatcggcagcggccgactcgggggcgccggcagcggcgtcatccgccgccgggccggtgccggagggagcggtctgcccggacaggttgtccatatcaggcagatcgttcagatactcgtccttgttgaagtcggacatgattacttgttgtccttgtcgtcatcgtccacgacttcggcgtcaacaacgtcatcgtcagcggcacctgcggcaccggcagcgcccgctccggccgcgcccgcggcgtcggcggcaccctgctgggcgtagagggcctgaccgatcttctgggcggaggtcatcagttcgctctgggcggtcttgatcttctcgatgtcctcacccttcagggcttccttgagctcgttgaccttgtcggtgacttccttggccacgtcgtcggagagcttgtccttgttatcgttgacgagcttctcggtctggtaggcgaaggattcggcctggttacgggtctcggcatcctccttgcgcttcttgtcttcggcctcgtgggcttcggcctccttgaccatgcgatcgatctcatcctttggcaggccggagccgccggtgatggtcatggactgctccttgccagtgcccttgtccttggcggacacgtgcacgataccgttggcgtcgatgtcgaaggtaacttcgatctgcgggacgccacgcggcgccggcgcgataccggtcagttcgaaggtgcccagcggcttgttatcgcgagcgaactcacgttcgccctgatagacctggatgagcacggacggctgattgtcttccgcggtggagaagacttccgagcgcttggtcgggatggcggtgttgcgatcgatgagcttggtcatgatgccacccttggtttcgatgccgagggacagcggggtcacgtcgatgagcagcacgtccttacggtcgcccttgatgacgccggactgtacggcagcgccgacggccacgacctcatccgggttcacggactgattggcttccttaccgccggtgagctccttgaccagctccttgacggccggcatacgagtggagccgccgacgaggaccacatggtcgatgtcgctcacaccaatgccggcgtcggccagcacgttgttgaacggagtgcggcaacggcccagcagatcggaggtcatttcctcgaagtgggcgcgggtcagggtctcgtccagatgcaccggagtgccgtcaggggtcatggccagatactgcatggaaatgctggtgctggtcgaggagctcagctccttcttggcctgctcggcggcttccttcagacgctgcagagcgatcttgtccttgctcaggtcaacgccatacttgttcttgacttcgccgacgagccagtcgatgatcttctgatcccagtcgtcgccgcccaggtgattgtcgccgttggtggcctgcacctgaatggtggagaagccgtcatcgtccttgccgatttccagcagggacacatcgaaggtgccgccacccagatcgaagaccaggatgcgctcgtcttccttgcccttttcaagaccgtaggccagtgcggctgcggtcggctcgttgatgatacgcagcacgttcaggccagcgatggtgccggcgtccttggtcgcctgacgctgggcgtcgttgaagtatgccgggcaggtgatcacggcgtcggtgaccggctcgcccaggtaggcttcggcgtcgcgcttgagcttcatcagtacctgtgcggaaatctcctgcggagtccacttcttgccgtcgatctcaacggtccagtcagtgcccatgtggcgcttgacggagctgatggtgcgatcgacgttggtcacggcctgacgcttggcgacctcgccgaccagaatctcgccggacttgctgaatgccacgaccgacggagtggtgcgagcgccctcggcgttcacgataacggtgggctggccaccttcaagagttgcgatgcaggaattggtagtacccaaatcgatgccaactgcgcgtcccataacttatctcctttgcagattaggttcgctatacgttctttcgttcttcgctcgagttccggattgccgtctctcgtgctttccaaaacttgagcctacaccactcaacttttgaacgcaactttttattcccgaatccacaaaaattcttgagccaccttcgctcaactttgtcgatcccctcaatctaccgacgcccacacccgcctcaccgtcggcagactaagaaacaacccaaactaccgacgcttagagggcactaagcgtcggtagtttgggaaaaggatggacgacccggatcagcgggtgatcttcacggtcttgatgatcatcgcaatggcggccaacatggccacggcgatcgcgacgacggccaccgcggtaccggtctcaccgagcggcgagccgtcggccttcggattgttgttgaccttgccggaagcgatcacaccgttcttgtcggcattcttgtcggaagaaccggcggccggagcctggaagtcgacggtcacgctcttgccggactggcgtccggtgacggtaagcgtatattcgttgccttcggccaccttgtcgagtgcgatcgcggtggtctgcgcggtcttgactcgcacaccggagagcggagtggtggagtcggaagcggcgatcacattgcccgatttgtccttcagctcatagctgagtacggcatcaccgttgaagcccgtcgcatcggcggcatacgagccgttttcggtggcgaccttgacttcggcgttgtcggacaatgccttctgctggtcggtggtggtggccaggccgagcgcgccggcgatggtgtagaagttgtcggtctgatcggtcaagccgatcacacgctgggcgcccggaccagatgccgctatgcgcagctgggtgccggtgtgttccatgtcaccaccgttgtagccgccttcctcatcgcgggagtcctcctgagcggtgccgtaggagacgaccatgttgttgccgtcggcggtcttgagcacggtggagagcgcataggccggctgagcgttgagaatctgcgaggtgtgggcgtggtcggcggtgacgatcacgagcgtgtcggaaagatcaacgttctgcagcacgtaggagatggcctgatcgaagtcatcggtctcaccgatctgtccacaggcgttgccggcatgatcctgcttgtcgatcgaagcgccctcgatctgcaggaagaaaccgttggattggctggctggattggcattgagcagttcgagtgccttcttggacatgtccttgagcgaggagccctggctgccgagccactgatcgttcacggtgcacacggtcggattggcgtccttggacggatccttggcggtcgccttcgacgcgttgaacttggtcggcatattgccatcgctcatcagcgcgagtaccggctggccctccttgtattcaagcgcgttcatggccgccggatcgttttcgacggtctggtagcccatctccttggcctgttcccacacggtcttacccgcatattcgccgccctgtacggtctggcggaagtacttggaaccgccgccgatagtcacgtcggcgcgggtgtcgagcagctgctcggagatggagccgatgccgccgttctccttaagctggttcacgaggcaacgcttcgcagcatcattagaggaaccatcggtcttgccctgcggaccgtagcagccacgctcggaggaatgtgattccagtacggccggagtggcgtcctggatttccgcggtggtcacgttgccggtcgccttgcctgcagccttggcaagttcgaacagattgagctgtggattgccatacacgtcgacatccaccgcgttgttgtaggtcttggtaccggttgcccaagcagaaccggatgcggaggagtcggtgactgcggtaatcttgccgggattcgaattggcgttcagattgcccttaccgtccttgccgacggcactgtcggagctgttggaaccgagcgagaaggtcgtgtactgtccggtgccggcttccacgtcgtcgagcgcaccgggctgacctaccgcgtcaagaccgtcgaaatggccgttgacacccttgagatagttgcgcgccacggtgatttcggagtcgcccatgccgtcgccgatgaacaggacaacattcttggcggacttgttgccgattgctgcgatgcgttgtgcgccgccgtgctgggccagttcggccacggatttgccgttcggactgtaggtggatgcgctgtcagcgagcgccggtacggcgagcgccccgagcgtggcgacggaggcgaacgccgcgatggcgccctggagagccttgtgcttgcccatgtgttcttctttcttctgcacgcggaacctttccgcgccttaatgttgcggaatcttgcgtttccatcacccacgctaagcatgcaaaaccaacgcagttcaattcgcaccctaacggcagatgaattctgagcctgccaaagtgaataacttccctaccatcacaaaacgggtctgtgactcccctgttatgaggaagtcgcagacccgttgactcgcttatatgatatcgaccgctgattcatcgcatatggcggacgcccctagcatacttatcagctacgcaacagaatctcctccaagacgccgtttaccgcgtcgggcatgccgtatgcgacgaacggttccttgctgaagcgtggtttgccgtcaagcgtgcgcaaggcgccaaccgctcggacgccttgttctcggattgcctgtaacgcatgctctttggtgatatacggcatctgtgcatgtagcagcgcatcaagtacatccttgtcaatcggattatccgcgacggacaaaccttttggaacgatgacactcagccgagcagttgaaggcacgtcatgtacggcgatggacaggctcagcgtctgttcatcgtacgcaatctcaaccgtctcgcaggcgatgccgttgatggtaatctgcagttcgccggtcccaaccggcgagacgccacggaacacaatcgtccaatcgcgtcgttccggcacggattcgacggctccgtcaaccggtgaaatctcgaacctactgccgccggatccggtagcgtcaccatccttggcactatcagcaatgtcggcacgccaatcgaacgtcatcatcgtatccgcgatgtgcgcacgtctcgcgcaggatacgattccgtcatcctcacgcaacgtgaaagttccgtccgcaccggggaaaaccagcacgtgcaggaccgagggattgcgaaggtcgttgacatcgtcaccggttgcaagttcctgcaacggaatgatgccacccgctttagcgaacacaggtatgcggtcaagcgcgcgccacacttcaagtcgccgcccggacgcgttatcggagacatagcgccgtccatcgaagaagtcgtaccattcgccttgcggcaaccatgcttcagtcctgccacgctgtgccgtcggatcgtcatcggtcacgatgggtgccaccagcagttcggtaccgaatcggaattcgtctggcacttcataggcttgcggattgttcggttcgctccaatacatcggttcgaccagcggccgtccgtcaagcgccgcacgatagttcatcgtgtacaagtacggcagcagcatatggcgcagtctcagtgaggcgaccatggccgcatgcacatcgccggaaaaattccatggctccttgccggtaaacggcgagctgctcgaatgcaggcggttaatcgggctgaatgtgcccaactggtaccaacgggcctccagatgttcattacggtagccacacatatgcccaccgatgtcatgactccaccagccatagccgatgttcgatgcggtcgcggtgaaatatggctggaattgcaatgactcccatgtgacgatggtgtcgccggagaagcctaccggatagcgatgcgaaccgggaccggcgtaacgggagaaggtcaatggccagcggccgtcgcgcccggaatccagatagtgcatgtgattgagcacccacagcgggtcaagtcccggctgtcgggtcacaccgccctgttgccagtcgagccaccagaagtcgacgccctcatcttccatacggtgatgcatgtcaagatatgcatcgacgaagtccggattggtcaggtcgaattccgcagcctccccggtcgtggggtcaatgccgacacgtttggcgaccgtttcgtaatcgtcctcgtacgcacgtatgccgtcgcgcggatgcacgttcaatgtggccttcagcccgcgttcgtgcagactgcgcagaaatgcacaatgatccgggaatagctgaccgttccacgaatagccggtccagccggaaccatatttcggattcacgtcatcgacacgatgccaatccatatcgatgaccgacgtggtgaacgggataccctcattcttgaaacgatccatcagttccaggtattccgtctgcgtgtaacggtagtagcgactccaccagttgccaagcgcatagcgcggcagcaacggggtcggtccagccagcgtatagaagtcctgcacagcttcgatgtaacgacgcccgtatccgaagaaatagatgtcggtttccgcatgatctcttggcctaacccaagtgccgagcggattcgtcttgccgtcgacttcatcggcctcgacgatgacgttcgatccggaatcatcgatcacagcccaaccgtcacgtgagagtacaccgtcatccaacgcgatttcgccatcagcctcgtcgagtgtacgcgcggtacctttgagattgtgcagaggcgcatcgccgtaatgccaagtattgaactgagtatcggagacgcctttgacgacgatgctcagcccttccttgctgaacggtttgccgtcgtaggtcaggtagagtgcaggggtatcgacgatgagcagcccgttacgatgcgttacggtgaattccggatcggctccaaagtcgcgattgacggccatctgcgtcaaccgatcctcaaactcacctgaatcggaccattcgagccgaatgagggattcggtgaggatgccgatcctccaatgctcgccctgtaggactgtcgcgtcgcgcatgcacggtcgtgcattgcgtacatagtcgatgaatacgttgcttgtcatggtgtttcccactttacttgccactgccagtcgcgatgccggcgatgaactgcttctggaagatcatgtagacgatgattaccggcacgatggccaacgaggtggccgcgaacagtccgccgtaatcagtgccgtactggccgttaaaggccttcaatccgacggcgagcagctgctttttctcatcagtgatcataaggaacggccacaggtagtcttcccagttccacaggaacgtgaatatcgccaatgctgcgatggtattgtggctcatcggcaggatgatgctgtggaagattctggtttcggaagcaccgtcgagtttggcggcttcgatcagctcatcggagatgccggagatggattggcggaacaggaagatgccgaacgcgcttatcatgccgggcaacacgagggacgtgtaggtgtcttgcaaaccccagttggtgaacatctcgtactgcgggatgatggttacggcccatgggatcatcatggtgctcatgacgacggcgaacaataacgccgtgaggatgatgccgccgattctgcgatttttcatgccgggtcctccgaatctcccgaaatcttgaacatgatgagggtcagcacgccggtaaagaggaagaggatgaccgcctgcgccgacgcgactccgaagttatatttctggaatgcctgatcgaagatgagatagctgataagcgacgtgatgacgatgaataaggtggtcgatttaagcagtggcagagtgaaacaagcatcacgaatcattcggaggcaccatgaaggcgagtatcggcgacgtagcgctcaaagccggcgtatccaacgcgacggtgtcgcgcaccttcgcgcaccctgagcaggtatccgaagcaactcgcatcaaagtgcaggccgcagccgatgcgttgaatttcagcatctcccgatcggcgggaatcctcaaatcaggacgcacctaccgtgtcgcattgctaatcggcagtcatgccatcgaatggttcacggcagagattatcgccggactcaacgacgtcttacgcgacgccggctacgatctcgtcatctaccccatcgaaggggccgaggcacgcgatgcattcttcgaagagctgcccgtccgcaacaacgcagatgccgtgttcgtatcctctttcggcatcagcccagacgaagtgaaacgtctcggcaccgccaaaataccgattgtcggagtcaacaccaccagcgagggcttcgatgcgactgttggcatcgacgacaaggaaggcattaagctcatcgtgcggcatcttgccaaactagggcatcgcaatcttctgtacctctatgagagcttctcgtctacgctcggtttcagttcatacaaccgcatcactggatttcaagaagcctgcggcaccatcgatggcatgaatgcgcgcacactggccgtacagaagaacgacaacatcatcgatgccgcgatctccgaaatgatggcgcaggacaatccacccacagccctatgcttccatcaggattcgcaggctatcccgctgttcttccgtcttcaacgaagcgggctatccatcccattggatatttccgtgacaggtttcgatgacagcgcgttcgccgaagaagcccaattaaccaccgtccggcaacggccgcatgatatggccgtcgcagccgcaaggaaagcgctggatctgattgaaggacgacccgtctccaaaccgttcgagacgttcccggttcaactacaggtacgcggctcgaccgcaaagccacgaactacgcctttactgtagatacggttgtttcacagacggatgcccgacctcgctaaccgatcttggcgcaggtcttctgaccggcattgaccgaaactatgcgcgggaaccatgagccgcacgagtggctttgacggccacgaagaagctgcggaccaataacacgcacagataggccgcgaacatgatggctccggcacgcggcgagaccgctccggcgacccatgtgccgaaaggtgtggtcagcgcagctatgacgccgatgatcagcccggccttgatgtgcaccaacttacgtttcatattcgccacactggtggtgatcgagttcgggaacatggcaagcagcgaagtaccgcgcgcgatcagatcggatgccccgaacagtatcgacaatgccggcacggccagtgcgccgccgccgatacccagcaacccggccaaagtgccgatgatcacgcccagcagcaccagcccgatgcccgtcgccacactcatgaagatccgttggtctcgcgacggcgtaaaaatcacctgattggcggttacgaatatcagaaacaccacgaacacccaccgcagtacgagttccggcaaccgcgacaacagccagctaccaaactgtccgccggcgaacatgccaacgaacagcagcacggccgcgacccagtcgacgttgccattgtgcgcgtaggagatcacgccggaaatcgacgtcggtacgatcgccagcatggaggtcgccgccgcgtggcgttgcgacagtccgagccacaccagcgcgggcacgatcaccgtaccgccgccgatgccgaacatgccggacaacaggccgacgatcatgccgacaatcaccagcaccatcatgccgtgaggcgattcatccagcccactcggattcggcccgaataggcgatccgccttcgtgggaaacgttgccccattcatttcatcgtccatcttccggtccctctctctagagctacgcccgatactacaagaatcggctaccgctcacccgctatcggccattccttcgaatcgagaccgcgatgccagtaggccccgtcttacgcgaaaccgatgatgatacacctgtcttttcttggatcggattcatggttttcccaatctaccgacgctgaggtctctcttagcgtcggtagattgggaaaaccatgaatccgatccaaaacacgtgagtacgcgcgatggaatggataaggagaaggactactgatcgccaccatacacggaatcggtgccgcgcagcaccaattgggcgcggaccacttcgtgcggggtttccacgctctcgcctgcgatgagcttcatggccttatgcgcggcaagacgccccatggcaaacggatcctgacgcatggtggtcaagttcaccgtatcggcgtacggcgaatcatcgaatccgataatcgaaaagtcacgtggcgtacgatgcccataacgatcaagcttcagtaccaatgggatggccatcatatcggtctgacagcaaatcgcgtcggggaactcgtccagcgccagcaatgccgtcagcgccgaatccgcaaatgtcttgccacgcggaacggcaagcacctgccatgtgaactgatgcgtggcctcggccatcttgcaggcgcggacgaagccctgacctcgggcgtcaatggaggaattgatcgaatcgatcgcctcggagcacacgtatatcaggtttttgtgtcccagactgatcagatgctgtgcggcggtgaacataccggcctcgtcatcgatactgatgcttgcgtcaaaaccggccgcggagggagtattgataccgatgatcggcacatggatccgcttgagctgctcgacttcctgcggctcgatggcgaacgatgccacgaacacggcgtcgacgttacggcgtaccggcaggttggtgaagaaatcacggcggttctcggccgtatcgatgtgctggaacaaggaaatgtcgtagccggcttcatgcatcacggcattgatgcccgcaaacacttcggtgttgaaccagctggtgatctcctcgttcatgagcaaggccacacggtacgtctgcccggatttcagcgaggtcgcggaacgggaaatgttgaagtccaacttatcggccgtttccaataccttgcgcctggtgcgctcggaaacgagctcgggacgcgtgaacgcgcgagagactgtcgaaatcgatactcccgcggctttggccacctcacgaatgccagccttatccatgtcggcccctttgcgacttgcggcattgccgccacgcccgtcatggacgcatgatggcgacgatgcccctcttgatactgattccatcatactgcgaacgttgtcaaaaacgaaccagcattcttgcaatccttacgaatcgaaatctcatacggatcatgccgccaacgcacacaccagcagcaagaccgggtataacgcatagaacacccacttatcccacgcatgcctatagccgagtttgccgttatggaaatgagtgaacagcacaccgaaaccaggagcaatcatcatcaccgcaccgaacaggccggcagtgagcatcatcgtgttctcatatttgcgcatgagggtgaaaatcaacacgaaaccaagcgtcaccgctcctaggctcatcaggtgctgacgcaatccgacgcgcaacagcaagtcccagagcagaccgatcagcaccatcgcgacggaaagaatccaacgcatagcgccctgatagcgttcagcaatccaatccatcaaggcaagcaccgtcaatgctatgaacagaccaaacacgggattctgcgaacccaagtcgaacgcacgccccgacgtggccatgtcatacggcacttcgcagaccaacgccagcacaaacagctccatgccatatatcacccggctatgcgtgtgctcataccctcgcaccagcagccaagcgtacatcggcaccgcacaccacgacaccacttcgcatagcaccatcgcggtcaacggacccatatcgttcgtgttcgagccgaacagcaacggcacgagcgtggtacttgccgcagaaaggaacaggaagaaaccgccgatcgtcttaagcccgaacgtggtcaggccgcgcccgcggcgccgtctgcgcgagccgccgaaaccgatctgctcggtgctatcgtttccttcgccgtgctcggcgtatccttccatgaccatcctcctcaggtgttcagcacgtagtcaagcaacccgtcatagtccgctcctgtgaacgaacataccgcatgacgcgaaacgaccggatcatgcgtcggtgatatttccgtacggaaatacgcgccgtcgatgccggccgcagctgcgccgatgatgtcgttggtctcgtcgttgccgaccatgagtgaccgttcggcggtgacgagctcgcggtcgagcgctgacatgtacaagtcgcgcgcgggcttgcgcatgccctcctcgctggagatgatcacatcgtcaagcacatcggcgagccccgtcatctccaactcaggtcgggtatagcaagattgcgcattgctcagcagcaccactcccacgcctgcttcccgcagtcgcccgatcatatcgagcgcaccttggtagagtcggatcatgccggtactgccctgacggaacgcccaagccgcctgtgccgccgcctgcgggagtggcagaatccgttcaacctcgtcggcttggtcgatgagcagcgaacgatagaccgggagaatatcgaactccctccaatcgtcccgcacggtactgcgattggcttggcgcagcatctcacccgcctcgagttgcgcaaagcggccacgcaacgcttccaccgattcgtattcgacgccgaatccccgcaacttctcatacaacgcctgccaggcggtttcggaccgttcgtcggtgcgaatatcgatcagcgttccatacagatcgaagaacaccacttgataacgtggcccccttggcatcaacgccgcatcgttcataatccgtcctttcgtcatggagaccatttcagcggagctgccagattgcaaacgtatgcggcggcaccacgatatagtcaccatcacctgcatcgatcgtgacgcccatctggccggaactcagcacggcgcaccactgcttgttgctccacccgtctcccgcaaccgcgatgtccgcgacattgatggcgatcggcgtatcctcgggattggcgaaaaccgcatacccgttgacacggaataccagctcgtcccccggcgtggtgacgatgctgcgttgcgcatcgaaccagtcgggattctccttgcgcaatgcgatcagacgggcataatagtcaatcatgtcacgcatctggtaggcatgattccagtcgagccagttgagttcgtgggaggaatcataggaatcctcattgccatatttggtgcgtgcgaactcttcgccggagagcatgaatggcagacctgcggaggtcaatatgatgccggccgccatacgattcgccgccatgatgcgccgtaccgcgacgcgctcctcttcattcaagggacgcgcgtcgtagataccggaggtgacggccgctctggcaacggcagatgactcgaccctgtcggagccatttgaggcagccacggctgccgcggcctcaccgcgtatgctcgcacacagcttgtcccacaacgtcagatcgtcatgcaccgaaacgtactgcacgatctgccctgcctcaccctccggccgcggcgaggtacgccacgcattcaccgcttggcgaatcttgcgcgcggtggcatgctcgccgccgttcacgaagcccggacggttcgaatagaacacatggcctttgatggtgtcgcgcgtagtgtcgcagaagtgcccgatacgcttgtccagcaatcgtaggcctttcttgtcggccagcacggtacccggcaacggcgcggatgctccggcagcccacggttcgccgtacatgatgatgtccctgccacgctccggaatctcatccaaggcggcacgcacggcgttcatggtgtcgacgtcgatcagccccatcagatcgaaccggaacccgtcgatgtggtattcgcgcgcccagtatgtcacggattccactacgaaacggcgaaacatcgcgcgttcggtggccatgtcgcaaccgcagctggaaccgttggcaagcgccccgttcggtttgcggcgcaggaagtattccggcacggaccgctcgaaccagttgtcgggtgagaacatgtggttatagaccacatccatgatcactttgaagccggcgtcatgcaacgcctgcaccatctgcttgcactcacggatgcgcacggccccgtcatacggattggtcgcgtacgagccttccggaacgttgtagttaaccggatcataaccccagttataacgattgcaggtggtttcgtctacggaaccatagtcgtgcaacggcatcagctgcaccgccgtgacgccgagtcgtttcagataggcgatacccgtcggaaaatcgggatggccgtccaaggaagtgtcggcatcggtgaaggcaagatacttgccacgatgggattccggaaaaccgcccgccggatcattgctgaagtctccgacgtgcgtctcccacacgatcgtctgcgacagcggtatttcaggcatatggtcatgatcccacccctcgggatcggtgcggggcaggtcgaccaccatgctgcgccggccgttcacgccggccgcacgagcccatggatccgcgacacgatcgatcgatccgcattcacggtgaatcaaaaaatcgtagtagacgccatgcttgttgtccgcaaaatcatagacccatgaaccatccgtctgcggacgcatcgggtattgcccaatcaacgcgtcgccgcgttcacccatggagccgtgtgtaaacagcctcagcgtcaccttatcggccgtaggcgcccagagagctaactgggtgccggcaggcgaaaccacggcacccagttgccgttccagacacagcgggaacggttcggcgacgctcgtattcggctgttcgtagctggttacgagcgtcattacatcatcccttcacggaacccgccatggattcctggtagaagcgctgcatcaagatgaacaggatggcgatcggaatggagatcacgaccgcagccgccgcgaagcgggcataccagttctggatgtattccttctgcagcatgagccacaggcccaatgccacggtgtagttggactgcgtgcggcagatcaccttggccatgacgaagtcgagccacggacccaagaagccgatgatggcctgatagacgatcatgggcttgcagatcgggatgatgatcttgtagaacacctggaaccgggtgcagccgtcaagcagcgcagcctcgtcaagcgaggtcggaatggtgtccatatagcccttcatcacgtagaagcccgcgccggtaccggccgagtagaccagaatcagggcgacgatcgtcatgttgccatcggccaggcccatggccttgagaatgaagtagatggcggtgacggccatgatgctcgggaacatgcccaaaatcagcacgacgttcatgaaggtcttacgcacgcggaaacgcatgcggctcatgcagtacgccacggacaagacgaagatcaccgagatgacgcaggtgaagcacgcgatgatgaacgtggtcgtgaacatcttcgggaagttcagcacgttacggtcggtgaacagcaccttatagttctcgagcgtccattccttcgggaagaagctgctggtatacggtgcggtgttcttattgaacgattccgcgaacacccacacgatcggaacgagccagatgaccgccagtaccgccaggaacagatgggccgcgatgtcgccgacgatgcgacgcttcttctggtcgtgcaaaaggccgtggctttcgacttcggctacggagtgcttgttgctcatcggaatgcctcctcattcttgtaggagccggaattgcggtaggtgatcagcgagaccacggccagcacgacgaaggtcatgatgccgatgacggcacccaggttgtagtcctgcttgtcgacggtcagcttgtacagccaggtgatcaacaggtcggtcttgccggcggagtcgcccagcggcgtcggatcgccggcggacaacaggtagatcacgttgaagttgttcacgttgccggtgaaggtggtgatcaggtacggagtgagcacgaagatgatatatggcatggtgatcttcgtgaagatctgccaccagttggcgccgtcgatctttgcggcctcgtactggtcggccggaatgttctgcagaatgccggtaatctgcatgatggtgtacgggatgccgacccacagattgatgacgatgacggtgacgcgggcccacgtggcgttcgtgaagaacggcagtggatcagtgatccagccccatgtctgcaacatgcgattgaccgcaccctgcggctggagcatggtatgcatgaccagcaaggacacgaattgcggcacggcgatcgacatggagaagcatgcacgccagaagcccttgccgcgagtggtcttgcggttgatgatcatggccacgaacatgccgaggaagaagttcaggaacgtggcgaagaacgcccacaccaaggtccagatcagcactcggacgaacagtccggcattgacggtgccgccgctgttggagaatacggtggcgaagttcttcaggccgacccaatcgaaaagaaccagattcttatggtcatagctggtgaatgccatggagatcatgaagatcaacggcagcacggtgaagaccgcaatacccagcgtaggcaggaacatcagcaacaggtgcgccttggcgtcgagcaattcatgcacatcgtccatgaagctcggggccttgccgttctcctgcatctggacctgggacttgtaggcagcgcgcacggataggatccacagccctacgaaggcgacgcaaatcacgatggaacacacgccatacagcagaatgaccacggaacgatcaggttcgacgtactcccagaagccgtcaacgagcttcttgccgcccttgttttctcctaggctcggaatcttggacagatatccgatgccgctggtgaacaggtacacaaagaatgcgacttccaaagccagcatggcaatgcccttgacatactgcttgcgaacgatgttgcccagaccgaacacgattgcggaaagcctagtgaatacatcacctttggtcaatgccgcctttaccgtatatggcgatgggggaacgtaatcagcgccttgcttccggcggcgcttcatctcccggggggaaagagttattgctgtcatttcgaccgcctctctattgggaacgaaccatctcacgcatggaagcggatccgctctgccgtgcttcattgcgtgaaagattcgcgcttacataaaaaggccttgctttccggacaaggggaaggagaattgaaaaccttgcccgggaatgcaaagcgtaaaggaggagtgagtcatggtgccgaaatcataggaggcatcatgactcgcaatgcgtccagtgtggtcggtggtcggcgattgcatcgccgaccaccgcaattattcagttattgttgtctgccatcaccgattcactcggcgatggtgcccttggcctgggtgacccaatcctggtacttggaagcggcgttgtccttggtgatttccttgttgaccagagccttgccgaaggtctcggccggagtccaccagtcgttcatgccggccagaccggactgcaggattgcggtgttggccatggtatcggcctgggcctgagccgcgatatcatccttggtgagatcggccaaggacttgtcggtcggcgggatggaacgcatctcgtaatgcagcttctgggattcggtggagccaaggtaggctgcgaactgagcggcggccttggtgttcttggcgttcggattgtaggcgacggccttggtggccgcgaaggacttcatctgcttcttctggccgttcacggtgaaggtcggcagctgggtggcggcgtagttgtcgcccagggcttccttgacgtctttggcggaccaggtgccggagaagagcacgtcggcggagccgtccttgatggcggccagaccggaggcgccatcatcgttgctgaagttcgggttggcaaccacgtcgaccaggtaggaagtgatgtcggcgccatccttcgggaagaccatgccggccttctcgtcgttgccggacttgccgaacagggtcaggccatcgaagaagccgttgatgtaccaggaattggacatcgggaaggtgaccttggccttggcgagcatggcgtcgaagtccttggcctcgtccgcggtgatcttggacttgttgtagtacatgaaccaggtgttgtcggtgtacggcacgccgtagagcttgccatcggtgccggtgacggagttgatttccagatcgccgttctgttccttgacctgcttctcggcgtcggtgcccagctgtccgatgccaccctgttcgatgagggtgcccaactgatcggaagcgaacatgtagacatccgcggcggaagccggatcggtggcgacgttcttggaagcgtcgccctcggagacgacatcgttcttccacgtgatcttgtattccgggtgagccttggcgaagttctcttcgaccttacccagccaattggagtccttggcctgatcttcctgtggagcccacacgctcagcgtgatggcttcggtgcccgaagagcccgaggagccgttgcttccggagccgcatgccgcaagcggtaccagcatggagacagcagccgtcagtccgattgccttcttccaatcgatcttcattgatcttcctttcctcacataacctgtgttccctcaacacagccagtatcaagcgttcgctcaagctctgcatacgttcacatcatcgtttcacggataattgctgtccgtccttggagccaccgggagtgcatcagtgattgtcactataccacatttctgccaacgtttgcaatttgcggtaggatattttcatcgtcatcaggcaagccgtatctttccaaggagacacatcaccatggattcccgcccgacgcactccaggccggcatggctcgataccgccgtgttctacgagatctatcctcaatcctttgccgacgcgaacggcgatggcatcggcgacatcgacggaatcaccgcccgtctggattacattcaggaccttggatgcaatgcgatttggctgaatccctgcttcgattcccccttcaaagatgccggctatgatgtgcgcgactaccgactcgtagccccccgatacggtacgaacgccgatctgatagcactgtttcgcgaggtacacgaacgcggcatgcacatcctgctcgacctggtccccggtcacaccagcgaagagcacgcatggttccgtcgtagcgccgaagccgatcacaacgagtattccgatcgatacatctggacggattcgtggatcgcaggcggcgacgggctgccgttcatcggcggcgaatcaccgcgcaacggcacctacatcctgaatttcttcaaatgccagccagccctcaactacgggttcgcccatccaaaacatgcttggcagcaacccgccctgggaccggacgcactcgccaccgccgacgcgatggtcgacatcatgcgtttctggctgtcccgcggcgccgatggcttccgcgtggacatggccgacagtctcgtcaagcatgacgatgacggcaagccctatacgatccgcacctggcagtacatgttctcgaagattcgcccggaatttcccgaagccgcgttcgtatcggaatggggacgtccatgcgaaagccttgaagcgggattcgacatggatttctatttggactggcgctgggacggcattccgaacgggtacaacatgttgttgcgcaacgttgacgaccccttgagccgcgatggcgacctgagctatttcaacgcggattccgagacgccgatcgcctcgtttctggagcaatatgagccgcagctgcgcgatgcggaacggttgggaggcacgttcaatttcatcacctgcaatcatgacaccgcacgcatcgcaccgcgattgagcgaacgcgagatcgccctggcctactgcacgctgtttgccatgccaggcacgccgttcctgtattacggcgatgaaatcggcatgcgatatctgcccctgcccaccctggaagggggttacgtacgcactggctcacgcacgccgatgcagtggaacgtagcaagtttggctgggttgaaggccggagctatcgcgaacacggatgacgagacctccgcctacctgccggtcgacccatccgccgatgcgccgaccgtcgccgaatcgcgaacacgagatgattcgctatggcacatcgtgcacgacatgctccatctcagaaacgaaaccgaggcgcttcatgcaagggggacgttcacggcattgagtcgtgggcgattgttcgcattcgcacggtcgtcggggtcgcaaagggtgattatcgccgtcaatccaagccggcacagcgaacgtttgcagttgccggaagtcgattttaccgaaatcttccatatcggcgatatcgatgtctccggcgactctctgaacatgggtctgcaaagcttcgcaatcctacgagactaagtatgcttcatattgcaaacgttcgtcataacaaccgcgacaaatcaatatgccagccatagcacagtaatcgtcataacgcctgccggcggcatcgcagcctgccggcactcacatagacagcgtcgttgcacagcatgtaggcggacgcatacgaaagggagactgaatcagcatgacagcatcaacgcagcacaccgaaagcgccgagcgtatcgcacgcccgcttatccagctggccaaaatcaacggcatctccacctcgtatatcgaccagctcggcacctatgttgagatccgcgacgaagtgcttgtttccgtgctggccgcactgggtgtggacgcatccaccgagcaagccatcaccgattcatacgccgaggccaggcagcgcattgccgatacgctcataccgccgaacaggtgactgccgcgcagagcaccgcacgcgaatccggcatggcgctgggccggggcgccgtaccggactacgtacgcaccgtacttgccgatcatggggtgcttggctgcatggtggaatggttcgcgcgcgtggatggccccaacgccggtgatccctatgccgatcccgccacgtaccgcaagtatgcgttggcatccgtcaccacacacgacctgccgccggctaccaaactgtccgccggcgaacatgccaacgaacaccagcaccatcatgccgtgaggcgattcatccagcccactcggattcggcccgaataggcgatcctgcccatcattttcagtcatatcgtccccatgacgcaaccctccttccatcttccgctatcacgcccgatgttgctgcagtcgcacgcagaggataatggccatctactattgggcatgtccgaagccactattgctcccaaaaagagcgtctacttgtatcggcaaagtctcgacacatgtcgcaatacggcaacaaaaaatacgccaacacgcataaaccccccgactttgacagtagcgaaccggttcgatacaatcaatctcggaccggttcgacacagacgatgaccgtctgcaagaatcaggccacggtcagattgcatcaggcaagaaagggcccgcatatgaccttgacaagtgatttccgacgaaggaaagtcgcaaggaggaaaggaaaccccatgaagaatctcacgaaaggcatcgccgctgtcggcgcgttggccatgttgatgggcgtcggcgcctgcggttccaacaccgcggacgacaaaggacatgtctatttcctgaacaacaagccggaagttgtcgatcagtggaacgaactcgccgaaatgtacaccaagcaaaccggcgtgaaggtggatattcagagcgccacctccggcagctacgagtccactctgtcgtccgaactcgctaagaacaacgccccgaccatgttcggtatcggcggcttcgatcagtatgccaaatataaggactacctcgaacctttgcaggatactgaggcttacaagcttctcaacgatcagggcaagcagatggcccacaaggacggcgacaacgtgtacggcctgccatatgccgccgaatggttcggtatcatcgtcaacaagaagctcatcaacgagtatgccaaaaaggactacgccgtcatcaagtccttcgacgacatcaaggactacaacactttgaagaaggtcgccgacagcatgcaacaacataaggatgatctgggcatcgacggcgcgttctccacgccgggtctggactcatccaactactaccgatatgcttcgcatatgactcaggtgccagtcgcctacgagtacattgacgagggcgtggacttcgagaaggaactcaagggcacctatctcgataactacaagaatctatgggatctcgagatgaaggacaacccgaccgaaaacaccatgcttggctcggtgaattatgaggactccaccgccgagttctccgccggcaaggtcgctttctacccgaatggtgtatgggcctatagccagatcaaaggcaacgaagttgccgatgaagacttggccatgctgccgtactacatgggtttcccgaacgaaagcaagtacgccgcgaactccatctatgacatctcctggtctgtgaacaagaatgcttccgacaaggacaagaaggccactgaggatttcatcaagtggatggtctccgacgaggatgccaagaagattctctccaaggatatgggcttcgccgttccgttcaccacctttgactccgaggatttccagcctgacaacccgctgaccaagtccgcgctcaagcttgagtccgatggcctcactccgattcatggcgcctatattccgggacaggcatgggctgacggcgtggccaatgcactgctcgagtacgctcagggcaccggtgactggaatggcgtgaagaaggcatatctggacgattggaccagcgcctggaatgattatgaaaacaacttcggcatgcttccgccgacccacaagtgattcgcctatgggtcgcggtgaatcgcatagcgccattttcacctggtccataacggcatgaccacagtctccatcggctttctcgctcgccgatggagactttctcatattcaaaaaacaaacaacgtctgtgaccgaagctgatacgcacagatatgaatgtatcgcgcaaacagacgtagcatacgccatgaaaggaacgaacatgacactggaatccttgaccaagatacggcacgaatcaagccgcgcagtcaacgcggaaaacccgaccggcgaaccgggcaaaggcggcatagcggccagtgagcttggcccaagtcgcaaaggcagcccttgcctacgtaacatacccgtcggcgcaacggcgactcttgctgatatcaccggccccggctgcattcgacacatctggataaccgttgacgagaagaccaccgatgccgattgttttgtactgcgggaccttgtgctgcgcttctattgggatgacgaggaggaaccaagtgtggagtgtccgcttggtgacttcttttgctgcggattcggccgtgcgtgcctagtcaattccatgcctgtcgccgtagtgccgaaccgcggtttcaacatgtacttttcgatgccgttcggcgcacgcgcacgcatcacgctcgaaaaccagcacaagaacgccatcagcgcattcttctaccagattgactacaccgtgaatgacgagccgttcgacgatgacattgcctatttccacgcacaatggcggcgccagcgccttactgaaaaggggagagactatgtggtgcttgatggcgtgaaaggtgaagggcattatgtaggcacctacctggcactgaccacgcttgagcgctactggtggggtgaaggcgaattcaaattctacatcaatgacgatgaagagtaccccacgatctgcggcaccggcaccgaggactatttcggaggctcttggagcttcgccaagcaggtcaatggcaagaccgtggagcaaaactactgcacaccgtatctcggatacccgtattactcttcacacgacgagctgattcacaacgattatcacaatgatgattgccccccgatgcgtggcttttaccgttggcacatccccgatccgattcgtttccgttccaacctgaaggtgaccgttcagcaaatcggtgtcggtcaccgcggattcttcgaacgtcaggatgatgtggcatcagttgcctactggtaccagaaggggccacacgctccatttccgcaactacctagcgccgaggaacgttggccgcgctgacgtcatccataagtagctcacctcaagccgcatcccctgagagacaagggatgcggctttttgctacagtcaatcgtttgatgtacaacatttttttagcaaacgcttgcatagtgtgtcgcctaattttatgcctaaaaatggcggcaaatagcggattgcccggtattgcaacgtgataaatcaacaaaatactgccatcgtttgcaaaaaagatgaaagtgatgcataataggggcatcggcagaaagcagcactatctcagtgcacatatccaacggggacgttggacccgatgcagaaaagaaaggttcgaagatgaatcgtaaattgaagtccgcactagccctcattgcggtcaccgccatgtctgtcacgacatttgccgcctgtggcagctcatcgagctctgattcaagcaagggcaaggtatactacctcaatttcaaaccagaagccgccgacgagtggaccgatttggctgcggagtacactaaggaaaccggtgtcgaggtcaacgttcagaccgcggcctccaatacctatgagcagcagctcaagagcgagatggctaagtccgaggcaccgaccctgttccaagtcaacggtccggtcggttacgccaactggaagaactacactgctgacatgtccggcacagaggtatacaagcaactgcagaaccaagatgttgccctcaaggatggcgacaaggtcgttggcgtaccgtacgtcatggagacttatggcctaatctacaacaaagacatccttaacaaatacttcagcacttccggcgccaaggccaagtccatcaaagacatcaactcctttagtaagctgaaggccgttgctgacgacatgcagtccaagaaggatgaactcggcattaagggcgccttcacctctgctggtttcgactccagctccgattggcgtttcaagacccatctagccaacctgcctctttactatgagttcaaagatgacaacatcactgaacagccggccactatcaagggaacctatctgccggagtacaagaacatctttgacctgtacatcaccgattccaccaccgagccgtcccaactaagctccaagactggtgacgacgccaattccgaattcgcactcggcgaggccgctttctatcaaaacggcacttgggcatggtccgatttgcagaaagccggcatggaggccgattccgttggtatgatgccaatctacatcggcgccaagggcgaggagaaccaaggtctggcaaccggctccgagaattactggtgcattaattcgaaagcatccaaggccgatcagaaagcgaccgccgacttcctgaagtgggtcatcacctccgataagggcaaagaagcgctgtctcagaagatgggcttcaccaccccgttcaagaccttctccagcgtcaaatccgacaacccgctggtcactgccgccatggacgaccaaaagtccggtaccaccgcagtgtcctggaacttcaccatgatgccgtccgaacaatggaagaacgacctcggctccgctttgctcgagtatgcccaaggcaccggcaattgggatggcgtcaagtccgcgttcgtggatggctgggccaaggaatatgccaacgcccacaagtgaccgcaattgacttcactgtctgattttctccttatagaaaaccgctccggaaccaaccggagcggttttctatgtatcggtaagcgattagcccttatccaaggacactcgcgaagtgctggagcgaacaatcagttgcgccgggaacgtctgaaacggcatacccgtggtcttgcgattgatcaggtcaagagtcttacaagccgcctcgcgtgccatgccaatcggatcctggcgaatcgtggtcaagccgatatcgtgcgcatagaagctgtcgtcatagccgatgacggaaatatcagacggaatacggtagccacaacgcacaagctgataaatcagtggaatcgcgatgccgtcctcctgacaggcgatggcggttggcatttgcggcaagctcagcaactcggagacaatcgtgctaatgcggtcctcactttcctgcgcaaccaacgtagttggcgtggcaccctgttccagacaggccttgacgaaggagtcataacgttgctgcacactgaagtgcaaggaaacctcacgcgacgtacgtacgtagacaatgttgcgatgccccagcccgataagatggcgcgcaaccagacgcgaaccttgatcatcgtctatccccacggccgcagtgaaaccgtattctcttggattcacacagttgatgccgataattagtacgccggtgctggccaactgtgcgctttcctgcgcatcgacatcgatggaagcaacgatcaccgcgtcggcattgcggcgaaccggcagcatatcaaagaactcacggcgttcctcgatgctggagatctggaagatcgataaatcatagccgtctgcgtgcaaaacctggttcagcccttcgatgacggaagcgctgaaccatagtcggatatggtcgctcatcagcaaggcgacacgcaatgctttgccggacttgagcgcagtggccgaacgggagatggagaaactcatctcgtcggcgatgcgcaacaccctggaccgtgtcgcctcagatacgagctcaggtcgggtgaatgatctggacaccgtggaaaccgacacttttgccgctttggcaacgtcttgaatattgactgacatgcacaactcctttatggcagtagatactacaagacacaacgtgttttgcaaaaaatatccaaacgtttgcaacgacacgacaatacgtatttcttgcttatttccaagggtatccgtatactgataactgttcacatttgataaatgaaattgacgttgcatgaaaatcatgacaacgtttgacttttatttatctgtgaagtagggtattctcgaaccggttcgaacccgacgttgcggtcacggtcgaactgagtgtcgttgaatcactcgaggggtgttccccgggtgtactcaaggaggagaaagtgggcatgaaatgattacgatgtccggcaaggcaattcgcaggtggtgggcgctgtttgcgctacccacgttcgcggctttcgtcattggtttcctggtgccgttcgccatgggcgtgtacctgtcgttctgcaagttcagcacggtcactgacgccacgttcgtgggcgtgtcgaactaccaaaacacaatcacggatccggagttcctgcacgcgctggtgtacacggtcctgttcacgattgtgacaaccgtggtgatcaacgtagtcgcgttcgccattgcgtacatgctgaccaaggccatcaagggctccacgctgttccgttcggtgttcttcatgccgaacctaatcggcggcatcatcttgggctatatctggctactgctgctcaacggcgtactggcgcactggggtcgttcgatcacattctcgggcgtgtacggcttctggggcatggttctgctgacctgctggcagcaaatcggttacatgatgatcatctacatcgcgggtctgcagggtctgcccggcgatgtgatcgaggctgccgcagttgacggcgcgaactcccgccagacgctgttcaacgtgacgattccattgatgatgccgtcaatcacagtgtgcacattcttgacggtgaccaacggcttcaagatgttcgaccagaacctcgccctgaccaatggcgccccgtcgaatagctccgagctcttggctctgaacatctaccgcacgttctacggacgcgccggcttcgagggcgtgggccaggccaaggccgtggtgttcttcatcatcgtggccgtgattgccctcatccagaacaagctcaccaccagcaaggaggtccaagcatgagcgacaaggtcaagcatcctgtattctggacggttttcctttccatcgtctcactggcatgggtctatccaatcgtgctggtgctgatcaatagcttcaagcagaaggcttacatctcgcgcaacgcattctccctgcccaccggcaaggccttcgtgggactggagaactacatcagaggcatcgagcgcacgaacctaatcagcagttttggctggaccgtagtcgtcacggtcggcgcggtcctgctgatcatcgtgtgcacgtcgatgtgcgcttggtggatcgtacgtacgaacaactgggctgcgcgcctgctgtacacactgttcctgtttaacatgattgttccgttccagatggtcatgttcacgctttccaagctcgccgacatgatgggcctgaacaccccatggggcctgtggattgtgtatctaggcttcggcgcgggcttagccgtgttcatcttcactggcgtggtcaagggcatcccgtccgaactcgaggagtctgcgatgatcgacggcgcgtcggtaccgagaatcttcttccaaatcgtactgcctatcatgcgcccgagcctgatttcagtggcgatcctgcagacgatgtggatctggaatgacttcctgctgccgtacctgacgttggacatgcgccgtttcaagacgatgtcgattgcgattcagtacctcaagggtggttacggatcagtggacatgggcgccatgatggcctgcttggtggtggcgattgtgccgatcatcatattctacctgtgctgccagaagtacatcatcaagggcgtgatggccggcgccgtcaaaggctgattaactccatcgcatgaggggtgctgtcgaaattttcgtcggcaccccttttcttcatatccgcagaacacgcacgtcaaccgttgcaaacacttatgttaacgtgtctctagcagttgtcatgacagcaatgtcgttcgtcagtggaggattctctatgaaagcgagcatccaagccgtggccgccgaagcgggagtatcgatttcgaccgtctctcgcacattcgccaaaccgaatctggtgctgccggagactcgcagcaaagtgatggcggccgcggaaaaacttgactaccgcatctcccgctcagcggccgcactgaaaaccggtcaatcgttccgcgtcgcgctgttgatgagcgatccgatttcgacttggttcaattccaatacctatgccggattggattccgtgctgcacccggccggatatgacatttccatcttcgagatggccgacgcgcacgaccgccatgagttcttcgcaacgttaccggtacgccgcaacgtcgacgcggtcatcgtaaactccttcaacatcgtgcccgaagaggtcgaaaaactttcgaacatgaaggtaccgatcgtcggcatcaacattccatcaatcaacggattcaatgccacggtgagtatcgacgaccgtcaggccatgcatgttgctgtggagcacttgttctccatgggccaccgacgtatcgcttatgcgtacgagacatcaaacgacaataaccagaacatggtcttcagcgccgaagcacgtctgcatgggctgatggaaactgccgaagagcgaaagatgacggtggaacgcatcgcaatccgcaactatgaagacgccaccaacactattctcaattcattgctgaccatggaccccgcccccaccgcactgtattgcgaaagtgacgagctggcattgcctgtcatctataagttgtgccagtacgggcacgccgtccctcaagagctctcgatcatcggattcgacgacgtaccacttgccgcaaagatcggcctgaccacgttgcatcaggatccgttcaacatgggcgaaaacgccgcacgtaagatgctgagtgtcatgtccggaaaaacaccgaaaccgctgcatgaaacactacaggcacaactcatgatgcgtgaaaccaccgcattcatcgactgaccaagccactattatctcgccaaaggtttctctgctgtaactgactgcccaaccggttatgaatccggaaatcaccattcagggtgaccttggcgcatcggcatcatcatcgaatctctaatctgtccggaatggcaggaagatggcattttcgaaaaccacgacacgcagatagtcatggcatcacgactggattccgaccagcaattcaccaagaccctgcaggatgacctactcatcatcggcactccggcccttcagcctgcctacggtatgcgccccctcagcaaagaaggtttgagtgtagtggttaaaggccctgcaccaagccagatgaacacatacgcattacggtgaggttcagcatggcaaatcttcgcggtaccggtgaagctcaacctgactagtcctatatcgtaatgcgcaaacggggcctggcggtttatccgccaagccccgtttgcgcattcgatgagactctattgcgctcaatgagtggtcttatattcagacgcccaaccatccacaaatgcatcatgcacggtgtcccatgtaccggtctcctgcgcatattccaacatcgcgttgcccagcgtcaacacccactgagtgcttggcaacggatagatcacaatatcgtacttatctgccttggcataggcatcgttggcgcgatgaatcgggttcttggtctggtaaccggccttcgcatacgacttaaacggtgtttcgaaacccgcctcattcgtgatgatgtcacgtgcctcatcatcgttcaggatgtagtcaaggaactgcttggtggccttctgatctttttcagaggcgttcttgttcatcgcaaagtacaggaagctcacggtcaggcctgcattctcctcacccttcacacccatatagatcggcaatacgcccatatcttcatcggcgacctcttgatcgcgaatctgcgaatagccccaagagccattctgcaagaacacggcctcacccagtgcgaactcggagttggcgtcgtccatggtggcactggcgagctgcgtcttcggaatcgtggcgtcgttgatgtacaggtcgaaaatgttcttgaagttcgatacgtacttgtcggaaatagtggccggcatttgcgtgacaccctgatcgcgatactcatagtagacggagatatgcgccagctgatcaccgaaacgtttgatggagctggtgtcgaagccggcggaggtgaacgcacctttcacgcccatctcatccttatgtgcttgtatttcatcggcaactgtcttcagtgtcttgaaattgttgatgctgtcaaccgacttaatgcttgcccaggaagaatcgaagtacttctgcagcagcttcttgttgtagatgatgccatatcgttccatgacgtaaggcacagcaccaaccgtatcgccatccttcagcgcatagtcggggttctcctgatccttgtagatgttggttcccgacatgtcggcataataatcagtccaattcagaaagtcgttgttgtcgacatcgaacaacgtaggcgcctcggatttggccagctcactcttaagcgactgttcgtaggtgtcggatgatgcagtggcgatatcgacctggataccggtcttcttggtgaacttttcggccagttccttgaactggtcctgttgttccaccttcatgctgagaaaatatacatgccctttgtcagcgttgacatttgagccgccgcatgcggagagcgcaccaacggacatggcgagcgccgacactgcggcaatggtacgagtgagtttcttcatgatctcctccaaaaaaataatgattctgacagcgtcgtcagatgatgacaaacgtcgtgcatcgtgcgatatgtggtaccgaagtatagtttaatcgcttaagcaaaaatgagagggaaagccgcaaggagagccgccgaggcgaaaagaaggtacgaaacgacctcgacgacccgtaatcagtcaaaaagaaatcagattggtcagacctccttcaatccgcgagcgatggagacattgcgcacctcaacgacgccgtcggtggcgaaaatgctcagcgactcgccggggcgctcatacatgcgcacgttcagtgccactccatccacatacaacgtgccgatagtgtcatcgacgatgagttgcagatgatagttacggcctgcctcgagcttgataggtcgctcaagcccgatgttcatgacattaaaccatgggaagttcggactgccttcgaacacatagcgattttcagctacggggaagatgaactggtatcccagcgcggtatcttcgttctcgttgacacgcaggccgaaggagcgagttccttctgagaaggtgatgtcggcttcgaacgagaacaaatcaccgcagccaagggcgagtaccgcctcctgtcgcgcaccagtaccatcgatggtcacattgccgacattctcgcgctcattgaatgcattccacacggtatcgggaatgcgcacaccgagtgtgccgtcttcgcgctgatacacttcgtgtgccacgaaagttccggcccattcgaagttgctcctgtcatcgcacttctccttggtgccgacccagccaaacaggatgcgttggccattcagttcgaaggtacggccggcatagtaggcactgccgtcgaatgcatcgtccgacggtgcaatccatgggccgtcaaggctcttggccatacgatagaccatcttgtgcttgtcgctgtattcggtgacgatgtggtaccaccagtcgcccatcttgaacaggtcgggcatttcatgcatggtgtacaggttcggcgcccagaaatcaccctcaaatttccagtccttgagatccttagaggtgaacttcacggtacggccggtctggcaggttttcggaccgattttacgggcaccaagaatcagcagatactggtcatgttcttcgtcccgaatgacccacgggtcacgccagtcatcagggtcatagccctcttgcggcgtaaaggtgatagcatcctgtgttttggtccagtggtacaggtcgtcactgaccgcatgcatgagcacctgcgcaggcctgccctgtgcgggataatcgcggttataaccggtgtagaagatgtggtactggccctcgccctcaaacaccgagcccgcgaagatgaattgatcctgtgcgtcatatgcgccacgggggattgccactccatgattctcgtagtttacgaaatctttggttgtggcaagatcccagccgaacggctctccgaacggctccgggttgcgattgtcccgctggtggaacaggaagaattcgtcgcccttgccaaatggcatgcagtcaccgaaccaagtgccagggaactggtaataaagtttcatatctttacctttcttcagctgctttgcctttcgcccggcaatcgtctgcgattaccttttgaaggaaccagtattacttcgcattattcagtttaagcgcttaaactgtttaagcgattaagcacaaatatagcacttaaaatcaaaatgtcaaacgattgacgcagtcaccttgcacaatgccgtttttccaccgtttcgtgagtgtttccacgagtgtcgcagcactacgacgaccatgctacaacctcttcaccgaatccctagataccgccggacattgcacgaaaatcggctcgaacgtcctcgtcactacatgttcatcaccatcatcctcattgcggccgcactgccgcaacaacgttcgcacgcccatcacaccgagctcatattgtggcagacccacggtggtcagcgcgggatgcatgtgcgcggaaatcatttcctgattatcgaacccaaccacggagatatcatccggcacacgtttacctaactcacgcaacgcatcgtacaaaccaagcgcagtgcggtcattatggcaaaacactgcggtcgcatccgtcgccatcaccttttccgctgccccgtatccaccttcttggtcagcgttcgcaggtaccaccagtgacgaatcaaaatcgatgccgaatgccgcaagcgccgctttgtatccttcaagtcggccaagcgacgcaggcgagggcgtaatggcgttaacgaacgcgatacgccgatgtccggcctcaagcaatagtcgcgtggctgtggccccaccctgaacttcgttcggcaccacagcaggaaatcggccacgttcgtcatagcagttcaccaacaccgccggcaccttatcgagttcgctcggtggcgtaattgattcatgaacccacttcgagtagatgacgccttcgacctgatgctcaagcatgaacgcgaaagtcttacgttccacatcttttttaccgttggtgttaaccaccagcagaatcttcccgttacgccaagcctcatcctgcgcaccttggattacctgccccgcgaacggagaggtagccacaccgtcgctgatgaagcctatgatgtcggaacagccacgggccaacccccgagccaatgcattgtgatggtaaccgagcgaatcggcggccttacggactttgcggcgcgtggattccgggatacgcacattacgattgtcattcaccgcccatgaagcagtcgcgatagagacgccggccgctttggcaacgtcttgcaacgttactttcgccataccgtcccccgaccatcagactccggcttgttgacgtatttggcgaacgcatgttcgagaatcgggacgtgaagcataagcacgctgccatacccaagcaccaccagcaaaaacagaccctgcggcatgtagaaccaagagccgacgatcagccctaggaacgcaacatcgattatcgccagcgcgatggtcgacgcgacattagtcacgccgaagatgaatgcattggcgagggtgccaccaaggctattttcgaaacgagcctgtaacgcccagacccattcgaagcccatgatccatacgatggtgaaaccgaattttggaattagcaacggtacaatctgcagaacgacccacgcgtaggacagcactgccagcgccacaccgaagattagccactgcactgtggacttcacaaaattacttttgaatgatctgaaataattggtggtgacgtgcccctctcccgcaagcgtcttgcgagcagcgtcgtggccggcggtcagcgcggcaccgacagtcacaagcggaatgctggtgacaagcatgagaatattgatccacacaccgtcggtcagattgttccaaccgcgcatgagacctgaatcaggtgacaggaatttcatatcgctcctttgtgtaaggccatgaccgccaacgttgtgttcaatcttaccgagactccgccatgtccgtgacaacgtaatcacaacacacccgtgatgcattggcaccattggtgatatcgttgtcattagctgttcataggcgaacaatcactagaacagggacatatcgggacaaagacgtaaggacaacatcatgaccacgaataatgaacgtgcggattggtggaagcaggccgttgtatatcaggtctatccacgatcgttcaaggattccgacggggatggcttgggtgacatcgccggcgtctccgagaagatcgactatctgcaggccctcggcgtagacgccgtctggctgagcccgttctatccctccgaactcgccgacggcggctacgacgtgatcgactaccgcgacgtggacccacgcctaggcaccatggacgacttcgacgagatgacgctcagggctcacgaggccggcatcaaagtaatcgtcgacatcgtacccaaccacaccgccaacaagcatcggatgttcctagaggctcttgccgcggggcgcggctccaaggaacgcgaccgctacatcttccgcgagggtcgcggcgaaaacggtgaacttccaccgaatgactggatctccctgttcggcggcccagcctgggagcgtgtggaagatggccaatggtacctacatatcttcaccaaggaacaaccagacctcaactggaagaacccggaggtacacgaggaattcaagaaaacgctacgcttctggtccgaccatggcactgatggcttccgtatcgatgtggcgcacggcctggccaaggatcttgaatgcatgccacttgaagagatgggcaaacgctatccgattcacgaatcgctatgccatgacggcactaacccgatttgggatcgttttgaagtgcacgacatctaccgcgagtggcgcgaagtgttcaacgagtacgatccgccacgcttcgccgtcggtgaggcctggtgcgtaccggagcatcagcatctgtacgcctcccccgaagagctgggacaggtgttcaatttcgagttcgccgaagccaactggaacgccgccgagatgcgtaccgccatcgaggagggcttggattcagccacacattccggcggctccaccaccacgtgggtcatgagcaaccacgatgtaccgcgtcatgccagccgttacgccctgcctcagatcaagacccccagtcatcatcaggtagccaaggactggttgctgcgcgacggcacctcttacattgaagaccgtgaactcggcaccaagcgctcccgcgccgccatcatgatggaaaccgggctaccaggttctgtatatgtgtatcaaggagaggaactgggcctgttcgaggtagcagatattccttgggatcgtcttgaggacccaactccgtactttaccacccagcgttattatgaaaagggccgcgatggctgtcgcgtgccgatgccgtggaccgccgcggacaagccgacgccggcttcttggaatgagagttttggcgacggagcctcctttggcttctcccccgtcaccaaggtggatggtacccaatccaaaagcccccatttgccgcagcctctctggtacggcaatttcaccgccgacagcgaagcacaggatccggattcaatgttgtcgctgtatcgcgcagcactcgccgcacgtcaggacatactcaccgccacggcggatacctcctgcactctaatcgacgcaggcgatgagataatcgcctacacgcgtcctgccgccgatggtcgcacattcgcctcctatacgaacttcggcaagactccagcttcgctgccaaacggagagatcatactggcgtctggcgatgtatccaacgggcaattgccccaagacacaaccatctggatgctgctctaatccacacattgaatgctcccgtgttgcccccaatgaagcatcagcaacacgggagcattactgtcacaagaatctccctcggccctccgtctcgcagcgtctggccacggctgcgcatgcggccaccgaactaagcgatgggttgctgggacaggttgcgtaggttacatggcatgaacggagtgacgattcaagattatggccagagcagccggagtgtcagtggccaccgttccctgggtggcgaacaacaaaggtcaacattccagaatccataagaagccgagcacgcaaggttgcacaacaatttggatatcgccccaacgcattggcgaagggttgggtcagtgggctctctaaacttattggcttcatcagcgatggcgcaccccatgccggacaagtcattcgaggctcgcaggatgaggtatggcatcaaggtatgattctgctgatcgtggacaccaatggtgaaaaacgttgaaccgcaggcccttgaatccatgatggaccaccagatagatagcatcattcattcatcttgggcgcaccggcaggtaactcctcccgaaatcttacgcaaaaccagagcggttctggtgaactgctctgctaggcacgctgaattttcatcggtggtttccgatgaaatcggcggcggtcgctcggcaaccaaattgctattaaaatcatgtcaagagccgtcgtgacgcatattgccgcgacggctcttgactcagctatgctaaggaaacggtctgtctcaagcatccatgatggcagctaacgatttgactcgtggcaaatcgaacacttcgtcggtgtgcacgacacgtccatgctcatcagccagcggaatacgccaattcggatactgatcggacgttccaggctggttctgggtacgacgctcgccgacgccatcaaccaatgcggcctgtattagcagcgatggtgatttacgcagcatggcatgcatggcttcaacaatctgcgggatgtggctgtccgcatcgtcagcttcctcatcggagatcagaccaagtgtccgcagacgatcgagcatggcctgacgttccgcggtggccgatgcttggaaggattccaccgattcggtaagcagatggagccgctcacgcaactgtacatgctcaaactgcaggtaccctgcggtcggtggcagatcgtgcgtagtgacggacgctaacgcatacttgcgatagttggtcggatcatcgtatggatcgcctgcgttgggagagtcatccactcgtgcgaaccactccaccacggtaccaagcacaccatgtgaagcaagcaccttgcgtacatagttaggcactgtacccaagtcctcaccgatcaccaagccgtccgcacgggaggcttcgatggtaaggatagctatcatcgcatcaacattgtatgtcacgtaggcaccgttcttggcgccttcgccctgaggaatccaccataggcggaacaggccgagtacatggtcgatacgcaccgcaccagcgtgagcgaacatggtatgcaccatgtcacggtacacaccgtaaccggtggcgttcagataattcggattgaacggcggctgaccccaatcctgcccctgttggttgtagaagtcaggcgggcagcccacggtcacgctaccgacagcgaatcgttccggattccaccacacatccgcacctaacgaatgcacacccacggccatgtcctgcatcaagcctaatgccataccggagttcttggcaatctgctgagccgccgacacttgttcgtcggcaatccactgcaaccagcactgaaattcaaccaaatcggcatgctcacgtataagttcggccacttccagcgagtcacgattggtgtcgttaaaccaggaagtttcccacggcgcaccccacacctcgaacgccacagaccaagcagcgaacgctttcaaatccggaccggcctgctccttgaaccgttcgaaggcagactgacgctcaacggaacgcggttgcctgaagatgattttcagcgcctgtcgtttatgacaccatgcggaattgatgtccatcggattcacatcatcattggcagccgacacctgcgcatgcagacgcgccacctccgccttatcggattcacttaaatcagcgtattcggcgatatcctgcggacgaatatacgtgacattcaggaagcgacgggattccggcaggtacggcgaaggctccaacggcgggatcggcgcacatgcgtgaatcggattgatcaacataaagtcggcatgcgttttttctgcagcgtccttgaggaggtgtcgcaaatcaccgtaatcgcccacaccccacgattcggcggaacgtacggaatacatctgcgccatccatccccaacgttgcctatcggccaccgctttcgggaccggaatactggcaggtgcacaaatcagcgtcgcctcgccatatgcgtcgccagcattgatacgcaacgtgtgatagccagagggaatatcatctggcaggttcaatctcaatgtaccgtcattctctgctaataggcacatcgccagattgcctgcgtaggcggtaccgtcttccagcagcaggcgcaatgtaacgttccggcctgccggacgaatcggaatggcggtaggcgtaccgaggaatttaacaatggtcgacggcaccagcgtagtctgggtcttacgcacagttgcctcatatgatttcgtaaccgcctcatcggtggaggcatccacgccaagcgcccgcagtacggagacgagtacttcgtcgcgaatctccacataagcgcccaactgatcgatgtatgatgtcgaaataccgttggctttggctagctgaatcaacggacgtgcaagacgttcggcgctttcttcgtttctgggtgcagcgactggtgaattcggcatcttcgctctcctttgctggctgatcattgccagactgcgtaatcatatgaatccctgagcctgttatcaccatcatgaacagatagtgcaacaggaatgtttctcatctttagaatatcgcagattgacatcgtttgcaatatcaacaaacggcatgttgcggcgcttatggcgacaccacgtcaacaatctgcatccttggatattgttttatgacatacgtttgcactacgacgttttgcacgctgcccgcattcatcgtcacatgagcggactagaacagtgcaaacagcgacaacatcaccggatgtaaaatcagaatatgacgaacagcacggcaatgaaaatcgcgccgatgccgtaagccatgatgagcatggagttgtcgctgacgtcacagcatacaacactatcgatatgcagtaccgcttacatcgaactgacgtatttcccgcagagcgagcgacagccaatgcatggccctttaggttcgctattcgttgactgcccggtcattgtcacgcaacaccaactgcaccggcgcgtcggtctcacgtaaggtcaggcgagcatgcatgatttcatgtggctgaccgagagtctcctcattaatgagtgtgagcgctttatgtgcggctttgcggcccatcagaaacggatcttgtttcatggtggtcaggttcatgatatccgcatactgactgtcatcaaatccgataatcgaataatcccgcggcgtgagcttgtcataccgttccagtcgcacaatcagcggaatcgcaatggtgtcggtttgacaacagattgcatccgggaattgatcaagcgccaacaacgaggccaaggcactgtcggcgtagccaccatcgcgcggcacttcaagcaccttccagtgcaggtcgtggcttgtctcagcggtctgacaagcatggatgaaaccctgacgacgagcatcgatagaggcattaagcgaatcggcggcgcgcgagcagatgtacacgatgtatttgtgaccgagattgatgagatgctgcgtagcaatcatcatgccctcgtcgtcgtcaatgcatacggtggcatcgaaatcttcacgtcccggcgtattgataccaacgatcggcacacgaatgcgcttgagctgctcaacttcacgcgaatcgacggcgaaggaagcgacgaatactgcatccacattgcgacgtaccggcaaagtggtgaagaaccgttcgcggttctcagcggtatcgatatgctggaacagtgaaatgtcatagccagcaccatgcatgacatcatccaacccagcaagcaccctgttattgaaccaactggtgatgtcttcattcatcaacatcgccgcacgataggtcaggccagacttgagtgccgtggcggaacgggaaatgttgaaatcaagtctgtcggcggtttccaacaccttccgacgtgttttatcggataccaagtcaggacgcgtgaaagctcgcgacaccgtggaaacggagacgcctgacgctttggccacctcacgaatgcctactttggtcatgatgcccctttgctacttctcgtctcgcacggcacgcgacacattcgttgtgcgcgcggacatatctacgtacatcatactgccaacgttgtcaaaaatggaacggttaaagaagacaccgtacttcttatccacaattgcaaacgaatgtaaaccagcaggaatggatgcgccgcacatgattctaataatgtataaatcactgtgattccagtgtgtaaaagtttgcaaaaatatgttacgatgaacccatcgtaccgattccgtagcgaaccggtacgatggcatggcgattttgcaaaggcgtgaaatcgacaagcaacagtggaagggaaaacggcatcaggccgtaagagcaaggagcaaacgatgaagtcggctcagaaaattatcgcagctatggcagcatgcaccatgggtgttggcatactggccgcatgtggaggaggttccgcaagttcgagcgatggcaaggtgtacttcctcaacaccaagccagaaatcgtggaccaactgcaggaacttgccagtgcctacaccaaggagaccggcatcaaagtcgacattgagaccgcagcctctggcaccagcaaccagaccctcacttcggagctatctaaaaccgacggcccatccatgttcaacatcgcaggcttcgatcagtatgccaaattcaagaagtatcttgagccggtgcaggattccgaagcatacaagctactcaccgacgagggcaaaagctacgctttcaaagatggcgatgaagcctattccatcccatacgccgcagagtggtatggcatcatctacaacaagaagatcatcagggactattgcgccaaaagctatgcagtaatcaaatccgtcgacgacatcaccgattaccaaatcatgaaggccgtgatggactccatccaggaacacaagaccgatctcggactcaatggcgccgtatcaactccgggtctggacgcctccgataactatcgcttctcagcacacatgacccgcatcccgatgttctatgaactcaaggatgacggagtgaagttcacacttgacattaccggcaaatatatgggcaactacaaggatttatgggacaccatggtcaaagacagcccaactgaatcatcgatgatcagttccgtgacctacgaggactccaccgccgaattctcatccggcaaagtggcgttctacccgaacggagtgtgggcctacacccagatcaaaggcaacgatgtggccgacgaggacctcggcatgttgccatatttcatgggtatcgatggcgaagaggagtatggtcctgccgccgtatacgacgcgaactgggccatcaacaagaacgcgtccgacaaggataagaaggcatccctcgacttcattaagtggattgtgagcagcgatactggcaagaagacacttgccaaagaaatgggcttcgccgtaccgttcaccacattcggcgatgacgaacagcctgacaatccgctggtcgccgcagccaaagtgtggagcgacgacaaaggcaagaagaccgtttacagcgccaacatcccgggacagcaatggatggacaacatttccaatgcgctggtcgaatacactcaaggcaccggcagatgggacgccgtgaccgatgccttcgccaagagctggaagaccgaatggaccgcctacaaggattccaccggcatgcttccgccgtccgacaagttggagtaaaccatcatttcggttctcatacgtaggggcacgcgatcattcgctgcccctacgtcgcgccttatcactcacatcaaccgcgcgacactactacgttccaccagccgcgcaggcacacgctcatgtggctgtaccacggcatcgccacgaatcagcgccaacgccttcatggcggcgctgcgtcctaagtcatacggactttgccgtgcggtggtcaagccactttccttcgcgtaaaggccatcatcaaaaccggtcagagacaggtcatacggcaccgacatccgtctgcgggtcatcgcgaaaaacagctgcatcgcaaccgaatccgtaatgcaacacaccgcggtagggcgaggttccagggtgaagacaccgtccaaaacggcttcgcctggatctgcgagatgctcgtcatactccacgacatgcgcgcgaatcgcatcccccgcgacggcacaagcttcttcaaaaccctcttggcgcaaatcggcgctgtgtggaatttccggagcatggcggtagcgcacaaatgcgatatcggtatgtccagctcgcagcacgcattccgttatcatacgcatacctgcacggtcatcgatgccgacggtggcatcgtacccttcgcttgaaggtgtgttgacaccgacaatcggcagcctcacgctctgtagacgaggaacctcatcgggattaatcgcaaatgacgatacaattacggcatccgcattgcgacgtactggcagttgctcgaagaacgctttacgctcctgcgcggtaacaattgggaacactgaaatatcgtagccggccgaatgcaacactgaatccaacccggagaatagattggcattgaaccaagaggagatatcttcgctaatcaacaacgcaacacgtagcgcttgcccagttttcatagccgtggccgatcgagatattgaatagttcagttcatcagccgccttgagcacacgctcacgtgttttcggagagaccagatcggggcgcgcaaatgaccgtgaaacggtggcgaccgaaaccccggctttgacggcaacgtcggtaatcccagccttcatcagtcaaccccttgagaccgcacacctttacatcctgcaattacaagtatagcggtgcataaatccagtttcggagcaccagtgtacgtcagcgatggagccgcacacgtacctaggtcgccatgattatccaatggtcttttggccggccacccgtcactcctcgaatggttgagctaccggcatggaaccgttggtttctttgttgttctgccattcggatgaccaattgtctacataggctttcttgacggcatcccaatcgcctgtaccctgagaatagttgagcaatgcgttggtgaatccatcctgccaagtacccgaaggcagagagaacgagcgaacatacggcactccattttcctgatactgcaatgcagctgtagtgagcggattgtcaggttggtcctcgggcgtgaaggaggtgaatggggccgagaagcccatatcctggctgagagtcttcttaccttcatcagaagtgaccagccatttgaggaagtcaagagtggcctgctgatccttcttggaacttttcttattcacggcccaggaggcatcgtagattgaagccggaccatagatttcctcgccctcggctccgatatagattggtaccatgccgagatcctcgtcggccaccccgttgcctttgatctgggtgtaggcccacacgccgttttggtagaaggcgaccttgccggtggagaattcggcagtggtgtcttcataggtcttgctggaaagcatcttcgcatcaaccgtggaatcggtggtgtatagatcccacagatttctcaggtcatccaaataggaatccttcacttcctgctcgaaagtggtatcggcatccttatattcccagaacagtggaacgcgggcgagatggtggagatggacatgccagccttggctgccacgtcgtagatagatgatgccatacgaactctcccgagattcccactgccttccgcaagtgattcctttactctacgccctgcatacgagtcgacagcgaagaaggcgtgtttgcaacaacttcgtacgtgaatgtgacgcgaatgatcagatgaaaagcataatacgaatctttttttgaaaacgcttgtaatgctgtatattggctaaaaacataccatttttgacaaatcataatgtatgtgtttacattatagccagaagcacatgagagtcaacgcggaccacatcatgaaggagaaatgagttgatatgagcgaacccactattgacatcaatgccgatatatggtggaaacaggcggtagtctatcagatctacccacgatcatttgccgatactaccggttccggcctaggtgacattcgcggcgtctccaccaagatggactatctgcaggccctcggcgtagacgccgtctggctgagcccgttctatccctccgaactcgccgacggcggctacgacgtgatcgactaccgcgacgtggacccacgcctaggcaccatggacgacttcgacgagatgacgctcagggctcacgaggccggcatcaaagtaatcgtcgacatcgtacccaaccactgttcgcacatgcacccctggttccagcaagcgctagacgcaccccccggctcgccggaacgcgaccggttcattttccgcgagggacgcggcgaaaacggcgaactcccgcccaccaactggatcgacaatttcggcagttcggcatggaagcgagtacctgacggccaatggtacctgcacatgttcacggagcagcaaccggactggaactgggacaatcccgaagtgcgcgaagattttctgaaaaccctgcgcttctggtgtgatcacggtacggacggcttccgtgtggacgtggcgcacgcactggtcaaggatctcaatcgcgatgatcttgacgaatggagcatagacgcatgccacttcttgccctcagacggcagtcatcccgtttacgaccgcaatggcgtacatgacatctaccgttcatggcgtagagtattcaacgagtatgatccgccacgtttcgccgtggccgaggcatgggtgaatccagataggcaatacctctattccagccctgacgagcttggacaaaccttcaacttcgaattcgcaaagcaaatctgggcccgcaacgacatgcatgccgccatcgagaacgggctgaaacaggctgaacgggcgggctccacatccacttgggtgctgaacaatcatgatttaattcgctccgcaacccgtttcgcacttccgcaggtcccggctgacaatggcttatatcacgcattcccacgcgattgggtgttgcgcggaggcgccacctaccgggaggaccgagccaaaggaacgcaacgatcgaaagcagcgctgatgctggaaatgggtttgcccggttcagcatacatctatcagggcgaggagctcggcttgttcgaagtcgccgacatcccgtggaatcgtcttgaagacccatgggcgctgcataccagcggagccaatatcaacaaggggcgcgacggctgccgtgtaccgctgccatgggtggctacagacacccccgaactcgaccatgaaggcgatgaattcggccatgtcggcagacacggcaacggcacgttcggcttcacacgaaccacggacacaaaggatatcagggaaccgcatctgccccaacctcactggtttaagaatcatgcggttgacgcacagtcggctgacaccaattccatgctcaacttctaccgacgggtggtagccctccgacatgaactgtttacctccgacaccacttttgcctgggcggaggaactcgaccgcacgaccggccggccggacggcccggatggcagcgaaggcggagtaatcgcctatcgtcgtcctggcggctggatgaacgtcaccaattttggttttgacccagtcgcattgccccaaggtgtcatactgctctcttccggcccgctcaccacggatggcaaactaccgcaggacacttcggtatggatgcggacgtccgactgaactgtcacacatatcatacgacataatcttaaatttacatttttatgaaaacgtttgtatgattgagaatcataccaaatcattagttttgacaaaaaataatgaatgtgtttacattatgttgcgcggcaattcgtgcgacaaccctcgtcttcaaggaggaaccgatggtgaagaagaaaatcaagttcatcgccgccgctacggccatgcttatgagcgtcggcggtatgtccgcgtgcggattgtccagctccgacaacgataaggggcaagtctactatctcaacagcaagccggaagtcgtcgatcaattccaggaattggccgatgaatataccaaggaaacaggcatacaggttaacgtacagactgcaacctccgacaattacgaatcgacgctgacctccgaactcggcaagtccaatgctccaaccatgttcaacgtatccggctacccaagcttcgccaaggtcaaacagtatcttgagccaatgcagaaaaccgacgtatacggactgctcaccgacgaaggcaaggaagtgacgatgtcagacgacagtaacacgctcacaatcccctttgtcgcggagtacaacggcatcatctacaataaaaaaatcatcaagaactactgcaccaagagctacgcaaaaatcaaaagcgacgctgacatcatcaactatagcgtgctgaagagcgttgtcgaagatatgcaggcgcataaggatgacctagggctcgacggcgcatttgcctctccgggacttgacacctcaggttcctggcgtttcgacgatcacatggctcgcattccaatctccgcagaattccgcgatgaaggcaaaaccttcgctcctgaaatcacaggtaaatatatcggccagtacaaggacttcttcgacctacaagcgaacaacagcccgactgataagaaaatgctcggctcgaagatcaacgacgaggttgtctccgaattcgcacttgggcgggtcgcgttcctgaccaacggaacttggacctacactcagctcaaaggcaatgacgtcgccgacgatgatctcggtatgcttccttactggatgggcatcccgggcgaagaggattacagtgtggtcgccatctatgagaaccaatggggcgtaaacaagaacgcttccgataaggacaaaaaggctacgctcaacttcatgaagtggatggtatcctcggacacaggcaaggaggtcatggccaaggagatgggcttcgccgtaccatataccacctttggcgacgacgacaagcctaacaatccgctgatagctgccgcgcaatcctacaccaaggcaggcaagaagaccatctacaacatctacgttccagatcaggaatggaagaatggcatctgtggcacactgacagaatatgtgcaaggcaccggcaagtgggatgcggtcgaaaacgcattcgtcgacggctggaagaccgaatgggcaaataacaaaaaggccttgggttcactgccggagtccaaggatctgaacagttaagaccttctcattgccataagcaaggcgtagacagtgcggcgatcggaaatcgaattccgatcgccgcatgtggctgtgcatgaacggccatacagacgcatgagtcatactcacgattcccgacaaaacgcctcgccggatctcgaagtcgtgctggtacggaacatcaactgcacaggaagcgtttcatgtcggcactctacctgttcaccacgcagcaatgcaagagtgcgccgtgctgcaatcacacccatatcatgaggttgctgacgaaccgtggtcaatccaagctgacgtgcatagaaattatcatcaaatccgattacggaaacatcgtgcggcacggcatacccctgttgctgcaacttaacatacagcggcacggcaagcgaatcctgctggcagcagatggcagttggcatggtaggtaatgtaaacagttgcgtcaatgcgttgtcgacgcgctgctcatcttctgctacgctcaacacaatcggcgatattccggcagccttacattcctttcggaaaccggcgacgcggcggcttgcgctgaattgcagatgcgactggttcgtatgagtcaatccaatgaaagcgatatttcgatgccccaatgtaataaggtaccgcgtagcgagtcgcatcgcctgctcatcgtcgatggaaacagacaacgtaaaggcgctttcaggcaatgcattaatgccgacaagcggtaggttcgcactttgcaaacgactcgcctcatcagggtctatgtcgaaggagggaatgattacggcatcagcgttgcggcgaatcggtaggttctcgaaaaaagtgcgcctgtcttccttggtggagatggggtagacggagatgtcgtaaccggccggattgaacactgcatcaaggccctcgtaaattcgtgcgttgaaccatgatgcaaagcgatcgttcagcaatagggcaatacggtacgtccgcccggcctgaaacacagtggcggagcgagagatcgaaaaattcagttcatttgcggcagccagaaccttgtcacgtgtcttcttcgctaccacgtcaggatgcttgaaagtacgcgaaaccgtagcgatggagacaccagccagctgcgccacgtcttcgatattggcctgcatgcgcactccttgcatatgattagcgccgtcctacggcgattgtctcattatatgctgaatgcgtttacatcattgtcataccgccgttatgacggctgattgtgccagactgctgcaaatgccggtaggcaaccgaccttccatccgatatgtcttcagcagttccaacgctctatgacattgtcacccttgtactggctcaggatgcagtaatgcgcggtatcgagccgcagcagacgggcgaaatgcgggtcgacgcccaaccattgcgaagtaaggatgcgcagaatatgcgcatgagccaccagcagcacatcgtggccgacgttcagcaacggcaatacccgttcgatggcgtcccgggtacgcgcggcggcctcctccacgtcctcgcccggaccgttatgcaccggaacctgctcgccggacggcaatgtctcaatccaatcgccttcaagtccggggttcagcgagcgcggaccatcccgccatacgtcccaagcgaaaccgctggcctcgctgacctgctggcgtgtgcgcccctcggcgcgaccgtaatcccattcggcgatctcgggcaggatcctgtaatcgccgtaaccggcgagcgccgcggtctggcgggcacggcgaagcggacttgcgaacatgcagcctggatcgaaaccgttcgggaaggccgaacgcaaacgctctcccgcggattcggcctgtagccgaccggtgtcggtcaatggaatatcagtgcgtccggtatgctgaccggattcgctccacaccgtctgtccgtggcgcaacagcaccaagcgtccgggcgcaacaacggaagcgtccttgcttccaacatgattttcagtcatatccctactctaaccgaccccgcccatgaacccctgcacttgctccttcgtgtcttcggaaatcgcaacatcattccgctacgcgcttcgcccatccggatcggcaggaaagcacgtcgatcacgcattactatggaaccatgagtgaaacgccagatctggaatctacagcggaccgtgtggtagcggccctgcgcaacatcgacgggaaagtgaacgccaagcgcgatcagagactgaacgatcccgattccttcggtgacaaaatcttcaagttcgccatgcctacgctggtcggactggcgttcggcaaggtgttcgagatggcgtggaagcagagcgttggccgcaaggcgacccttcccgacggcaccaccgacgcacgcaaggacgccatcctcggcatcgccttcgccgtcatctccgcagccttgggcgcactggtctcgcaactgtccgaccgcggttccaaggccatcgtcaaccatcgccacgccaagcgcaggtagcacgatcatcaccgatcgtccgacttgccctccgggaagatgatcttgtatacgaagaagtagatcaccatggacacgcctccagtgatgaacgtgaccagcagattgtatacggctggatcgaaccgtgcctgcgccaacggcagccacaggccgttgatggcgttgcagaacaatgagatcagcacccatgcgatgaagtaccacagtatctgatatgccacgttgccatgtgatttgaacgtcacgttgcgttgcagcgggaagttgacgcactgcgccacgaatgatccgatctcatagctcaggaaatatccaaggccaccgccgatcaccacttccccggccgcattgcgcgccacctcatagccaagcacattccacgagtagtcgatgcctgcgaacgatatcggaatatgcggccacatgaatgccgtggaggccagcccctcgccaaacagatacggcaggaacgtgaacaacgcatattgcagcacggtgaccgccagactgaacagatagaacacgcctatctgccagacccattttgcggccttcggatgattcctcgcaaaggttcgccaaggattgaccgccattatctcacctcgattcgagccgtggcctcaccgtacggactgcttgccttcacgctgaggattcccgtctcgcaaggcctgatgatggccatcgcctcgccgtagtaggtgtcggcggtatcgctgcgatagctacgctcgtagtatgggcaggcgctgccaaaacccaggatttcgccgttttccacttcgatatgcacgtcacctcgcagtaatggtttgacggttcccgcagcgtcggcatacatgaaccgtacatatgcgagcccgtcaccgagcgcgatgcgctccgcttccggcacggcatgcaatctcgtttccttgcctgccgtggccagtgatgttctcgcgatttccacgccgtcggcgtcatacaccaccgccgtcagactgcccggcctgtagacggccgtgaatgtcacgcgagcgtcacgtccgacacgagctgacccgatttcacgtccgttcagcaagagtttcaccctggcggcacgcgcatatacctccacttgcgtgcgttcaccttcctgaccgtcccacgaccaactttcgaccgcattggtcatcttccaggcggacggcgaatgttcacggccaagaccgaccggcaccacgccgatcgcaatcggtttcagaccgaatgcgacctgagtgtatgaagcctccgccaaaggcttgccggtcaggtcgaatcgaccggcgcccgcactcacccagccaagtgatccgtcgaagttcttggcatattccgcatactcctgcgagccgataccgacttccccgagataatccataccggaccatacgaaatcaccgatcagccgcggattgctctgcgccaaatcccagaatcgcgccgcatccgagcagaaggtttccgagccgacgatcacgcgatccggatatctgttcaggtcatgcctgtatcggcggatgccgtagttgtatccggcaacgtccatcacggcgaacgcgccgcgcgtcttccaatcgcaaggaggcaaggtcgcaccgaacttcatgaagtcggctcccatgatgcctgcgagccgattgaagaattcgctgccgaccgccttcttcttgccggaatgttcgatttccttcatcgctttttcgtcggtatacacgccaagtcccatggatgacaggaaattgaagaagatattgacgccgcaggtcactggtctggtcgcatcgagcccatgcagatattgcgtcatggcgtcggtcagagcgatacctcgcggctgcgcggtttccgacacctcattgccgatcgaatacatgatcacgctcggatggttatagtccttggccaccagatcggccagatcatcacgatagttcgcctccacttcggtgccgtagtcgtagcgggtcttatggatgtaccagccgtccacatactcgtcgagcatcaacatgcccagtcggtcacaggcgtcaagcaacgccttggaacaaggattgtgcgcggaacggatggcattgtaaccgccgcctttcagcaacgccaccttgcgttcctcggcggccggatatgcgcatgcgcccagcagtccgttgtcatggtggatgcagcaaccacgcaggatcacacgttcgccattgatacggaatccccgtcgcgcatcacattccaccgtacgcacgccgaagacctcacgttgctcgtcatcgccgaaccgcaccacacaggtgtagagattcggctcatcggtgttccacaggcgaacatcgggaatcacgcattcctcatgcatgagattgccccgcccatcgagccaatccgacaacgccttgaattgcgccatggacctgccgtcggcatcgagaacgctcacatatacgactcccgggtggctggtgcgtacgtcgaccgcgatgcgtccggtacggtaatcgaccgtcgttatgcgcacgccgtcgggcatgatatgtcgctccggcatgacacatagccataccggacgatagatgccggtaccggaataccagcgacagttcggctggtcgctgttatgtgcttcgaccgtcaacacgttgtcgccttcggctatgtactcgctcagatccgcatagaagccggaatagccataatcatgggaggcgatcagcctaccgttcaatcgtatgcgggcattacggtagacaccttcgaactcgagcagggtgagatcaccggaagatctgcgaatgtcggcggaagagaaatgcttggtgtacaggtagtcgcgagcgctgtaccagccgctgttcactccggatgggctgtcggcgcttttcggatcccactgcatggcgtcgtggggaatggtcaccggcacttcctcggcctcggatgcggccggacggcacgtccagccggtattgaatgggattctgttcatgatggtgctttcaaagacgttcacgaaggaaggtcgtcattcgggcgcaagaacgatcgtggcgccccttcgcccgaacgacgtctgacaaatggcggaaggctggcagcctacttacgtttacgcatgaacgacgacaccatgagcatcagcacggtgactgcggtcagcacggtcaccgtcatgaccggaccgaacaggctctggtcgccgaacatgttcagattcatgaaatggccgacgaacgtatacatgcattccatgacgaacgcacaccatgcgatcatgcctatcgccggcgttacggcaatcagccagtcattgtcaagaggtatggtcgcggcctgcgcaagcacgaccaacacaagcggtgcgatgacccacacgttgtatgagccggcggcaacggcatacatggcgtaggcaaccagtgagacgatggccatcacaccggcggcgagccctaggtaaaagccgatagttctgtcggagaacatggatggagttctgctattcatgatgattcctcactttcccgtcgcggtttcggattcgaccttgaccgtttcccgcgcattcttgcctcgacgtccggaacgccacatcatgcaggcgcagccaagcgtcatcaacgcaaacgccgcatccacaccgaagatcgcgtaacgccaccaaggggtgactttgaccactttggcgttggcatccaacccgttgatcaggctggtacgagtcagcgcatagtggaagctcttcattgaggtgcgcagatagccgagcatatcgccgtcgtcattgtcttcgatctgcttcttgatgcctgcggccgcggtattgcccggatcgatgcagtaggtggtcacgcctgccgccaatgatgacgggaaatgcgacttgtaggagccgccggccacgccgtcggtttcgatcatgcccttaaagccccattcgttgcggatcacctgagtggtcagcgcggtgctggctgaggaccagaccacaccgagtctgttgaacgacatcatcaaagcggtggcgttctcgttgctgacgatgccttccacgcccttgagcgcaccctcgcggaatgcctgctcgttgaagaacatgttcagaccttcgcgatacagctcctgatcattgcctgcaacatgcttgacaccctgtgcgaagcctttcttctgagcggctgaaagttccacgaggttgtcaaggtagaccatgatgctgtcttcggaccagtattcgccattgcgcccgccgaacggagtgcggtgcagattgccgccaccaccccatccgaccggggtcttggcatacagggcttcctcaccgaccagttcgccacgacgttgcatgcgtccgtaatcccaagtgctggcgagcacattggtcgccggatacagggtgacgtcacgggcgtcaccgtactctttggcgtaggtattgccgccgacgctggcggtaccgtcaccagccgcatacgccggtcggttcacggaagccgcttcggccgtgccgaacaaatcggaaagctgggtggtcatctcatcgatggtcatttcgtcaagatatttgttccaggtctcgtcatcgttgtaatcgacgtctttcatcatcacgaacgtcagaccattgtcggctccctgcgtgtagtcgctgacggacttggagtccttggactgccgatacagatcacccttaagcagttcgatcatcttgccggtagcggtcatcttgaccggttcggtcgggaaggtgcctttccaatcggaacgggtcagataggtgacggcaccatccttccaatagttcgcgtcggcatcctcgaaccggttggtgacccgttcgcccgcatcggatttggcataggtcttggtgtcgacgtcgtcatacgaccaccggtaggttttggccgcatccccttccaccggcttgccatcaaagtcggtcataccagtggcgttttcggccgcaagtacattattcaaagcatcatgcgcattgtcgccaatggtgaaatagtagtcaccggcgctcagaatatagcccttggccttggtatagtcatagctggccaacaggtagcggtccaccgtaacgtccacggtttcggaagcacccggctgcaatgtcttggtacggccttggccggcaagctggatggcggatttctcgaccagattcttccgctcatattcaccatacggggtctgcgcatacagttccactacagaggcacccgcaatatcaccggtgttcttcaccgttaccttggcggtgaattcatccttgtcacggtcgtagctcacaccgtcgagcgtctgttcaaaagtggtgtagctcagaccgtacccaaacggataactgacttcgtccgcatagttccatgccgaggcaccatgtgaagctccgaccgagctggccgctccgctgcccggattcgtcacggcgtccgcgtagcgggtctcatagtatttatagccgacatagatgttctcggactgtacggtcacattatcgatattgaccggcttatcgctgactgcggcgttcacttcatcgacgttcgtccattggtttgagttctggctggaagtgtgcgcggccggcgacgacatggaatcgacggcatacgtgtcggtcaaacggcccgaaggattggccttgcccaccaacagattggccactccttcgaaaccacgctgccctggattgccgatccacatgcaggcatccacaccgtagtcatcaagccagccgacctccatcggaaaggcggaattgagcagcacgatggtcttggagaacttgccggaatccttgatcatctgcagcaggtccttctcgtcctgatgcagactcagagcactgatgccctccggatccttcatcatcatctccttgtcttcaccgccttcacgggcaagcatgacgatggcgacatcgtggtaatcgtcctgccagctggccttgagctgatcggtatagaacgatgccggctcctcgccaagcaccggggcgtcattcaacgcgccattcgaacgtggatcgccggaaacctgcaggttgttgctggccacacgcttggtatcgctcttcgaataggcttcaaacagagtgttgttcaccgagaaaccggcatgttccagtgcggatttcagatcaatcacatatttgccggtgtcggcggcactgttggcgccacccgggctgtagaccggctgcaccacggcgtggccgaacaacgtgacatgtttgtctgaggcaagcggcagcgtgccgtcgttgttgcgcaacagcaccgaaccctcctcctgctcaagcacggactcgccgtacgcgtcggcgatgagcttctgtagattttcggcattcaagtcgccatattcgctggcgtagtacgtagtgtttccgccgccttcaccggcgacgattctcgtgctggacgttcccagcgcggagttgatcgttcccgcatacatgtacgagcattgcgtcccacagatgccaagcaccagcaatgtgcctgtcaccgatgtgagccctcgccacagcagaccggaattccctttcatctcgactccttcgttgtcacatgttgatatcgacatcaatgtcaattccatggtgtgcggcacggccaccccctaccttcccggatggcgtaactggtcattcccaggggcataactggctctttcgccattcgacccgagcatgtgacgtttcctataatggaatccgtcgcaatgaggaggcatgaacaccgtgaggatcgcaatcatcgacgatgacgccgacgaacgcaagaccctgcaggcatcgttcgaacggcttgcgcaggagagcggatccgcaattgtcatcgtcgaatttgccggcgccgatgattttcttgacggctacgaccgctccttcgacctggtctgcatggatatcgacatgcccggcactgacggcatgtccgccgcacaacgcctacgtcagatggacgccgacgttccactggtattcgtcaccaacatggcgcagatggcgattcatggctatgccgtacatgcgttggatttcatactcaaacccatcaactactactccttctccatcaaaatgcgcggtattctggcactgatcggcaatcgtcgtaggaaatcgctcgtcttcccgacgacggacggttttctacgcatttcatccgacaatctctactatgtggaagtgcgtgggcaccatctgtccttccacaccacacaaggcgtcatccggcaacgtgactccctacgcaactgggaagccaaactggagggattgccattcgaacgctgcaataacagctatctggtcaatctcaagcaggttacggccgtggccaaggactccgtgcaggtcggaggcgactggctgccaatcagccgaaccaaaaagaaaccgtttatgaacgcactcaccgaatacatgggaggcaccagcgtatgatcgaccacgcctggctgcaggtttcctacatggcacagatcatcgtggcctgcctactgttcatgattccggtcgcaaaacgacgtcgtttccccgcacgattcgcttcatgcaccattgttctgccaatgatcgcctatatgttcggcgccgccgtcacggtacccgacaacctgctgttggccatactgtattggcctgcattcgcggtcatatgccttcccgcagtggcgttgtgtctgcaggcgggattgtcggaagtactctactgcaccatctgtgcgaacgccacgcagcatgcggccaacgaatgctatctggcgctcagcatcgcactcggacgcacaacgccggatctgcccacgctcctcaacggactgttgaccacggtgatctatatcgccatctacggcgcgttcttcatcatgtttgcacgcaaactcgcagtgcatggacattatcgggtgaatcgcaatgacctgttccccatggcctgcattctgctgttcgtgtgggtattgggcgtgttgtgccatgatgatgtctcactccatggcgtggtctaccacgtcagtgacgcattatgctgcttttacatcatgtgggctcagcgcagcaatcatgacaaggccgaactgcagcgcgaactcgacggcgtacgatacacgctgctgcagcaacagaagcagtatacggtcagccaggagacgattgacatcatcaatcgtaagtgccacgacctgaaacatcagattcgcacgctgcagaccatgcaggaaagcccggagcgtgacgcatacttcgccgaagccgaacgggcgatcatgatctacgacacccgcatcgacacaggcaacaaggccctcaataccgtactgatggaaaaaggcctgtactgtcaatctcacgatattcaactcacctgcatgccgagcggcgattcactggacttcatgcaggtcgcggatatctatgcactgttcggcaacgcgctcgacaatgccatcaacgccaccatggaactgaatgacccatccaagagggtaatcaacgtacgcttctcatcacaaggcaacctgatgctgattcagattcagaactatcatcagcgtcggctgcgttttcgtaatggcctgcccattacgacgcatcaggatgccacccgacacggattcggcatgaaaagcatgctgcacacggtcgaacagtacggcggcaccatgcaggtggatgataccgacagtgtgttcacgttgcggatcctgctgccgaagaatccggaatcctctaccggctgaaccaaggcatccttgcgtaatcctgcaaaacggacgaaaatgggtgacatgagcaatcttcttcacaatgccactgttgacactctgctggaacgtcgttccatccgcaaattcaagtcgaagccgctgggggatgatgtaatcgaaacccttgaaaccgttgcacagcatgcggcgagcagccagttcctcaatgactggtccgcaatccgcgtgaccgatcccgcagccaagaagcgtctcgccgaaatcggcggacagccgtatatcgccaccgcgccactgctgtatgtgttcgtacttgacgaacaccgcaatgccgcaatcgcttccacaaagggcgtagataccacttccgacacgtttacgctgaatggcagttaccgctactcacaggcccagaacgatgccgtactggccctgcatgcgatggaaacggccgcatactcactcggccttggctgcgtgattctcggctcgctgctgaatgacgttccggcgctgatcgatctgctgaatctgccggaatacacgtaccccgtgttaggccttgccatcggcaagccagatcaggatcccgacgtcaagcctcgcatgccacgtacgatgcaattctttgagaacgagtatccggagagcgacgaaagcgtgctgtccggcttggctgagtttgacgagaaagtgcaccggtattacgacttgcgcaacaccgaccgtccggttgatgcattcagcgatcagattgcgtccaacgcagtcgatgaaggcgtgaacggtaagaccgtggccccgaacgccaaacgtcagggcttccgcttggaccgctaggcttcactgcctcaagctctcgggcttgtgtcctatactttttgccatcataatgattgtcctgttcggttttcgccggacaggacgcatgttttttaacgacgaatcagctatgcgccttccattgtcgacgatttgctgaagcgtagattgcgccgaaatcggatttgaacgactattttctgcggggcttgtagcctttcttgcgggaatggggcttgagctgttggttgaatggcacatatgtgtagttggattgtggatcgcgatgcgtcagatgccatgttccgcagaattcgcaacgatatacccatagctcggtgccgcgttcacgccaactttggtcggcagcttgctgagccgttgctttgtcgtgatacatgatcttgttcgactcggtgcaacgtttgggtacgaaatagtgcataagcattcagtgtatccatgcattcagatatgcagggaccgcaggagcggtgtttttctcttggtttgtatcgggatacgcaaaggacttcccggggaccctctctggaacccggtcggggaagacccgtgcgagagcaccggggccgatgaatccccggaaacaaaaaaggtggggtttcccggagcgtcggctccacgggaaaccccgacaagaacgtttgcggcggcgtgttactctcccacaccctgccgggtgcagtaccatcaccgtgccaggccttagcttccgggttcggaaagggaccgggcgtcacacctgggccatggccaccgcaaaaaccaccatcaacggcccggacccccaaaaaaacaggggaccccgaccggccaaaaggaaaaccacccacgcgccgccaccggcgcgtgccgtgacggtccgggaaccggacagcggacgcgaacaccgtttcgtgaccacaggaacaacgctccttgtcgccaacaatcccgcagcagcaaagacgcggacccacccccacacacaagggggaatgggctgctatgtcgccgtcgcccgttagtaccggtcggctccacccctcgcggggcttccacctccggcctatcaaacacgtgttccacatgcgggcttcaggaccccgaagggcccaaggaatcctaatctcggagcaggcttcccgcttagatgctttcagcggttatccctcccgaacgtagccaaccggccgtgccgctggcgcgacaaccggcataccagaggttcgtccacccaggtcctctcgtactatgggcaggcctccccaggattccaacgagcgcagaggatagagaccaaactgtctcacgacgttctgaacccagctcgcgtgccgctttaatcggcgaacagccgaacccttgggacctgctccagccccaggatgcgacgagccgacatcgaggtgccaaaccatcccgtcgatatggactcttgggaatgatcagcctgttatccccggggtaccttttatccgttgagcgatgccgcgcccgtgcgccggcaccggatcactatctccgactttcgtccctgctcggaccgccgtcctcgcagtcaagcccgcttgtgcgattgcactcgacacccgattgccaaccgggctgagcggacctttgagcgcctccgttactctttgggaggcaaccgccccagttaaactacccgccaggcactgtccctgaacgggatgaccgttcgaggtgagacgtcaaacgagaacagagcggtatttcaccttgcggctccgcgcgggctggcgcccgcgcctcgaagcctcccgcctatgctacacaatccgcgactgacgccaataccaaggtatagtaaaggtcccggggtcttttcgtccttctgcgcttaacgagcatctttactcgtactgcaatttcgccgagctcctggtcgagacagcggggaagtcgttacgccattcgtgcaggtcggaacttacccgacaaggaatttcgctaccttaggatggttatagttaccaccgccgtttaccggggcttgaattcaccgcttcacccccaagggggctgacggatcctcttaaccttccggcaccgggcaggcgtcagtgcatatacagcggcttacgccttcgcatgcacctgtgtttttggtaaacagtcgctaccccctggtctgtgccacccccacacgctcccggagcatgtccgttcacccgcgggggtctcccttatgccgaaggcacgggagcggtttgccgagttccttgaccaggattcgctcgatcgccttggtattctctacctgaccaccagtgtcggtttggggtacgggcggcaacgcgcctgacgccggggcttttctcgacggcctggaccaccggatatcgagccgaaacggctcccatcatcgcacctcgccatacacgccgcacggatttgcctatgcgactggctgcgtgcttgaccacggaaaaccacctccgcggccggctcccattccgtgtcacccctgcgctcacctaccacggctacgctcccaacgccacgcgccggaccccacccgaaggaggggaacggcccgcgacggaggttagtactcaccgcctcggtcctgtcggttcgctgccggtacgggaatatccacccgttcatccattcgactacgcctgtcggcctcgccttaggacccgactcacccggggacgacgaacgtggccccggaacccttggtcatccggcggacgggatcctcacccgtctctcgctactcatgtctgcattctcactcccgcaaagtccacggcacggtcacccggccgcttcgccccttgcaggacgctctcctacccggcgcgcatacacgcgccgccgcgtcttcggtggtgtgcttgagccccgctacattgtcggcgcgggaccactagaccagtgagctgttacgcactctttcaaggatggctgcttctgagccaacctcctggctgtctatgcggccccacatcctttcccacttagcacacgcttggggaccttggacgacggtctgggctgtctccctctcgacgacggagcttatcccccgccgactcactgccggcatacacatcaacggtattcggagttcggctgctgttggtaccccacaagggcccgcaagcatccggtagctctacccccgcgatgcaataagccgacgctgcacctaaatgcatttcggagagaaccagctatcacggaatttgattggcctttcacccctagccccaggtcatccccccggttttcaacccaggtgggttcggtcctccacgcggtcttacccgcgcttcaacctgcccagggctagatcatcccgcttcgggtccaggacacgcgactataaaaacgccctgttcggactcgccttcgctacggctgccccacgacgggttagcctcgccacgcatcactgactcgcagactcatttttcgataggcacgccgtcaccccgcaaggaggctccgacggatcgtaggcgcacggtttcaggaactctttcactcccctcccggggtgcttttcacctttccctcacggtactggtacgctatcggtcagacaggtatgcttagacttacaccacggtcggtgcggattcacgcgggattccacgaggcccgcgctacttgggacacgcgatcggaagacggcaagcgtccaggtacggggctggcaccctctgcggccaggccttcaagcctgttcccctggcaagccgttttatgactcccgcccggtccgtcggaaccgggacacgcgctccctcaacaccgcgcacgcaacccccgacgggtatcacgcgcacgcggtttggtctgatccgctttcgctcgccactactcacggagtatcccttcctgcaggtactgagatgtttcacttccctgcgtaccccccgcagaagcctgcggtgccggcccatgacggccggcgggttgccccattcggaaatcctcggatcgaagccatgctggaggctccccgaggcttatcgcatcctcaaacgtccttcgtcggtactgtctgccaaggcatccaccatgcgcccttgcgggcgacacagccaacggccgtgccatcccgcggctttcctgatagcaagattgccagacgacaaatcatcgcactgttcaaatgatcacaaaacgatcgatctcgaaaccaaactcaaaaagaagagtttggcgaaatcgcgataagcaaagggaaaacgaaaccgttctccctcgctcgcgtccactatccagttctcaaaccgccacgcgccacacgttccgccacgcgcccaacggacgccggccaccccgcatgggcatcgaaccgcaccacaatccaagactgtggggtggcggtccgggaacccaaaagcacacccataccacccccggacgggacaggcccatccaagccaacgatctcttccacaccagcatccccacacgggccgtggaaccgttccacgcgcatggggcacacaccggacacgaaccgcgtcctgaactctccgtagaaaggaggtgatccagccgcaccttccggtacggctaccttgttacgacttagtcccaatcacgagcctcaccttagacggctccatcccacagaagggttaggccaccggcttcgggtgctgcccactttcatgacttgacgggcggtgtgtacaaggcccgggaacgcattcaccgcggcgttgctgatccgcgattactagcgactccgccttcatggagtcgggttgcagactccaatccgaactgagaccggttttcagggatccgctccatgtcgccatgtcgcatcccgctgtaccggccattgtagcatgcgtgaagccctggacgtaaggggcatgatgatctgacgtcatccccaccttcctccgagttgaccccggcggtcccccgtgagttcccaccatgacgtgctggcaacacagggcgagggttgcgctcgttgcgggacttaacccaacatctcacgacacgagctgacgacgaccatgcaccacctgtgaacccgccccgaagggaggccgcatctctacggccgtcgggaacatgtcaagcccaggtaaggttcttcgcgttgcatcgaattaatccgcatgctccgccgcttgtgcgggcccccgtcaatttctttgagttttagccttgcggccgtactccccaggcgggatgcttaacgcgttagctccgacacggaacccgtggaacgggccccacatccagcatccaccgtttacggcgtggactaccagggtatctaatcctgttcgctccccacgctttcgctcctcagcgtcagtgacggcccagagacctgccttcgccattggtgttcttcccgatatctacacattccaccgttacaccgggaattccagtctcccctaccgcactccagcccgcccgtacccggcgcagacccaccgttaagcgatgggctttcacaccggacgcgacgaaccgcctacgagccctttacgcccaataattccggataacgcttgcaccctacgtattaccgcggctgctggcacgtagttagccggtgcttattcgaagggtacactcaccccgaagggcttgctcccgatcaaaagcggtttacaacccgaaggcctccatcccgcacgcggcgtcgctgcatcaggcttgcgcccattgtgcaatattccccactgctgcctcccgtaggagtctgggccgtatctcagtcccaatgtggccggtcgccctctcaggccggctacccgtcgaagccatggtgggccgttaccccgccatcaagctgataggacgcgaccccatcccataccgatggaacctttcccggaaggacatgcatccaaccggagcatccggcattaccacccgtttccaggagctattccggtgtatggggcaggtcggtcacgcattactcacccgttcgccactctcacccggaggcgaacccccgggatcccgttcgacttgcatgtgttaagcacgccgccagcgttcatcctgagccagaatcgaaccctccacaaaaaaccatgaagagaaccgaaaacgactctcacaagaaaattgacgatcgccttataaggaaaggcgcatcgcacgaaaaccccaccgtccttcaaggcctcccggccactcgccgaaacacggcgagccgacgatggactggcaatcattgactataaagaagtagtacagatacgctcttgagttctcaaaccaccaccgcaccgcacgggcccccggcaccggccggaaggcgccgccgtcgggcagcaaggaagaaacttacacgcatccgcccccgcacgcaaatccgccccgcaccaccacccccgaaacccttgccccgcaacgcctcccccggcgtgtcgcgaacacgcgccccacaccggcccaccgcccgcaccaccacccacacacccaacaccacggcgtgtcgcaaccacacaacaagagccaaccacccaatacaggaaacccagcggtggtatgtattgggtatgagcaagaaaatcgcagtactgacaggcgcgggtatttccacatccgcaggcattcccgacttccgtggtccggacggcgtttggaccaagcatcctgagcagatgaacgtctacgacatcgacgcattcctcgccaatgaggaagaccgcgaatattcctggcgctggcaaaaagaatcgccagtgtggaacgcacaaccaggcgaggcgcacaaggcgttggtcaaactggaacaggcgggcatgctgacgcttctggccacgcaaaactttgatgccctacacgagaaggccggcaatagcgacaacgtcatcgtgaatctgcacggcaccatcggcacatcgcactgcatgaaatgccatgccaagtacgacaccgccgacatcatggcgaatcttgacaacgagccagacccacactgtcaccgcaaactaccgtacagtggcaatatgccttgcaacggccttatcaaaaccgatgtggtctacttcggcgaggcgttgccggacggagccatggaaaagtcatatcgactggctacgcaggccgacgaactgtgggtcatcggctccactctggaagtgatgccagcggccagcatcgtgccggtagccgcacaggcaggcgtgccgatcaccatcatgaacatggggcacacgcagtatgaccgcttggccgaccgcctgatccgtgacgacatcgcggtggcgctacctcgcctcgtcgacgaaaccatcacggcagagcgcaacaggcagtaactcgagcgaatcgcagaacatcacgtttgagcaccaccccacgaccctacgcacaaagcatggtagcgaatgtaccaaataccccctaactcgccatctggcagtcgtgtgagcactcctgcccgaatcgtcaaaagccacactggaagtatggccatttttcagcatcggcaacgagagaatcttcgagcgtgctcacacggctgccagatggcgagttagagggtattttgctcggctctctacacgttggtggtcccgatccgcagacggatcgggaccaccaacgtaatacccggcgaattcgccgaaccacgagcctcaacgatcagtagatgcgcttgggctggaaaccggcttccttcaacgcctcaagaatgcggtcgatgtggtcgggaccattggtctcgacggtcacgcccaatgacaccgcattggtgtagtgaccggatgccttgaactggtcatggtccaacgcgatgacgttggcgcgctccttggccagtagcgtggccaccttgacgagctggcccggggtatccggcagctcgacctcgaaattcatgatgcggccgcgggcgatcatgcccttctgaatcacggcgcccatggtcacagtatcgatattgccacccgacatgatcggcacgaccacatgaggcccctcagctgaggcgaatttgcgcgagcgcagatttagatgctccaacgcagccagtgacacggcaccggctgcttcgacgacaagtttgtgcttttcgagcatcagcagaatcatctcgttgatgtcgcgttcggaaacggtgacgatgtcatcgaggaactcgttaagcaatgcgaacggcaggtcgcccgggcgctttaccgcgacgccttccgcggaagtgaccacctggtcggcggacatcacacgaccggccgccagcgaattcttgtaggccggagagccttccgggatggcgccaatcacgcgcacttccggtttgaaggtcttgacggcgagcgcaacgcccgcacccagaccaccgccgccgagcggcacgacgatgtcagtgacgttcggtacgtcctcaagaatctcaagggcgatggtaccttggccgcaaatcacttcgtaatcgtcgaacggcggcacgaaaatcatgccctgctcttcggagagcttggcggcatatgccgccgcctcgtcgaacacatcaccgtgcagcaccacatcggcaccgtatgccttggtggcgtcaaccttaagcggcggagtgatggtcggcatgcagatggtggccttggccccacgctcacgggccgcataggccacaccttgggcgtgattacctgcggacgcggtgacgatgcctcgagccagctcctcgtcggtcagggaggcgatcttgttgtaggcgccgcggatcttgaacgatccggtgacctgaagattctcaggcttgagcagaatctcatgtccggtcatttcggacaacgtcggagacggaatgatttccgtatggcgtgcggtgcccgcgagtcgttcggcggccagtttcagttcagctgcgtgatcgcgctgcaatgctttgagaacctctttttgttccatgagcgcaattgtaggcggacgtctgccgaagttgcgggtcatgggccggcatatgggtgacgttgcgtcataccccccgccagtggatgccggatgaataagaacacccgggaggttccgtgatgaacctgccgggtgactttgcagagagttatagggaaagatcgatcagagctgaatcacgactccctcccaacgagcaagctcgccgcgagcgatcgacttcacactacgcatagcatcataggtgctcagcagtacttgtgattcgtttatgccgcccgcaagcaggtcggcgacttgtgttggaacgtcggacgacttgtcagagacattgacgattacgagaatcgtgtcgtcaccgctggtgcgggtgaaggcatacacctggtcatcgtcggcgtccagtagattccattcgccggttgcgatggtcgcgttgttgtggcgcatggcgatgagcttcttgtagaaactgtacacggactccgggtcgtcgaactcttcggcggcgttgatttccacacggttcggattgacgctgatccacggctcggtcgcggcgtcagcggcggtgaaaccggcatatttggacgcatcccactgcatcggcgtgcgtgcgttgtcgcggccgattaatgcgagggccgccatcatggattcagacgattggcatttggcttcctccacgcgctgacggtaggcgttgattgcctccagatcgcgatactggccaagttcggtgaagtgggcgttggtcatgcccagttcctcgccttcgtagatgtatggggtgccacggtgcatatgcagcagcatgccgaacgccttggcgctcagttcgcgtgattcacggtcggagtcgttgccccagcgggacacgacgcgtggctgatcgtggttgcagaagaacaggctggcccagccggcgttttttacggcagcctgctggtcggccatacgggctcgcaggttcctgacctcgaacggtacgacatcccatttggagaccgcctgatccacgccgacgtggtcgaacaggaacagcatgtcgagttcgccgttctttggatcggtgatgtgctcgttgcgagccggggtgacgcccggagcttcgcccacgttcatgaaaccttcacggccatcgaagacctcgcggcgcatttcggcgaggaattcatcgatgcgcggaccgtcggagcagaacgggaacgggctggagtagccttcctcaccgactggattatcggcgatttcggagccttcctcaccgggtagtttgccgttggcgtcgatggttttggagatctgcgtgatcacatccatgcggaagccgtcgatgccgcgatccatccaccagttcatcatcttgtagacggccttgcgaacctccggattctcccagttgaggtcgggctgcttcttggaatactggtggaggaagtattcgccgcgcttcggatcgtactgccatgcggaaccgccgaagtaggagccccactggttcggttcggctcccggcgtgcccggctcgtgccccggcttggcaggccgccaccagtaccagtcggcatgtgggtcgctcttgtctcgcgaagcctggaaccaagcatgctcgtcggaggtgtggttgacgaccagatccatgatgaccttcagcccgcgcttatgggcttcggcgagcagctcgtccatatcttccaatgtgccgaacagcggatcgatgtcctgatagtcggagatgtcgtagccgttgtcgtcctgcggggatttgaagaccggggacagccacagcacatccacgccgaggtcggcgagataatcgagccggccggtgatgcccttcaggtcgccgatgccatcgccgttggtgtcttggaaggagcgcggatagatttggtagaccaccgcgttcgcccaccaggggttcggggtggcgccgttggaacggacggcgtcgggaagggtggaacgattgaaatcagtcatgttcgtgagctcctttgctactgtgtcggggcagaattcctaactactccatggtaagtaagtcattttttctttcttgcccacggcgcgtttcgcaatgcaggaaatgaatgtttttcagcggcagatataccagacggtggattccggcggcacttgatgcgaatcggcattatggtcatcgtcggctcgtgagcacagcaacatcttcgcctccgacggcagcgtgagcatcgacaaaggagcgcggatttggcagacgtccgcgttgaacagcaccacgtcggtctgatattggccgacgaatgcctgcaaggcacctgccatggtgcgtttgcttggatcgctctccaacgctacggccagcaggaactgattctaggtgacaaggaacgtcagaatgcccggcgaggagatggcaggcaacgcgagaggcaactggatcaatcggaaggcgcgaagatgaccggcgccatcgatggtggcggcctccatcaggtcgcgtggcatcacgaataggcatgccatgccctgatatgcaaaagcgggaatccccgaaaacgaggattcccgctcggcgctgtgaagtgttacttcacagcgtcctgcaactaaggaccacgcttcgcgcggactcagtgtctacctcacggggctccacctcgcagcacgactgctcggctcgcctacggagagcccacagggctctccgtttcacggctcgtcccgctcggcgctgtgaagtgttacttcacagcgcccctcatcacgccgccgacaacccacttctgggcgaagacgtagacgatgagcaccggagccatagccatcaggtaggaggcgaaggccatcggatagttcgaggtgaactggctctggaacacgtactgtgcgagcggaatggtctggttgctctgatcggtcagggtgatcaacggcagcaggaagtcattccatgcccacagtgcggtcagaatcgcaatggtggcgttgatcgggcccatcaacgggaagatgatcgtccagaaaatgcgccaggtcgaagcgccgtcgatgcgcgccgcctcttccaacgacaccggaatcgaacggatgaagccaatcgcgatgaacaggttggtgccgatgccgagaatcgtgtacagcacgatcaggccgagctggttgtcaaggtgcagcgaacccatctccttggcgatcggcagcatgatcacggtgaacggcacgaacatcatcgccaggaagaagtaatacaggaagcggaagaatcgcttatccatatttcttgcgaccgcgtacgccacgaaggtgttggtcagcagcgtcagcaccaccgcgcacacggtgatgatcgcggaattgagcgcggctttcggatagttcaccttgttccatgcatcggcgaagttatgccattcccaggaggtcggcagggtgaacgtgcctgcctcgcccggagtcttcaacgcggtgaccacggtgaagtacagcggcaccagcacggtcaggctgagcacggccacggccgcggtgagccaccagttgatgttgtgatccttgcggatcttctccggcttgccggaggacgcggcggtctttgccgcaacagttgcgctagtcatgattgcttccccttactctctcagaccttttccttgccgctgaagaacttcagctgcacgaatgcgaggattgccagcacgatgaagaacgtgaccgcgttcgccatctgataggagtattcgccattgcccaagccgttctggaagatcaggtacgacacggtttcggtcttggaatccgggccgcccttggtcaacgccatgatctggtcgaacgcgccgagcgagttcttgaggctcagaaccatgttgatcgtgaagaaggggccgatcagcgggaaggtgatctgccagaagttctgccaagcgttcacgccgtcgatggacgccgcttcgtagatctcgttgtcgatggtctgcagacccgccagatacagcagggtggagtaggccacgccctgccagattgacaggaacacgatcgggaaccacgccagatcaggattggagatcatcgatgtggacagccagtcgatatgcaacgcctggccgagctccggcagcggagtcatgaagatgtacttgaacacgtagccgatgaccagcaccgacagggtgtacggaatgaagaagatcgcacggaagccgttcttgaaggcgatcctggaattcagaagcaccgccaggaacatgccgatgaagttcgtgccgatcgtgatcagcaccgcgatgaaaatcgtgaacatgtaggcgttgcccacacgcgcatcctggaacatcgcgatgtagttcttaaagccaatgaacttgaaatcgccatagccctgcgagttggtgaacgaatacgccgcgccctgcaggaacggccagtacaggaagatcgccaccagaatcgcggccggtatggtcatccagtagaacgccggatcgaccttgcgcttggagaatttcgaaacctttttcttcgcaggcttcattgcagtattgccagtcatgtccgtgcctcctctcacctgaagttcctagcttcgatcttgtcgtattcggactgcatgctgttcaggaatttgtctttgtttcccgtctggatcaacgtctgcaggaagcctgcaatgttgatgctggccggcacatagtggtcgcagaagtcggtcagcttgcctgccttgtagaagctcagcacgccgttcaacgcgtcatcacccacgtaggtgtccttgtacggagtgaatgcggactgctgcttggagtagtccttcacgttctcctcgctcatgaggaagtccacgaattcgcgcgcctccttctcatgcttggtgtgcgcgcccatggtcagcatcacgtcatcgccggcggtgagctgctgctccttgacattgtcggtggccggcatctgcgcgaagcggaggttggccttcttgttgatcaggcgcacctgtggaatcgcatatgtacccagcggcagaattgccgctttgccgcctgccagatcctgcgtggcctgctggtaggtgacggccggattcttctgcgtgtagttctgatagatctcaatcaactcgtcgctgaccgtgctccacaggtcggagaacgtcttggagccatccttgagcttgctgtattccgactccggcaccagcgtggagttgagggaagacagcggggcctgcagtgtccacggatcggcggtactcgcttcgataggcgtgatgcccttcgccttgaaccgcttgagcagtgcgatgaattcgctccaggtctgcggaggattgtcggggtcctcgccggcagcctcccacacgtcggcgttgatgatatagccgcttgcgttgccggcatacggaatggcgtacagacgcttcttggactggtcctccgtctgcaccaggctcttggcgatcttcaccatgcccggattaagcttatcgacgatttcgtcatcggtgaagtcatggaacacgcccgcttcggccagcatgccgtaattgatgtcgccgttgatggtgatgacgtcaggttcacggtttttcaccaagcgcgtacgcaaatcggtggttgcgtcggaggaattgttgacgttgatcttgatgttgggatgggtcttctcgaattcgcgggccttcgccgtgaaccaatccgcagcctcggctttgaattggaagaaatccaacgtaacggttcccgcggtgctgttgccgcagccggcgaggccggccgtaatcgcaactgcgcatgcagcggtgagcgcacggtatgcaatcctcctgatcttgcctacactggttgtggaatcaggtttcattctcgactccttgctacttccttgtttgcggcaatcgcggcatctttaccacgccgccgttatctaggatgctagatggagacggttttcattcccagcgcctgcgtgccctcggccagcggaaactaaacgtcgagattttgttattctgagaaagtaaatcggcacgaaggaacgtacacatggcagattctcctcttccacagtggttcgacggctcgagctatacccacaaagtggcggccagcatcatgaaatacgggccgatcgcacgcatcacgctagcgcagatcctcggtctttcgcagggagcaatctcgcgcatcaccagcgatctgatttacgccggcgttgtcgaagagactccgatgaccgccgatcagacgggcaaattaccgagaggattcacgacgaaagagaacggcgagcgtcgtggccgtccgcagacgggactgcgcatcatcacgaatgcacgcacgttcgtgggcatcaaattgaacgcctcgctcgcttccgccgtggccgtgaacgcaggcgggcatatcatcaccggctgccacgagcaagcgattgacgatgcctcgccggaagtcgtggtgcagatcatcaaacggctgatcacagactgctccagcgaggccgcaatggccggatggccgaagccttgcgcggccggcatttcgatcggcggccacgtggtgaatgattcggtggtaacgttcgcgccgttcatgcactggtcgcaaccagtgcatctttcgcagatggtacatgcggccaccggactgccgaccggcatctacaacgacatcgattcgttgctggtggatgcctgctggttcggctcgggagtgggactgagcagcttcgccgtgctcacggtcggggtgggcgtgggctattcgctggcgctgaacggcgaactggtgaactgcccggacaaatcctacggtctggtggggcatattctggttgatccggaaggtccacgctgcgtatccggccacaagggatgcgcgcaatgtttgagcgacgactccatcgtggaggaatactcccatgccatcggccacgtggtcacattcgccgatttcgcccgcgacgccaaagcgaatgtgccgcaggccacgaaactcgtgaaccgtacatgcttccggctgggaacgctggtggcgacgatcgcgaacatcgccatgccggagaaaatcatgattgcaggcgaatcgtcgttcatcgcccagcttggcatcgatgacctgcgcaacggcatcaacaactatcggcacagccaggccgcaccggtggatttcgagattcccgaccacgactgggcgctatgggccaaggccgcagccgctcaggccatccgtcagtatgtaagctaacgtgattcccgctcgaggggagaaccgtagcgaaaaatgccgcaccgcaaaatctcaagtcgacatacctggctgatgccgagcctgcacggtgtactcgtaacgatatgaccgtgcacgcttgccatgtgaggtgcttatagcgggtcgtgcgtcccgcaacttccttcgagccgaattccctaaacccatacccttggaaaatggcggtttttatgagcagttcagaccgtatcgacctaggtaccatgcccgattcgtcacaaagttcctattcgcggatcgtgtttgcatgaatcgccgcaaccgaacggaagtaccctcttgcatccatggatatcatgcaaaacggcttcctccgaatcgaaccgcactccatcgatcatcctcaatccgacaatcagcgcggcgcaatcttcgaaagaagccgttaagcaactttaggccgtcagatttccacgaccttgaacaggacggcctgagcggggtggagggacggcgggcgaatgccgtaggtctcgagcgcacggccggtcatcttcacgccttcaggattccaccagccgagcgggctctggccattggtgatgtcctgcttgatcagatcgagactcacgtcaagcggtgacacctcgtacaccttgtccggatcgaggcctggcagacgcaccggtgcggctgggtaggtctgcgaagtggtcagttgcgtgaagcggtagattgcggcggccttgttcggcatgacgcaaccatccacgcgtacggccggatcggcggcatcggaatgcaccaccgtatcgacggcgaaccattcacgatgctttttgaactcggcgacccattcggcaagcttgtcgatgtcggcctgcggctccttaagcaggttccattcgatgcccatgtgcccgaagaacgccatggccatgcgcaactcctgcgaagtggcacggtgcgtggaatgtgcgggggaagcgcccacatgttcaccgatcatctccggaggcacgagcagcgaggtgtagcgttgaatatcggcgcgttccaccggatcgacacagtcggagccccagatacggtcggccacttcgaggatgccgagatccacacggccaccgccagaggagcagctttcgatttcgagccccgggtgagcggccttcagatcggtgaagatcctatagacggcaagcgtctgctcatgcaccgccggacggccggaatacggcgaaacggcttcggtgacgagcttgttgtgatcccatttgatgtaatcgatgccaagttcgccgacgagcttgtccatggcgccatacacataggcataggcgtcgggattggtcaggtcgacgacctgctgggtgcgcccctgcatcggcagacgaccggcggtgggcttcaggacccaatccggatgcgcgcggaacatgtcggaatcggggttgaccatttccggctcgaaccacaggccgaactcaagacccttgccgtgcacatagtcggcgagcgccttcagcgacttgtcgccgtcaggccacacctcctgcgaaatctcccagtcgccgaggccggaagtgtcatcacggcgggagccgaaccaaccgtcatccaccacaaagcgttccacaccactttccacggccttgtcggccagtgcggtgagggtgtcgtagtcgtggttgaaatagacggcctcccaagtgttgaggatgaccggacgcggcttgggggcaatgccgtgcttggcgttccagtcgcgatgcgcgttgcggatgaacgaatggaatcgggaggcgacttcgttgagtccctcgccaaaggatccacacacccatggggtcgtgtattcttcgccgccgaccagcgtgatttcaccgccgaaaagcatttcgccgccgccgagcataccggtggtgtaaggcagtcgctccgcggagagcacgctgttgccgctccatgcgacatgtgcggaatagacgttgccacgggtgaatccaaagccggtttcgccgagggaaagcagcagggtcgcatcgaaatcagggcgaccggtcatcgagaccttttcgaaacgaccgacggtcagcggctgacgttgcggcgagcgctcacgcagatgatggccggtggtggtgaggatttcggtggcgtcggccggcacggggaagccaagttccaccttgccgacttcgagcaggccgtcgccggtgttgattacggtagcctgctggcgtacgagaccgctcacgtcgatttcgcaggtccagatgagtttcacaccctgttccacgtcttcggcggtggcggtgatggtcggcgtccgctttggctcggaggctacgttccactgtggatagccgttcttcacggtcatctcgtagacgttgccgtcttccacggtttcggccttgatgtcggtgacggcgaacttgcagaacagctcgcggccgtcgcgacggatttcaaaacgcttggcgccgatccaggattcggattgggtcggcagcacgctcggccatgcggtgtagtcgagcgcaccggagacgcgttgcggacgcagggcgtcgtatagtccgatcacggtttcaggggcggacagcggacgaccccaatacaccagtcgcggcagctcgctaccggggaacacgatggcaagggccacgccgctggccgactgttcggcatagacggcggtcagtgcagtaccgtcggaagcggatccttgaaacgattgaatgagcgtcattgcaacatcctttgatatgcgagtgattccttatatgacgttttcgatgctacggcaaccgtttttccttgacccaccgcagcgtgtttcttattttcggaaagtaattcgaacgttcgctacgattccatacggcattccgtggggacgattcctgtcagcggattcgtttgtcggtgaaaaaatccgtgaggatccgcgcacattccgattcgtgcatgccgccgatgacttccgggacgctgccgatatgcggatcacggggaatatcccaaaccgagccgcatgcaccaagcttggcatcccacgccccgaagacgatgcggccgatatgcgtctgcaagcaggcgccggcgcacatcgggcaaggttcgagcgtgacgataagcgtgcaatcggcaaggttccaagtaccgagtgcatgcgcggcctcagtcatggccttgacctcggcatgggccaacggatcgcggtcggcctcccgcaggttgcgaccccggccgatcacctgtccggcggcatccaataccacggccccgacgggtacctccccttcggcggccgcctcacgtgccaaccgaagcgcgacttccatacctgcatcccatgccatgcctccagtgtacgaaacacgcacattaataccccttggtagtctggattcggcggggaaatcacgcgcgaaggaggcacgttggcagtattcgaactcatcctatgcattatcgctgccgtcgtattgtcctcattcctcagccgctttattcccaaggtctccaccccgctcgtgcagatcgcattgggggcattggccacgcaaatgccgttctttccggacgtcacgctcgacccggaactgttcatggtgttgttcattgcgccgctgctgtatctcgaggcgcatgaaatcgacaaacgcgagctgctgcgctcagtcaaattgtcgttgtccctagccatcggattggccatcgccaccatggtggcggtcggtttcgtcctccactccatatggccttcgatcactctcgccgcggcccttgcacttggtgccgcactgggacctaccgatgcggtggcggtatcgtctcttggcaaggaggccgcactgacacagcgtcaggctggcgtgctgaagggtgaatccctgttcaatgacgcttccggcatcgtcggcttccagttcgccatagcggcggccatcagcggagtctttgaaatcggtcagtcggcaacgcaattcgtcgtgtcgttctttggtggagccattttcggcctggccatgggcatgatcgccgatgtgctgttcgaatcgctgcgttccgtcggttgggagacgaccaccagcagaatcctcatggagctgttcctaccgttcctgctgtatctgggtgcggaagcggcgcatgtctccggcattctcgcagtcgtcgccgccggtctgaccatccgcttcgaccataccggcatcggaccgaacgtggcacgcacgaacatcgtatcgtcaagcgtatggggcgtactgtcgttcacgctgaacggtaccgtgttcattctgctcggcatgctgctcccggatgcgatgagcgccagctgggatgatccgacggtcagcaactggcggctgctgatggccatcctgaccgtttccgcagtggtgatcgtcatgcgtttcctatggatttcgctcatgctgcgcgtcgcccgtgatacgaccacgcacaagcgccgcaagatgacgttggcacgttggcgatcggccgccgtcatgacgttcggcggaccgaaaggcaccatcacgctatcgttgatgttcaccatcccctacaccgtcagcagcggcgaatggttcccgatgcgtgacgagctgatcttcatcgcgggtggcgtaatcgtggtgacgctgctactcgccaacttcctgctgccgttgctcgcgccgaaccgcaataaagacgcttccgtggagatgagcgaaatcaccatcgaggtgctgcgtcgaaccgtagaggagctgacggggcgagtcacgcccgacaatcgcaaggccgtgctcatgatcatcgattcctacacgaagcgcatcacacggcttaagcagcgcatcggcgaaaccgacccgcagggctacatgcaactgcagattgccgcgctcaactgggagaaagagtatgtgaaggcgcgattggccgacgtgaaggcgcatccgagcgagaacaaggcggccaacgacttggaagccgaagcctgcgaacgtctgctcgatcagatcatgaactcgttgcgccatatcgagaccgcccatgattccggacgcaccatctggcagctgaaaggccggttcagggcgctgcaacgccgtacgggcatgttcgtacgccgcgtgaacagcaagattcgccgcaccacgccgttgttcagcgacgacgagctattcgcccatacgcgcaccgtgcaggtggacgcgatcgagcacgtgatcgatcgactgtatgaggagatgggcaaggatacgtacaacaccgagcattgttccggcctgttgctggattaccgtcgaggcgaggccgcgctgcgcgcacgcccgaatgtgggcgacagcgccgaagcacaggcgcaggccgaagaggtcaaacgcgagagctacggcatcgagctcggtgtgattcaggacatgtacgaagcaggcgacatcacccgcgcacagtccaagcagctgcgccgcaacgtctacgtgatgagcgtcgacgccgatgcccagatctgaattctgcactacagcgagcgagacgaatccgagtcgaagaatccacaacgatatccgagattcgcaattcccagaaagttcacagaaaacctcagccatgcactcagaaaggactgcttatataagaagcatcagcaaacagcagctggtcaggagccacatcagttcccgaaaattgaaccctttcttcttctctctcctttctctccccggtggcgatcccaccggggtcttcttttttccaccggcaacattcagccatcgcgtcgcgcgctatattgagaggcatgaacgaagcactcgaaggcaatctgatcggacgcgaatcgaatgtggtaccgggccgtttcggcgagccgttgcaggtagcatacgcgcagtattcacctggcggcggctgtgcggccccacggcggccactgttcctatgcctgcatggctggggctcgaatgaggccgatcttgccgatatgatgcgctacgtcgccccatataacgatttcgcctcgctgcgtgcaccgctcgtgttgcaagaggccggttcgggcgaattcggcttcggccagggcgcctattcctggttccatgattgcgtaccttccggcgatgatctggaccgcgatgcgttcgctgcggcgagcgcgattgatgactgggtcgccgagaacgttcccgaagaccgtaccgtcgtgccgattggcttttcgcagggaggcctgcttgcgattcatctgctgcgggtccacccggaacgctatcttgcgtcggtttcgttgtccggtttcctcgcgccggggtccgttgccggtaccgcgcccgccgatgatcgtctggccgcgctcaacgtaccggttttctatgggtacggcaacagcgataccgtgattcccaagccggagatcttcgccaccgccgcctggctggacgaacacacgttcctgactgcgaaaggctaccgtggcctcgaccatgccgtcagcctcgatgagttcagcgatctgcgagactggctggccatgcacgacatcgcaccaggcgtgctgtagtccggcgaggtggcagggccgccccgcgttatagcggcaacgcgctagactgatggacagtgtggtttttgcgcgcgaagagtgcgcggttacgacttgaaggagttttgatgctgctgtccgatcgcgacattctcgccgctcaggccgacggtcatatctcacttgatccgtggactccggaaatggtgcagccggcttcgatcgatgtacgtttggaccgcttcttccgcctgttcaacaatcatgcgtacacgtatgtcgatccggcggagaatcagggcgagctgaccgaacagttcgaggtcgctgcggacgagccgtggatcctacacccgggcgagttcgcactgggctccacttgggagtacgtgaagctggattcgaccgtcgcggcacgattggaaggcaagagctctctgggtcgcttgggcattctgacccattccaccgcgggattcatcgacccgggcttcgaggggcatatcacattggagctatccaacgtgtccacgttgccggtgaagctgtggccgggcatgaaaatcggccagatgtgcttcttccggttgagttcgccagccgagcacccatacggctcgcagggcaccggctcgcattatcagggccagcgcgggccgacaccgagccgctcgtatgtgaatttttacaaagccgagatccaagactgatcggcctgtgaaccgtttggcttcgtaaccatggaggtgctcgtcggaatacccgacgagcacctcttgctctggccgctcttctcccctagtcagccttcaaccgtcagccgacatcccctcgtcagagggaacgctgcgtacctcccggcgttatcggcgcatggcacgcagtacgcacttgcgcagttcggaggcgatgagcacgatcagtgccagaccgacgcattcgagccatgctccggcactcaacggcacggtgccgaacgcggtgttgaggaacggcacatagatcaccgccaactgcaatgccacggaaacaccgatcgcgccccacagccacttgttggcgaacaatccgacgaataccgactgcaggtgcgagcgcgaggcgagcgcattgaacatctgcgcgaacacgagaatcgtaaagcccatcgtacgtgcctcgatcatctgcgcctcatgcccgacggccgcgacggaacggtccgtaaacaggcccccagccaggtgcatgtccatgccgatcagcgtcacggcggccatgatcacgccgatgaagatgatgtcgccccacatctcgccgtcgatcacgcggtcggtcaggcggcgtggcttgcgggccatcacgtcgtcggtggacgggtcaacgcccatggcgagtgccggagccgcgtcggtgagcaggttaatccacagcagctgcgtggcgagcaacggcacggtcacaccttgcgtacccggctgggtgatgccaaggaatccggcgaagatcacgccaccgaacacggtgaacacctcacctacgttggaactcaacagatagcgtaggaatttcctgatgttgtcgaagattccacggccttcgcgcacggcggcgacgatggtgctgaagttgtcgtcggcgaggatcatctttgcgctctgcttggtcacttcggtgccggtgatgcccatggcgacgccgatgtcggcggttttcacggccggagcgtcattcacgccgtcgccggtcatggccacgatgttgccttggcgttgcagggacttcacgatcttcaacttgtgttccggcgccacgcgagcgtagacggagacttccgccgtcgccttgtcgaacgcatcgtcgccgggcagcgcgtccagttggtcgccggtcaacgccttgccgccctgttcgatgatgcccaagtcggtggcgatgcgagccgcggtgagcggatggtcgccggtgatcatgacggtacggatgccggcccgatgcgcttcggagacggaggcacgcacttcggtgcgcggaggatcgatgatgcctaccatgcccacccagatcagttcggactccagcacgtcgctctgttccgcgatatcggcgacatggcctgcggcgttgatcgttacgccgggcacgtcggcaagcgatgccgtaccgagcgggcgataggcctgtcccagcgtacgataggcttcgctggaaaggcgttcgaccgtcgccagaatctgttgacgatcaccttccgtgagtggacggacggcaccgtcgacggcgatcctgttgcaatagccaagcagcacatccggcgcacctttcgaaaagaccgtcagtctgccggcatccgcattatcctgcgcaactatcgacatgcgctttcgttcggaagtgaacgggatctcgccgacgcgaccgtagtgcgcatatctccggtcggccttcaccttgcgtgcaccgacgatcaaggaaacttccgtgggatcgccgacggcttcccatatgccggattctgtgtgttcccgcaggtcgccgtcattggccaacgcaccgacacccaatgtcgccaccgcttccatctcgattgcggcacgttccggcgttcgttggtccactatcaccatgcggccttccggcgcatagcccgtgccggtaatctgcacttcaccgctgggcgtgaccacgcgttccacggtcatctcgttgcgggtgagcgttccggtcttgtcggagcagatcaccgatgcggagccaagtgtttccacggaatgcagcttcttgacgatcgcatggtgcatggccatgcgctgcacaccgagggcgagcaccaccgttagaatcgcggccaatccttccggtacggccgccacggccaacgagacggccagtagcagcgagtcgatcacgtcgtggatgtcgttgaatccttcggtgatcgcaagcgccacgagtacgacggccgcgatgatgcacaccgcaatgcccagaaccttggagacgtagttcatctccttctgcaacgggctttcgtcatcttcggtggcttgcaacaggtcggctatcttgccgacctgggtgttcatgccggtaccggtcacgatggcacggccggtaccttgcgttacggaggtgccgttgaataccatgttggcgcggtcgccgagagccttcgcctgttcgagcgtatccgccttcttgccgaccgccacgctttcgccggtcaggctggcttccgcgattctcagggacgcggcgacgcacagtcgaccgtcggcggagacggagtcgccttcgccgagcacgatgatgtcgcccggcaccacgtcgacggtgttgatgcggatgatcctgccgtcgcgtagcacattggtctgcggcgcggtcatttgcgaaagcgcttcgacggcctgttccgccttagattcctgaatgtagccgagcaccgcgttgacgatgagtatgagcacgatgacgatggcgtcgaacggcagtatttcaccgccttccgttccgggtgccgcattggcccgttcgatgaaccatgcgatcagcgagatggcggtggcggccagcagcaggtatacgagcgggtctcggaattgggccaggaatttcttccatttcggtacgggaggtgcggaggcgagttcgttcggcccgaatttcgcaagtctctgttcggcctccgcctggctcaggcccgtattcggatcgacattgagcgcatccgccacggcctgcgcatcggtcagtgacgggtccacaccgtgaggcagaacgtcctgtatggcattgacgtccatgggacgttcggactcgcctgcgacagagcggtgggactgaatggcttgatcgttcttgtgatcaaccatgatgatctccttgggagcgccgcggagtagtcagtttcacctgatacggcgaagctgcgcggttgtgggcgctacggcgattgccggcaacgcattcatgccattattgcacacagtgactgtttcgtaacgaggcgacgcacccgcaaatgtcaagattccgcaaattcgtgaaacatatcgtgaaacagttttgtcattgttctcacagccaacgattacgttttcttcaagatgaaccgatgattatacaaaagaatcaacgataatcgcatgactttccccaagcaccctgcctatgatgaagtcacaacgaaagatagagcacacagaaacacaacaagcaacacggaccgcggccggcggaaacaagacaaaggacaacggtaacggccgcgaaggaaggaaacatcatgaagaacaacactttcgaccagatcatcagcgccaacctcgcctccatcgacccgggcttcggccagttcgccctcgccaaggcctcctctgacctgttcaagaaggttctcaacaagtaaggcaaggcgagacggactttctccggagaaggggtctcgtggttcgtgtgaaccacgagacccctttcacatacccgcacacgaagccgccgatccacacgtgcacgttcgtacaggaataccacacgacgccactattcccatgccaccacaaagcaggacaaacgcaaccatctggagacgccatccaaacttacttcgcctagcagtgccggcttattcgtcacgctgttcatcagcatcttcgcgcgattcaaactcgttcctccctacggtttcttcatgcttctcgcgctcgttgcgctctcgttccccaacatgaggattatccgttccagacgattcaatgcagtggccaaatccccaagcaaattttgagtctccatcagcgcaagcatggtaccttgttcggcattcggagtcatctcctcaggcttgttctcaagtcctgcggggcgcccgggattttcgcttcccttaacccaccgatatgtgcatcgttcgatgcgtttgcatcccaacagtatgaccggcagacccgcatctcggaagatttccgtcggtttacgcccattccagtattcacgcaggaagtgccgcttgaactcctccgagtagatgattcggttggtcgtaacgttatcgacagccttcagaccgcgtaaatatgcgatttccgcgtcggtaaactttttcatggttgtcgtctctttcaaaaaacggaaaatcggtcgattacggctccttccgcaatcgaccgataagtgaggaaacgccttacgaagaagacggatcctgtttacacgtttcagacgattgtggtcgtcttacgggatttgaagcccaccacagcaccggatgcgatgagcagaacagcgaccacggagaacagcacggttcccgcgccgccggtgagcggcagctgagtgatgctcttcacgttctgcacggtcacttccgcggtgtttccattgctaacaagaccccaaacgtcgctggacgtgccgtcggcgtcgatcgcataggtcggggatgcgatctgatcagcaccagttccggagaggttcgccttgatttcgaagttgaaggaaacacccacgttggtatagccggtcggagcggcgatttcttcgatggtgtacttgccttcgtcgagagccgggaacgtgaccttgccgtcgctgccggtggtgaatacgccggaagtcgaagtctcggtcggcttggcacccagctcgctccaaccatcagtggcggagtaagcaaggtacttgctgtcggtgacattcttcttgataacgaacttcgcaccttcgagaacgccgccggtggttttgtccttcttgatcagggtgtaatcgaagttgaagaccttgaccggagtgcccggcacagtctgcttgctttcattgttggacggatcgttcggataaacgatcttcggttcgtttgcggcaccattgttaccggtggaaccggtcacggtggccttgtattcaacggttacggctttgccaaccaaacccgcattattgaaggttgaatcggaagccggatcaccagtaaagccattagccttgatgtagttgctcagatcaacagtgaaggtcttgctcgtggcgtcgaaaccggtaaccgtgtaatccgtatcggcagtcaaaaccgtaccgtcaaccgtaaccttcagggagccggccttgtatgccaaaggcgcgtcagccgcgaaggaatcgacaaccgtaaactggtagccattcaccttgtagcccacataattcgggattgtggtcgaaatcttgtattccgcgtcctcgccggcagcaacggtctgatcggtaacggtcttcgagacgctgctggtctggttcttcatgtcgatctgaccggtggaatactgcttctgcgcatcagttccagcgttgatggtcaacggggtgccggcaagaatcggcagtgccttggtgctggtaccggtggcggcctgatccacgatcagccacaggccagggctggtcagcgtaaaggtagcattcttgccatcggcgcttagagtcggagtagcgtcagtagtcgctttggaagcgagcgcgtcggcaagaccacgggtggttccgtcaccaagccacgggctcgacgtggatacgtcaagtttcgcctgatcctgctgctgagcccatgcgagaggatcggcatcgcctgtgtagcccaaatacgtcttgatgtcgttcttcagaccgtcctcagtcgccaaggtgacgctttcgttgggagaagtgccgtacacatcgtaggatgcgaccttcaccactttgaaagtatggcccgtcagctggtcggcgaactgtgcattcaacgtgatggtcgtatctccactagtcacgatttgagcgttggcgctggaaacggctgccgccccccaaacctgcggccgtcgcgaacgcggcgaccatcgcagtgattttcttgagtttcatgaggaactctccttctttcatgacataccgaacagccattcggccgaacggaacatgcgccgtgcgatcggcacacgaaatcttttattgaatgactcgtctgacattgaaaaccgtcagagcgattgcggcgatgatgatggcaagcccgaagaccgtgttgtttctcgcagcggacgcgcccgtcagcggcagcacggtgttgctgtcacgtttgttcacgaattgcgtttttccgaaggcgatatgatcaaccgactttccttcgtcgtccttcacctgttccacggcgatagtcgcctgcaatccacctgtggaggccgtgcctccggtcgcggtgatggtgacgttgtattcggccttcgaacatgccagatcggatgagcagtatgactggtcctcacttgccgtgaacgtatacgttccggctttgccgaccgtgaagttgcgcagggtgaagtcctttgcctcaccatcggtcagatctcccacgttctcgccatcggatacggtcacaacgccatcgttgacggcttgttccgtgtcgctatccgctgggaccaatgtgaatttgaaagtctcgccggcgttcgagtctcgtccggtaatcgttttggatccagtgacgttgagttcgataggcgtgggtttgttcacgaatcccgtatcgaacacgtaatccggattatcgctgctgatggtgaatgcataggattgggaatcggtctggaacccatccggcgcctcgatttcaacaagtgagtagtcacccatctcaagatccgtcaccttgaacgagccttgagacgtatcctcgtcttcgttaccgttgtccacgatggttttgctgtagccgttcggaccggtgagtttccaagtcgagccggccagagcattgccgtcggcgtcggtcttggaccacacgacggagcctttgcgcgctttgacgtcgaccagctgcgtttcgaatgaggaacgggagcattgatccgtgaccttcactttcacatggcacggaccttcatccgggaatgtgatggatgtgctcgaacctgtcggatcggagaacgatgcattgcagtcggacgtccattcgtacgtgtacggcgcagtgcccttcgttacggtcacggacgcgttcaccgtggatccggccgtggcatcggaaggtatgtccgccttgacgtcaaggcttttctccactccggaaagcatgatgaagttcaagaacgcgcgtatggcgttgcggcctgccgtacttttatcgctcagttcgaactcatggccagcctcatacatgaccatgccgttgttgtagtcgccatatccgggaccaaccagcatgaacgccgcagagccaggagacttatcctctataacgtctgcctgctgcgtatcgatctccaacacccgtgtggtgtctcgccaagcacttccagtggtaggcatgtaaatctgctcggcaccattgtcatgagcgctgaacgtattgccgatgaactgcatgatcgggtcggaagcggaaccagtgacttggtaataatcgttcttctcgccatccttggaagcgcccgtgtgtttgtcgccaatcaacattccgttcgtcgacaggaagaacatggatccgtcatccacgcccttgttggaagtgtcgctttcaaggtatgacacggcatggcatccagcccagatatagccgccgcccttgttgaattcggcgagcgatccgtgcgaggacgtggtcggttcggcatgcggcatgacgtagatgtcatcgcaggtggagtccaaatcatcgggcgtcgctttttctttgtaaacgcgatcatcggcatatttcttgtcttcggacagaatgccggaatataccaagtagttttttgcgatgctgccgttctgcttgtcgagcacaacgcggggaacggaagagatctttcgactttcctgcacggtgatggatgtcgtggtgggaccgtcgatggttatgccatatttgtgcttggactcctgattatttttatcctttttcgcggcttcctgagtgcgcttccacaggttcaggatttctctgacattgtcgtcgacatcatcgccggaaatcacgaaaggaccggaaatataattcttgccgttgtaggtaagatccgtatccgtctggctggtcttgttttcgtcgatgacccaatacaccggcacctcagcgttgaggatcaaatcgtatacgagaccgtagggtctgagctgtgcgtcattcgaactggtatcgcccatatcgacgatgtacgatccctcggggaaagtgacttcacctgtcttgccggcagacttcaccatctgcgccacatcgccgtcggtaccggtcgaatcttctccagccgccgtccccgctacggtcaaagataacgccaacgctacagccgcgatcagggctaggaaagccttaagccccccccccgcgaagtttacgtatcagtctcatcttctatccttcctagaaatccgcccctgcgtcaggcctgaatcatgccggcagacgcacgcctcccgacggaaaagcaccggaacacacaacgtcgcaagcgcatatgacatgacaatagacaaaggcaaaggccgcatatcggtaatgtctgattcgtaaggcacttcgcctggaatctgggccctcacgccggaaaccaacaaccgatgcgtattcacgccatacggagtacacgtcattaatgtgacgcgatcttccccgtcgacgattttcaatttcgatacatccgacggctcaatcacttcgatcctgtcgactttgtatccaagagttttacccatcactttgatgtagaaggaatcacccctcttaagttcgtcaagtctggtgaacatcaaagccttaatcagccctctgtgcccggtaatgaccgaatgggtcccctctccgccgacaggcaggctggtaccgtacagatgccccgcaccaagttcaagtacggattctgacgtgccatggtagataggtatgtccacatcaattttcggaatgcttatcgaacccataacaccactgccggcatccagtatggacgagtattcctcatcagacacggacccttccgtctgcgtgaaaggatcttcggcttcaccaagaacatactgtccacgaaccgcgagtttctgattatacgcacgagcagctttaagattgtcttccgcctgcgggtacggccatccggccacttcttgcgccgagcgttcggaaatggcggactgcttatcggctgactgcgactgcaatacaaccggcacggtcaccacccccaatcctgataaaaccaacaagatggacacgaacgacagcacacgcctcttccgaagcgctttgcggtgagcatcccaggactttccgatttcttccagtccaagaatttcatcccagttcagatcggagacactcattttcatcgtccgatcatcctccaggcatcgatcctgttccatcgagtctcaatctaccacccaaattaggggtggattttcaaacaaacagcaacttcccctaccccatcggggggttaaggatacatccccacaaacacaccggattcatcacacccaaccccatcccccgacagaccatattccaacacgccgattgaaccgataccgccccctgaacaaaatcagacacacgtgttcaacccacgcacaaagcctcattcgcattcaagctgacttgaacatataccgtattcccaacagataattacaacgatgaaaatcgtcggcgaaggagcaagcatgcattatcgcaatgttggcaaatccgcgaacggttacggactgagccgcaaacacatcttcagcaaccgcgagcgctccctgaagaatctcagcaccgactacattgacctgtacactgccatcacctcaatgcaaacactcccatggaggagacactgcaggcgttaagcgacctagtggatcaggacaagatcccaatattatggcatgagcgaagagtggagctcggcacgcatcgaacgcgccgaacgcatcatctcggaacgtaagttgcatccgctgacggatacagccgcagtacaacatgattgaccgctatatcgagcatgagattgtggacacctgcgattattacggcatcggcatcacgccgttctcccccgcttgcgcagggcctgctgaccggtaagtatcgtaaggaccaaccgattccggcaggttcgcgcgctacatggtaagccgaccatcagatcaacgatctgctgaccgacgaaaatctcagcaaagtggaggttctgctgaaagtgatagatggctttggcgtgaagatgtcgacgttcgcttcgacttgaatcctgcgatttcccgccatcagttcggtgatcgtcaatgcctcccgtccgtcacagcttgattcgagtccggccacggccagcctggaacttccggctgacgcattggctgaaatcggccggattctcggcctcgaacgattcgaacgtcatgtcgtctgaaataacggggtcatcccttccgcatttcccggggtgctgggacaataggcaactatggcaatgaaaaaaggaccgaccaaggggtcgggcggaaaacatcgtaatgcgctaaggggcaagggaccgactcccaaggccgagaatcgcgtatatcacaaggcctataaggccaaaaaagtcgccgatcgccgtaaaatggccgatccgcgactggctgcacgccgtcgcgtggcaaagttcgcttcggaatccgacgatctggtcatcggtcgcaacgcggtgctcgaggcgctgcgctgcggcgttccggcttcgacgctgtatatcgcggcacgcatcgaacatgatgatcgcacacgcgaaatcgtgcgtctcgccggcattcacggcctgcacctcatggaggcggaccgtttggagatggatcgcatcgcacgctcttccaatcaccagggcatagtgatgaaggcacagccgttccagtattcgtcattggctgaactcgtggaacgcgcggacaagaagtcccgcgccatggaagccgcaaactcggcagccgcgcgcatcgcggcccgtccgctgttcatcgcgctcgacggcgtcaccgacccgcagaatctgggcgcggtcatccgttccgcagcggcattcggcgccaatggcgtgattctgccggagcgccgttccgcttcggttacggctgccgcctggaaggtgtccgccggcgcggccgcacatatgccggtcgcccgtgtagtgaatctgaccaaggcgatcgaaagcctgaaggaacgcggttattacagcatcggtcttgacggcggcggcgatgcgctcgtcggcgaaaccggttttgaaaccgatccgctcgtcgtcgtgcttgggtccgaaggcaatggcctgagccgtctggtgcgcagcacatgcgacgtcatcgccggtattccgatgtcgagcatggtcgagtcgctcaacgcgtccgtcgcagccggcatcacgctgtatgcagtggcccgcgcccgtcgggaagccgccaacaactaaatacgatgcataacgaaagtggctggggttacatatgtagcccagccactttcgtattacagcttcagaacaacgcctaatggctccacaccgcggcatccggatcatcatccggattatagccgtcgtcatcggggtcgttgtaggtgtattcgtcatcaatcacgccggagtcggcttctgcgttcaacgcgtccacgtccttctgctcaagcttgtactgcggcaacacgttttccacataactctgcaccgcttcggccatcggcacatcatgaccggctttttcggccaggaaccagcggtggtcaagcacttcatggaagaactgcgccggctcgatctgcgaccggtattcccgcggaatcatgcgtacggtcggctcgaatacctcgcgcatccaatcggtcgccacgatttcgagatcctccccttcacgccaagtggaggcacgataggcgtccagatcgttgagcagacggcgggcctgattctcctgcacgtccagaccggtcagacgcagcagcttgcgattggcatagcccgcatcgaccacacgcggacgtaccagcacacgcttgccgtcctctgcggtcttcatttccagctcgtccacgtcaaagccgagttcattgagcttgttgacgcgcttttcgatcttccacatctcgtccgggccaaaatcatcggtgtcggtcagggcgctccacagcgaatgatagcggtcaaccagacgatcgccaatctcgatctcgtccacgccgctcggcaacagcgaaccggaggaaagatccatcagttcgccgatgatgttcgtacgggccagatccacatcgtattcgcgctggccttcagtcaggttgatctgcaggtcaccggtttcagcgtcgaccaggaatgccgagaaagcgtcggcatcgcgcaggaacaacacgttcgacagagacacgtcaccccagtagaagcccgccaggtgcagacgcaccatcagtacggccagtgcgtcaatcagtcgttcggcggtatcgggacgcaggttgcgtgcgaacaacgcacggtacggcagcgagaacttcagatgcttggtgaccaaaatggcctccaaaggctcaccatcacggctatgacgacccgtcaccacggcgatcggctgcacggtcggcagttccagcttctgcaaccggcgcagcagctcatattctcgctcggccacattgcgggtgatttccttcatcgcataaacttcgtcgcctacgtgcacgaaacgcaccacgtgcctcgagatgcctcgcggcagattggccagcaggtcttcgggccaggtcgccagcggcttttcccacggcagggtgaacatcttcggattcgagcttgcggcggtgatcttcagcgcctgcggttccggagattgtgcagctggatcctcggccttcacggaagtggccttaagcacacggggatccatctggggcagttcaatagattccataactcaccaatctaccctttgacctacccacggggaggccttcagcggcgggcacgcaaaaaagaagccccgcacctacgcggggcttctccaacgagacaataagagaggaagagaatgtctcgtttaatggttgacggaagtggaacttccgccaagtttattcagccacccgccggaatgccttacgagaagacttccaacggttggttactcctatctgctcagttcaggcgcagctcggtcgacggagcgaacaggtgcatcttggacgggtcgatcttgatcttgacggtatcgccgaccttcggaagagcacgcgggttcacgcgaatcgtggtgagcttgttctgatcggacatcatggtggatgcctcggtagaggaaccatcggtgaggatgttgccgtagatgtagccatcggagcccagatcctcaacgttcatgaccttgagggagaaggcgttggcatcatccggagcagccagggaagcgtcttccggacggaagccgacgacgatctggttgttgtcctcagcggtcagcttgttgacggcctcagccggcagatccacggtgtcctcgccgatcttcgccttgccgttgaccaccggatgggtgttgatgttcatcgacggggagccgatgaagccagcgacgaagacattggccgggcgatcgtacagctcggtcggagcaccgacctgctgcagaaggccgagcttgatgacggcgatgcggtcacccatggtcagagcttcggtctgatcgtgggtcacgtacagggtggtgacacccagctggcgctgcagggcagcgatctgggtacgggtctgcacgcggagcttggcgtcgaggttggacagcggctcatccatgaggaagaccttcggctcacggacgattgcacggcccatggccacacgctgacgctgaccaccggacagagccttcggcttacgatcgaggtactcggtcaggtcgaggatctcagcggccttctcgacacgcttgcggatctcttccttcggggtgccggcgatcttcagagcgaagcccatgttgtccgcaacggtcatgtgcgggtacagagcgtagttctggaacaccattgcgatgtcgcgatccttcggctgcatcgtggtgacatccttgccaccgatgaggatacggcccttgttgacctcttcgaggcccgcgagcatacgcagggtagtggacttgccgcagccagacgggccaaccagcacaaggaactcgccgtccttgatatccaggttcagatcatccaccgacggcttatcgttgcccgggtagatacgagtaacatggtcgaatacgacttctgccatgatttgtcatcctttcagaggcaggtacgtgcctcacgatccgttgtaaagggatttctttcctgtgcctcgccttgcagcttacgacttcgacaaagccacaattcaaagcgttaatttatgtacttggtttagcgaagatctcttcgttgagccacgttccataatacacacttcacccgattaggcaacgcgtgtcgcgcactcgacacacagagccggaaagggaattattctctgaatcacggattacagcgtagtttttatcatgcggacgcgagacaatgaatgaggaaccacgaaagggaaggttttcaggcatgcgcaacatacgaatcggagtggtcgaagacgaccccgcaagctgccagcgcgtactcgactatctcaatcgctatcaaagcgagaatgatgaacgattcaccgtctccgtattcgacgacggcgctcgaatcgtcgagaagtacacccctgtctatgacatcctgctcctcgacatcgagatgaaggagatggacggcatggaggcggcccgacgcatacgcgagcgcgacgaccatgtggtaatcgtgttcatcactgcggctccgcagtatgccatcagcggctatgaggtacgtgcgctgtcatatctgctcaaacccgtaccgtggtttgcgttttcgcaggaactcaagcgttccatcgatgctctgcgccgcaacggcgacgattcgatgctgatcgagaccggcaacggccagatgcgtcttgaattgacggacatcgtatacctcgaatcgattcgccacacgatcgtgatccacacgcttgatggcaaattgtcgatcaatggcacgctcaaagatatggaggcgaagctcgccgaccaccatttcttccgctcgaattcctgctatctggtgaatcttcggcacgtcgccggcgtggccgaccaagattgcgtgatgtcgaatggcgagcgcctgcgcgtaagtcgaccgcgtaaaaaggcgttcctggcggcattggccgacttcatgggagacggaaggtgaccggcgtcgtgttcgccatgccggcaatgaccggcatcaccaacgctttgcctgacattccccgcgtatatacgggaatctgcgagtggctggcctgcatggtctatatcgccgtgctatatcgtcgcgcatcacctcgccgtacgacaatcgccgccatgacaggcttggtactgctgattgcggtgcagtatttcgacggcatgctgccgatctggttttggatcgtcggcatgacgttggcgttcggatgcatgtatgcgacgattctgttcggcgccggcgccggcaaacgtgaaagcctgtatatcacggcccgcgccttcgtgttgggagagctggtcgcgtcgttgcattggcagatcgtgacttttgccggcatgcgtgacaacacgttggatttcgattggcggtcgatcctttcgctgacaggcacttatgcgatctgcttcggattggcttggctagtggaacgcggtaatttcagtcagaccgcaccgacattgccgacgacttccgccgcgattgcgacggtggccatcaccgtggtcacgttcgccatgagcaacctgagtttcgtttcgacgaacaccccattctccggctccgtaggccaggaggtcttctatatccgcactttggtggatttctgcggttttgcgattctgtatgcgcaacaggagcaggtacggcgcatcgaggcgaacacggagctcgcatcaatcaacgcacagctggaaagccagcatcaggagtatctgcagtccaaggaaaatatcgaatcgttgggccgtcttgcgcatgatctgaagcatcagatcacggcactgcgcgcacaggtcgatccggagcatgcggccgcaggattcgaacagttggaaaaatcggtacagcgatacagtgcgcagcagcataccggcaatcccgtgctggacgtcatcctgaccacgaaggagcgtacttgcgccgaccgcggcatcacgttcaccgccgtcgctgacggctcgctgctgaacaacatgtcgtcgatggatatcgcatcactgttcggcaatgcgctcgacaatgcaatcgaagcgacgtcgaaactgccgaacgccgaccaacgtctcatcaaactggcgctatatgcgcagaatcaattcacagtggtacgtatcgagaattattacgattcccgactcaagaaggatgcggacggcaacctgcgcaccacgaagcgagacgaccgacacagacatggtttcggcgtgaagtcgatccggcacattgcacagcagtatggcggcgaggtgacgatccgcaccgaagaccactggttcgtgttgaccgtgctcattccacgccgcaccggtctcatggccatgtaacatcacgagcatccggaatcccgatacggaacctcgggggtcgacgcgccgacgtcagcacccctgccgcgaaggaacggcgtaaaacctcatgaaataacgggggccaaaggttccggtcccgctgacacgaaatgatgaaagccactatcgtacgattgggggcttagtatatggcacaccgcacgttcaccgaacgggaaatcgaataccttgaggcgctacctgcggtcgcgcatgccagcgcatcacgaatcgtctattcacacgagttccagctgtattgcatgcaccgatacctccatggcgaaaaaccttccgtaatcttcgccagcgtcggcctgccatcaaggctgatcggctataaacgtatcgaacgtgccatcaaccgctggaaacgagattcgaacctgatgcgggaagccaagatgcgtcaggaaacaacggacttctccgccgacctgcgcaacacaatgattcaagacaattacgagaagattcgtatgctcaatgaacgtctgacgcttttggagcggcaactcgaagctttgcaagcggtccggaaagacgagaagccgtaaaggcgctgacggcgacggcgaagcctatcggcacgaacaggttaatcggggcatctgcaagctccatcaccaggcagatggccattagcggagcctgctgcgaggccgccagcaatgcgcacgcgcccagcagcgcatacatgccgattgagttcgtgtggaatatctgcatccatagaatgccaagcaccgcaccaccggaagcgcccaatgcgatgcccggttgcagtacgccgccagaggcgccggaacgaatcgtcagcaatgtgacgatcgctttggcgccaaaagacagcagcagaatcggaatgacggccaaatcggcattactggagaagctcaactgtgccgtggcacgaccgttacccatgacctgcggcacccaaatcgccacgacggcagtaagcatgccagccaacggcatcatccacagaatcccgttaccggctggcttgttcttctcggcccactgcgaaccgcgacggaacaatgcaccggccacaccgagaatcaggcccgcaacgagtgcgaacgccatataatccggcgtgaacaggccctcggccttgccgagtacgtaaaacgtgtgagtgcctttgacgagcgacgccacccatgaggcgagtgcggaacaggagaaggcaagtgcgaccgtttccaacgtcacgtcggcaagcagaatctccaccgcgaagaacgtgccggcgagcggcgcgttatagacgccggccagaccggcggccgcggtaatggcgaccagcatgcgcgtgtctttcgcgtcaaggcgtatccagcgggcgaaacgctggccgaacatggcgccaagttcacgtggggcgacctctcgaccgatcgacatgcctgtgccgacgatgaaaatttgcagcagcacgtgcacgacggtctgccagatcggcatctcatcgccattcacggcttttttgacggacggcacctttgtgctgcgcgtgcgcagcagccaccagatgatggcggcgacgctcgcgccgacgatgacggaaatcgcacggcgcaatggcggcacgttaaacggaccggattcatgcgtgctctccacatagccaagcgcaagacgctcgatgccgtatagcatgagcgtcaacagaccggcggccgcgccgatggcaacgccgacgaagattaccgccgcgaccagtgccgggagccggccgagtagcggttgttgcgattgtccgactttgttggattgttcctgcgattccgttgtttccgctgctttcacgcccggcttttgccgctcgagctcatgttcctcatcggatgcctgccgcacttgtttcctccgttcgtctcacttccgcaatcgtcgcaccgtcatcccattctctgcaaattctggattcacggggcatgtggattacttatgcagccaattcactgagcctacgggcgaaggcaattagttcagtatcgcttccggcggggccgactgcgcaaataccacatggaagaccatcttccgtacgaattggaatgtttacggcaggcaatcccgtcaaacctgcgatgcacgtaagacgcatcgtcgcagttctctcatcttcaatcgaagtgccaccaatcgccgaatcagtgattttcggggcaacactggaagctgaaggaaccaataaaacgctttgccccaatatggaccgcacattagtcttccaaaagtccatatgttcgcgggcgttccggtagttttcggccgtcagctcgctggccgttctgaagcgagactcaatatcagcacccaaagtgttccaatgccgtgcaagccaagtaccatgattccgccacgcctcgtatccttgcacgattttgtaggaagaaagccagtctgacagtcggtccggcccctctccctcgaaacgtggccctaggatgccatcgagacgaatttgttctagactcacatccgttgcattccgggcagactcttccagccgactgatccatgcatgcaaacctgccgatacatcgatgtttgtggatgacatcaactcttcagaccagataactttcccagatagtgctgattccacaccagattcctgtgttatcaggacctttgcgaccttttccagcaaatcaggggttctggtcatccatcccacggtatcgaatgactgggagagcggaagaacgccttccatcggaaccgaaccgcatgtggttcgaatcccccataagtgttgataagaggacggcacacgcaccgaacctcccgtatcgcttcccaaacctatatcaacttggcctaaagcggtggcggaagcggaccccgatgaagatcctccagaaatccggcccggagcctgcggattcggcggagtcccataatgggcattcgtaccggcaagggaataggcaaactcatccgtccttgaaatgcctagcacatcagcgcccgcatcaagcagacgctgaacaggccaggaattatgctgttgcggaatcccttccgccagaaaggcctcacttccagcccctatggcatatccttccacaccatagagatccttcaccgccacacttaatcctcgtaggggcaaatccgtcgaagattcagtgcgagccccttgcttcagagggctaccgactactcgccagattcgggaatccatggcaggaacggggtaagtaaggtgagccgacacaatcttccatgagccgtcaatcaactgccacacctgcgtttgcgttacaacaccgccagaatctttatcaaacgtggcaacaacagtcgcggcacagttcgcaagcatacggtatgagcgggaacgcagaacccgacttggtgccgttccgcgttgcgcacgatattcggtaatctgctgatgtccattcagcaaacctgcattatcggcacgagtcacaggcaattcggacggatcgtccgcgaataattccgcaagaatgtccgtcgcattacgcatcaacgcatcctcatatcgctccaccgcatccatgagttcccgaggaacatccttctggctgtgacatatcatgcgtgctccaactccttctccgtcttaccgtgaatcagctcggaaatctccctacgatatcggttgaatgcaacggatgtgttatctcttggatcttccagttcgatgctctcaatcttcttgatgtttccagcgacaccactggcagcgccatcggccatgaccacaactctatcggcaagatataccgcttcttcgatgctatgcgtcacaaataccaccgtgatgcctagctccttctggatcttcgatagttggttctgcaattgttcacgggtcaaagcatccaacgcgccaaaaggctcatccatcaacatcacggcaggagtgttcgccagtactcgtgcaatcgccacgcgctgttgcataccaccggacagctccttaggaaatttcttggcgaaaagcttgagtccgaccagattaatgtacttatcgaccagcctttccacttcagggcgtggatatcccgcctccttggggccataggcgatattctcctcgactgttagccaagggaaaagaccataatcctggaatacgacgcctcggtcaggccctgggccggttaccggtcgtgtttcgaccttaatctcgccctcggttatgttttcaaagcccgcaatcatacgaagcagggtgctcttaccgcaaccggacggcccaacaatggcgacgaattcgccggagtcgatatgcaggtcgacatctttgaccgcataggttccgttgccatactgtttgccgaccccttggatgtcaatcatgccggcatgacgctgaatggttccgatgcgcattgttcactctccttaacagtcacttggcagtaggtaggatcgggcgaccgtgcgccacaagtttgacgatccagacgatgagtcgatcgctgagaaaaccgaggatgccaatgatgaacatgccggcgacgatcaagtcggtcttcgaaacgttcttggcctccgtaatcatggcacccagaccgactgtgatacccgtcatctcgccgacgaccagcagcgcccaagccaaaccgaccgcgactcgcaagcctccgataatgcctggcaaagcggccggaaacaccactttccatagcgcctttccctttgacgtgccgagcattgcagccgcctccagaagacgttccggaacctgttccacagcggtgacggtattcaggatgatgggaaacagagcagcaaggaaaacgaggaaaattgtggaacgatctccaatgccgatcatgatgagcgtcaacggtacccaagccgtgaccggaatcggacgaatcaggttgatagtcggctccaacatcgccgaagcgattttcgagcggcccatcaacacacccaacggaacaccgatgagcgcggctaggccaaagccgctaaacacacgtaccaaactggcgtacgtatgcttccacaacatcgcagaatacggatcatcaaaataaccgccaaacgctaagtcagcgatgcgcctcatcactgtcgttggggagggaacccgcgccaagcggatgtcaaaagggagcgtccagccgtatttcacaccttgactccacagaatcacgacgagaaccggaacgggcaacgcaagcagtactttcgggacaatctttttgacgcggggcatgatcatcgatcctttccgacgaattggctgctattacttgacgaactggtcgtcgagatacttggacgcatctggcgcagcctcgatggagccaatctcgaccatctgattggcaagctccttgcactgcttttgataatcggcactgagatcccagtgcaaccacatattgtcaagcgccttatcgagggcgtcagagtcaaaagtgaactgcttcatcactcctgacttccaagtggccttatccttggacagcgactccgtggccttcttatgtgcttcgatggcgaccttcactaaatcgggattgccatcaatcacctcgctgctggccgcaagcgcgatattgaccttgccgatctcagtgttatagatggagtcgatttcactcgctccggcgagtttggcaagagagacacccatttctgcgcccgcgaaggcatcaacgtcacctctttccaaagcttcggacatctcggagtagccaatattcaccatttcgacatcagagtcaggatcaagtccttcggatttgaggagcagacgcaaagccatttcttgggaggaatttggtacatatccgattttcttgcctttgagctgctttacggaagtgatatcactttgagccatgagtccagagcctccatcggcaccgccagcgatgaccttaatgccgccatcctgtgcagcctgtgagatgacggtggggacgcccatcagggcgaagtccacatctccggaaagaagggcatctttctcgtcgttagagttgtccatcggcacaacttgaacgtcatagccatcgggaacgtacttggaccattcgtacgcggcgaacaggtgtggctggcgttgggtagctacgcggatagttttggaggatgaatcaccagctgcggaatcgtggcttggctctccggtgctgcatcctgacaggccaacggctccggtggcggaaagtgccactacagccataatggatgcggcttttttcaacatgttcatattcatttttctttcctttcctctcttgttgtctcttgtagtgaaggaaaaaatctattgaatttcgtcatctcatcgtttctgtaacaaaatttacgaaatcttgagcagcggatccctcaaaatgcgagagaagaatccgcgaatgcacccctcgcactagatcgacagcttgagagacgtcaaagtcagctgccgcagacagatacaggtaaatgacctttgcggggagatggaatagtgacgaaagcaagctgacggagtaatcgacgctacggcgtagcgcctcgtcgagatcctcatgcaagccaagggccaagagtctgccatgcgcgtagccaaatggtcccttccgttcgccaaacagcgcatccgcttgctgttgcggaatgacggaaagggttaatgtcgcgcgaagaggtgcctctagtgcagtcaaagacacttctccgtcgccttgagcgtaatgcgggtcccccacgaagaatttcgcaccttcaacctggatgggtagaaagagtacgctaccttcggtcatgtcattgacgtcaatatttcccccgaaatcatatgggggaattgagcacagatgtgcgtccgtatccggggcaacacccataatgccgatgaaaggatgcaaagggaagtttggataactgcagttgtccaacgcctggtcgtggaagtccatgccttcagggactagttgcccgtatgcttcgccatgcacagagattactttgcacagtgtgccgtagtcaccttccaatgcggtgtctgtcatcactccacggccatgccgggttgagataactccatacggagcgcgtcgttccaacttttcaacggtaaccatgagcaggtctccggggtgagctccgacaacttcgattggtccggtgattacgtgcgaaccatccgtcatatttcgtgttttgcatgctgggatagcaacggtatcgtcgagcaattcgctacgatcaagaccgtaggcgccgaaataagtgattggatccgagccttgatccggcatgatgccttcgtggctgacagtatctatcacgatgctttcacctgattctatggtcagcaccggccggtcggaacgagaagggagaacaccccaaaacgtgttctgcacggatgcgggaacatagcggtcggacagcctcgctgcctcatcgggccctagcccttgcaacagcggtccgaaagccttcgtatccttcattccctacaccaccttttggtatgaccaatttcatattgaggtaagaataaactggcgatatgtcagtttcccatatggaaatagtcggttactcacttgtaacaaaagggcaacactgaccagaccaatccgctatctgctgagtagattggtatgtccattgtgccaaaatagcaatatgcgaaccgagcaagcagatacaaacacttctagaaactccatgcaggcctcaataccgccgctcgcattggttagtcgaaatatcagcgcgcaaatagccgaccatctggagaacctcatcatgaccggcactctggttccgggaacacggctgcctaccgaacgtagcctcgcagaggaattcaaagtatctcggacttccgtgcgcgaagcgttgtccgaactggaatcgaaacatcttattgaacgggttcagggacgcggtagtaccattctggaccccatgtcgaacactaggaaactggccacgatgctggaggcctcagacatggagcttcagaatgccacggaattgcgagaatcggtcgaacctcacatcgccgccttggcagccgaacgagccttaccaactcatgttgcggccttggaaagtattctcgaaaaagagaccgacgaatctctcagtcaagaaaaatcgatgaaactcgacatccaattccacctactgctcgcccatgccactggcaacaaactactgctcacagtgctgcagttcgccttcaagtgcaccgaacatgtccgcgaacgttcccaccagaccgccaccggcagacggatctctcatctgggacaccagttgatcttcgaggcggttaccgcacacaacgctgagggtgccgaacacgctatgaaaagacaccttgccgacgtacacgacgtcagcgcccttgccagctgaaaaaacttccgcccgcgttcccacggaaaaacctgacatacggcagaatgaaagaaagataataacagtattaaggcaaggagcgaaccatgaccgtaccgcaacgggtgttggacatcatgaattccggtgaagtgtatgccttcgacgatccggagatcctgcaggcgcaggctgatcagatggagttgctatacgagttcaacgccagtcgaccgagcgagccggaacatcgccgcgccatcgcggaaaaactgcttggcgggtacgaggagggcgcgtggatcgagccgccgttgcatgccaactggggttgcaacacgtatttcggacgtaacgcatatgcaaatttcaatctcacgcttgtcgatgatggcgaagtacacatcggagagaaggtgatgatcggtccgaacgtaaccatcaccaccaccggccacccgattcgtccggacctgcgcgagcgagcgacgcagtattcgctgccggtcaccatcggccgcaacgtatggatcggtgcgaacgtgaccatactgccgggtgtgacgattggcgagaattcagtgatcggcgcatgttcgctcgtcaccagggacatccccgcaaacgtggtggcgtatggccaaccgtgcaaggtggtgcgtgaaatcggcgaacatgacgacgtctactattggcacgaccgcaagatcaatccgccgttcgacgtgctgccggagtagtcgaatcgacgttgagcctacgcacatcaggcaacctttacgcaacgaaattcctcgaatcggaaaccgtttcgtcatattcggattttcccgttagcaattcggtgatagctcttttgtgtcagtgttttcccgatacaaaagagaggtgtttcatgggagacgatacgatgatgccgatttcggcgaacgtacgggccgtgccacgttccggtatccgcgacgtgttcgaccgtgtgattggaatcgacgacgtaatctcactgtgcgtaggcgaacccagcagaacggccgcccctcatgtcgtggaggccgcggccgaagcagctcgggatggcaagactcggtatagcaatatcctcggcatttcggaatttcgcaaggccgcggcggactattcacgccgcgtaaaagggcttgactacgatccggaaaccgaaatccaagccgtggacggtgccaccatcggcctgtttctagccatcaacacagtggtagctcccggcgacgaagtgatcgtgccatcaccgtatttcgcatcatataaatcgtccatcatgatgtgcggaggcgtagccattcccgtcgcactgcgtccggaaaacggcatgcacctcaacgccgctgacattgaggcggccgtgaccgaccgaacgcgcgccatcatcatcaactcacccggcaatccgagtggcgccgtcaccacagccgaagagctggcacaggttgccgaagtttgcaagaaacacaatatttgggcgatttccgacgaagtctaccattcgatcgtctacagcgagggcaaggatggccgacctgccaccgcaccatccattgcggcggtgccgggtatgaaggcacgcaccatcgtcgtcgagagcctgtccaaaacgtacgccatgacagggtggcgcatcggttatcttctggcaccaacatgcatcatcgagcagaccagcaaaatcgcagaaatggtgcattcctccgtcaattcggtatcccagtatgccggcgtggccgcaatgaccggcccgcaggaactggtcgaagacatgcgccaggagtatttcgtcaaacgccagattgtcgtcgacgagctggccggttgttccaaactcagtctgatcgagccggagggcgcgttctacgcgttcatcgatgtgcgagctaccggcttggattccgacgatttttcccgcggactgttgcaggacaagcacgtcgccgtggtgcccggcgaggcattcggcgaggagggacgcggttttgtgcggttatcgtacgccggcgatgcggatgagttgcgtgagggactgcgtcgtatgcgcgattttgcggagaggaatcgctgacgccgtcaggtgcatgccaatccctcgtcgcgttcacccactttgttgtgtatgtttacgatttgtataatcgtaaacatacacaacaaaatcatacgatgaaacggcggcacctatgcgattcgtgggcagaatagacgaactcaaagcgctggaagcactgtatgccaaggatgcgttccaactagccgtgatttacggtagacgccgcgtgggtaaaactgcgctgatatcacaattctgtgccaacaagcgagcgctcatgtttaccgcacgagagcagagcgacgcggaaaacctacacgacttctcgcagactgtgtactcgtttttcaatcttccgcaatccaccggcacattcggtagctggcaggatgcgctaagttttgtggcggaacaggcatcactcaatcacacggaaccattcgtattcgtattcgacgagttcccgtacgcggcgctatcgcaaaagtcgctgccgtcaacgctgcaaatcgccattgaccaccaattcgccgcaacgaacgtgaccatgattttgtgcggcagcaacgaaggattcatggaaagcgaggtactcggtagcaaaagtccgctgttcggccggcgcaacgcacagatacgcctgcaaccattcgatttgttcgacgccgctgagatgatgccgcatgacgcctcttgggaagacagaatcaactattatgcagccttgggtggtaccccctattaccttcagcaacttaatgaaggcgagtctctcgcacagaatctggagcggctatgcttcaccacttcaggcatcctctactccgaaccggaaatgctgatgcgccaagagctccgtgagccggcggtatacaacagcattctgaacgcgcttggtgctgggaaaaacacgccgacgctgattggcgatcaagctggcatcgatcgaacctccgtaagcgtctacttgaaaacgttggctcagttggggatcgtgatacgtgcagtaccgttcgggcaaaatcctgcgacttcgaaaaaaggattgtggcaattcaaagacccgctcttcgcctactggtaccgtttcgtcggtccaaccgtcgggctggtggaacgcggactctctcaatccgccgccatccacggtacgcagggcggtgcgttcagtacgttcgtcgggcagcagttcgaggagatgtgcgtgcagtgggtggttcgccgatgccgcaatggcgagcttgatttcctaccgacagaaatcggcaaatggtggggcaacgacccggtcgcacgtgagcagacagatatagacatcgttatggaggattccatcaacggacgcatgctgcttggcgaatgcaagtggcgcaataccgtgaatgaagccgaagcggtggcaacgttgcgagggcgtgccggcttggttccaggcaaagcaagcaagcagttcatgctgttcaccaagcatccggcgaacaagacgattcaacgtcaggcgagcgctgacgcttcactgacactggtggatgcggagacgatgtttttccagcagtgataccacataaggaaacccgcccggaaaatccgggcgggcaggaaggcaggaaggaagaaaggaattcagaatagggctacctggcggcctcctcgctcttggccgtctccttggactcgcttttcggcatgacccagaacttgagcaacggatagctcacgaccacggcaagcaaggtgttgaccacggaggcgatggtgcccgcgacgccggcattcataccccatccctggcacagaccggttatatagcccgggagtacaagattcacgaccacgatgatcacggcgagaatcacatacttccaagcggcgtccctgaagctggagtcggacttgaacacccacttcatctgtacgaagaagttcaccacctgcgcgagcacctcagcgagcaggaaggtcaaaaatccgcccaaaccgttgcctttggtgtcgtagttgaaaatcaggaagtggaacggctgcgtgagtcccatgccggaaatgaagatggcggtaccgatccacgtcaccacaaaacgagtgatggtggagatgttcgacaacacgttgaacaggatgaactcccagatgttcggatgatccttgatccaccggcggatcgggccgaccttttcggcaggctgcatcgcgttgttgtcagtcattgttcagctcctttgcggtgcgcttgttggcggattggttgcggaagtagccggcgatcacgccacccaatccgcggaaagtatggccgttggcgatttttacgatggcgtcgaccatcgccgagtcgattctgccctgggtcatcttgctcatggcacgcggtggcatgttcagcacgaacaaggtgttgagatccggagaaccggtcttctgcctgatttttgcttcctgcttggtgagcgttttggcgatggtgcgcgcgacgaaacccttggagcccgcccaagacatgatcggatcattcacaccgaacgtcatcggcttgcccggggcgattacctcatgaccgaacagaaccgccatctccgtatcggtcacatccttgacatgaccggtcagataaccgccaagcgcaggatttgccggggtgacccccatgtcgcccacaacggcatatgcgacggacagtggcagatgttcggcgttatcgccgaccagcagcgtccatgtgccggattccgtccgccatacgttggccgcaacgtcgaaatgacggaaggtgtaacggtcgaacggaatggtgaccttcttgctttcatgcgcgtcaagccacactttgacgaaacccttgagttcgcgatccggacgcaacacgcctccctgcggtccgcgcacatagagctgtgcaacggttgcaccggcgatatcggaatcgttggtgacggtgaacgtcacaccattatcgtccgcgctgagatcggagaacgtgaaatcgctgtagctcagaccataaccgaacgggaaacgcactggaacatcggcggtctcgtaatagcggtaaccgacaaacggaccctcgcggtagattgcatcacgtccgatcgccggataccagccggcgctcgggcaatccccgtatacgagcggccatgtttcggccaggtgaccggaaggattgacctcgccggtaagtgcgcgcacggtcgcagaggctcctgcctgtccggaaaggccgacatacagtacggcgacaacgtcatccatccagggcaattcgaccggagaaccggcgacgagcaccaccacaatcggcttgcccgttccctttagggcggcaatcaagtcattctgcacctgcggaatcgccatggtggaacggtcaagaccttcggattcactacgctcgtcgagaccgatcacggcaagcaccacatccacactgtctttgccggcgagcgcgatggcgtcttcaataagtcctcgatcaatcgcgccctggcggtcatagcctggttcatagccggcaagatgcagaccctctgcgttcttgacttcctcaagaatgttttcttccctagtggcgttcaccttggaggagccggagccttgatagcgcgcagtggcggccatatcgccgatgacggccacgcgggtgcccggtttgaacggaagggccgcattgtcgttcttgagcagcacgcttgtgttttcggcgactttgcgggccacttcgtgatgtgcgacggcaatatcgtctttgagcaggtcatcacgcccaacgccgaccagtttggtggcaaccgcgattttggcgacttccgccgcacgggcgttaagatccgcttcggacagtgttccggctctgacggcaccttccagttctcgcacggaagtgaagcccggagacggcatttccagcgacccaccggccttgactgctgcgaccgcggagttggaaccgccccagtcggaaacgaccataccgtcgaatccccattcgtcgcgtagaatctcctgtagcagatgcttgttttcgtgcgcatagacgccgttgatctcgttgtaggaggtcatgatggtcatcggcctggcttcgcgcactgcgatttcgaagccggtcaggtacagttcacgcatggtacgctcgtcgattacggaattgctggcttggcggcggagttcctgactattgacggcaaagtgcttcgggcatgcggaaacgccgttactttggatgcctcgaatcaggcccgccgccatacgaccggcgacgaccggatcttcggagtaatactcgaaattacgaccgcacaacgggttgcgtttaatgttcatgcccggaccgagcagtacgtttacgtcaagatcgtgcgcttccttgccgagcgcttcgcccatttcctcggcgagtgccggatcccaggaattggccacggtgccagcggtcgggaagcaggtggccggcttggatgccccgatgccgagatgatcgccttcgccgagttgtcgacgtacaccgtgagggccatcgctcattacaaagctggggatgccggccctgctgttgcctcgtgaatcccattccgacccaccggaaagcatcgcagctttttcgacaaccgaaagttcttcgagttccattggttctcccttgcactaactcgtacgcaaaccgcctggctctctcccgagccatgccgctcttcgcgaatcctttctgctgcaccgcatacgaaatccgccgctagtttgattgaaccagccgccggcagcctgcgaagcccgtattacacaacctgtcgttttacccgcacaatcagtctgcggactgcacccattgccctggaacgccgttgtcgaggacgtgcctttcacgtgcaatcacaaaggcgacgcccacgtttgtcgtgaagcgtcgccatggggcagttggttgtaagtcttggctagggggatggcgatggctacttggccgctgccgccttacgtcggctgaggaaacgcttgatagcaagtgtttcgagacctaccagagtgacgcccagcaccacgtcgaccacgatcatggtcaccttccaacccggcatcggatcggctggctcgccgtccgcgtagcgccagctgttgaccgccgtgtagaggatgttgtgcgtagccgcacgcatggccttaacggaggtggcgctgtggtcggtgatgtgattggtggtttcggtggtggccagcattgcgtcggtgccgccacggattgcctgatcggctgtctgataggagtagttggagccggagaagtagtcggtttccacgaagcccctgaaaccccactcgccgcgtaggacggtctggttgagtccggtgtgggcgctggaatatgtgttgccgatgtagttgaacgatcccatcacggcctgggcgtcgccgtcggccttgattacggtttcgaacggcttcaggtacagttcgcggatggactgctcgttggcccaagtgcatagctggccgttgcgttgggtttcctgctcgttcagcgcgaagtgcttgatgaacgcgtatacgccacggtcggcggcaccgagcacctgctcgccggacaggtcgcccgacagggtcggatcctcggagaagtattcgaagttgcggcctgcaaacggtgagcgatgcaggttcacggatggcgcataccaaccggagacttgcatttcgtgagccatgtcgccgatggtttcaccatattcacgggccaggtccttgttccaggagcaggcaagcacgatattggacggcaggccgatggagctcacgccggtaaagttgtccttcagggctgccggaccatccacatcggacagacgcaccttgccgatcgacttgatggccgcattctgatagccagcgttggcgatgaggttgtccatgtcatcgaaggtgagctgatcgagcaaccggtcccacttggcgtcattgtagtcgacgccacgcaagtcgacaagtcgcagaccgttccttgcaccggtagttggcatgtcgtcggagtcattgtcgaacttggtcggatcgtagttgccgacattgtagaaggtggacttatccttatccgacatggagtagttgaccgggcctgccagcgcctccttcgcgttggcgaagtggtcggcgcgactcagatagttgagcccgccgttcgcatcgtcgaacacgttggtggctacgatggcatcgccgttgtgagtgttgtcttcgctgttgtaggtgatggtcgaagccacgttcacggtcttttcgtcaacgatgctgtgcgagtcggtacgtacggagattcggtaatctcctgattccagcacataggatttggcgttccggtaatcgtatgacgccatatcgtcatcgtcgaattcgatggagacggtttcggattcaccaggttcgagttccttggttttttcgaaggaaaccaggttcgcgctgactttttcgatgccgccattggtgtatggaggattgtagtagacttcaaccacgtctttgccggcaacatcaccggtattggtgaccgtcacatcgaaactgatcgtgccggattccgtatcgtacgcgacgctccccatcttctcatcaaagctggtgtagctcagcccgtagccaaacggatactgtaccacggaatcgtagtcgatcaggccttcgtccgctgcggtctcgtagtaccggtagccgacatagatgccttcgttgtaattcacgaagtgcggaaaacgcacgccgcgagcggagtcgacctcgaattccttgacgttgtcatattcgaaattgccgaagttgttccacgtcggattggcggtcaggtcggtcaggaacgtgtccgcggtacgtccggatggattggtcttgccggcaagcacttcaccgagtgcctcgaatccggcctgtcccggatgcggcacccaaagcacggacttgatttgcggatagtccttcgcgaagttcaactcgaaggcgttggcgccgttgtataccagcacgaccttctcgaagttcttcgtaaccaagtcgatcatgtctttctcggactgactgagttccagataatgcgtaccctttggaaagtcctcgtaatccttggaattgtcgttgtaggttacgccatcggccttcatatcggtcggcaggtcgagcccttcgcctcccacacgtccgataactaccattgcggtgtcggagaagttcttcgcattgccgatgagttcgtcggcataggtgccagccgccggttcggggagggtccagtcggctgaggtcacggcgatgacgccgcgggtggtggaatagtcggtatagaacttggtcagttcttcgttggtcttgaagccggcatcatgcagaccatcaagcaacgtcgtggtgtcataggcgtcggacagcgcaccggaacccgtaccgccatagatcgggttggtggacgcccagccgaatacattgatgttgccggcatcgttcatcggcagcatgccatcattgttctgcagtagggtgatgccctctcgttcgatgtctacggcgagcttgttggttttgtcgatggtttcctgcgtcagctcatgcttggtagcggtggccatggtcaacatgttgttaagcggaccggtcagggccatggagatcgatacgattgccgcagtcgctacaacgacccagctggtcgaacgcaccagcttacgcatgccttgattcgttacggttttcttgttgatcgcgatggtcacgatgatgccgagcatcagcgccacggcaacagctatgagttgcggtgtgatggattgaattaccgcgatgacgtcatccatgttgatttccagcatggcgattccttcctaggtttctctgttcccacgccttccgccacagtgcggacggcttgatggctccattgtctggaaaatggaaatcgcaaaccaatctgaaaatcatacgaatcatcatgcaaaaatcagatacattttctcgcaagtccatctaactcaatattttcaagcgttgccagcttttcttgatcggccacggttcaggcatttcaacaaaaagcccggataacctgtcgttatccgggcataatctgcaatgcttcttaagcttcctcatgcagtcatctcatcccatacgcaccaaaccgcgtatgagatcagcggacagatcaccgccgaagtaatcacatcggtcggaaaatgcaagccgagaaggagtcgcgagcaggcgaccacgaaaacaagcgctacggcaccgattgccgatctgcgatggaacactctcactcgatcccattcagcgtctgagaagcgtttacaggcccaattgcgtactgtcagaatcatcatgacggatacgatgaccgccgcggccgtatgtccacttggaaagctgggatcgcccggcaataggcctgatctgatagaggtcacgggacgaggtctttcgacaacccacttgatgccggtcacatacagtattggcgtggccgataccacgatgtctctgatgacgattcttttgttgccggtgatgcgcatatcgatggccgccagaatgaccaacaacatgatgcaccctatggtggaaaacatgtacgccagtaccgtcgagcaatcatgtaaatattccggccatgtggacagtgcctgcagcacgcgtgtctcacgcgtggttacgattgccgaattccgcagtgtaatgccgatcatcggtacgaggccacacagtatggccgttgcgatcactacagcggcggtcctattcttcgtatgcataccacgaatggtaaccgcgtatctgccctccgtttaccttggatggcggattccaccaattctcccacgccaatgtagcaggggtgcctgttggtggtggatacgaaaaatccccggccgggcgaaaaccctccggggatccgacaagaacgtttgcggcggcgtgttactctcccacaccctgccgggtgcagtaccatcaccgtgccaggccttagcttccgggttcggaaagggaccgggcgtcacacctgggccatggccaccgcaaaaaccaccatcaacggcccggacccccaaaaaaacaggggaccccgaccggccaaaaggaaaaccacccacgcgccgccaccggcgcgtgccgtgacggtccgggaaccggacagcggacgcgaacaccgtttcgtgaccacaggaacaacgctccttgtcgccaacaatcccgcagcagcaaagacgcggacccacccccacacacaagggggaatgggctgctatgtcgccgtcgcccgttagtaccggtcggctccacccctcgcggggcttccacctccggcctatcaaacacgtgttccacatgcgggcttcaggaccccgaagggcccaaggaatcctaatctcggagcaggcttcccgcttagatgctttcagcggttatccctcccgaacgtagccaaccggccgtgccgctggcgcgacaaccggcataccagaggttcgtccacccaggtcctctcgtactatgggcaggcctccccaggattccaacgagcgcagaggatagagaccaaactgtctcacgacgttctgaacccagctcgcgtgccgctttaatcggcgaacagccgaacccttgggacctgctccagccccaggatgcgacgagccgacatcgaggtgccaaaccatcccgtcgatatggactcttgggaatgatcagcctgttatccccggggtaccttttatccgttgagcgatgccgcgcccgtgcgccggcaccggatcactatctccgactttcgtccctgctcggaccgccgtcctcgcagtcaagcccgcttgtgcgattgcactcgacacccgattgccaaccgggctgagcggacctttgagcgcctccgttactctttgggaggcaaccgccccagttaaactacccgccaggcactgtccctgaacgggatgaccgttcgaggtgagacgtcaaacgagaacagagcggtatttcaccttgcggctccgcgcgggctggcgcccgcgcctcgaagcctcccgcctatgctacacaatccgcgactgacgccaataccaaggtatagtaaaggtcccggggtcttttcgtccttctgcgcttaacgagcatctttactcgtactgcaatttcgccgagctcctggtcgagacagcggggaagtcgttacgccattcgtgcaggtcggaacttacccgacaaggaatttcgctaccttaggatggttatagttaccaccgccgtttaccggggcttgaattcaccgcttcacccccaagggggctgacggatcctcttaaccttccggcaccgggcaggcgtcagtgcatatacagcggcttacgccttcgcatgcacctgtgtttttggtaaacagtcgctaccccctggtctgtgccacccccacacgctcccggagcatgtccgttcacccgcgggggtctcccttatgccgaaggcacgggagcggtttgccgagttccttgaccaggattcgctcgatcgccttggtattctctacctgaccaccagtgtcggtttggggtacgggcggcaacgcgcctgacgccggggcttttctcgacggcctggaccaccggatatcgagccgaaacggctcccatcatcgcacctcgccatacacgccgcacggatttgcctatgcgactggctgcgtgcttgaccacggaaaaccacctccgcggccggctcccattccgtgtcacccctgcgctcacctaccacggctacgctcccaacgccacgcgccggaccccacccgaaggaggggaacggcccgcgacggaggttagtactcaccgcctcggtcctgtcggttcgctgccggtacgggaatatccacccgttcatccattcgactacgcctgtcggcctcgccttaggacccgactcacccggggacgacgaacgtggccccggaacccttggtcatccggcggacgggatcctcacccgtctctcgctactcatgtctgcattctcactcccgcaaagtccacggcacggtcacccggccgcttcgccccttgcaggacgctctcctacccggcgcgcatacacgcgccgccgcgtcttcggtggtgtgcttgagccccgctacattgtcggcgcgggaccactagaccagtgagctgttacgcactctttcaaggatggctgcttctgagccaacctcctggctgtctatgcggccccacatcctttcccacttagcacacgcttggggaccttggacgacggtctgggctgtctccctctcgacgacggagcttatcccccgccgactcactgccggcatacacatcaacggtattcggagttcggctgctgttggtaccccacaagggcccgcaagcatccggtagctctacccccgcgatgcaataagccgacgctgcacctaaatgcatttcggagagaaccagctatcacggaatttgattggcctttcacccctagccccaggtcatccccccggttttcaacccaggtgggttcggtcctccacgcggtcttacccgcgcttcaacctgcccagggctagatcatcccgcttcgggtccaggacacgcgactataaaaacgccctgttcggactcgccttcgctacggctgccccacgacgggttagcctcgccacgcatcactgactcgcagactcatttttcgataggcacgccgtcaccccgcaaggaggctccgacggatcgtaggcgcacggtttcaggaactctttcactcccctcccggggtgcttttcacctttccctcacggtactggtacgctatcggtcagacaggtatgcttagacttacaccacggtcggtgcggattcacgcgggattccacgaggcccgcgctacttgggacacgcgatcggaagacggcaagcgtccaggtacggggctggcaccctctgcggccaggccttcaagcctgttcccctggcaagccgttttatgactcccgcccggtccgtcggaaccgggacacgcgctccctcaacaccgcgcacgcaacccccgacgggtatcacgcgcacgcggtttggtctgatccgctttcgctcgccactactcacggagtatcccttcctgcaggtactgagatgtttcacttccctgcgtaccccccgcagaagcctgcggtgccggcccatgacggccggcgggttgccccattcggaaatcctcggatcgaagccatgctggaggctccccgaggcttatcgcatcctcaaacgtccttcgtcggtactgtctgccaaggcatccaccatgcgcccttgcgggcgacacagccaacggccgtgccatcccgcggctttcctgatagcaagattgccagacgacaaatcatcgcactgttcaaatgatcacaaaacgatcgatctcgaaaccaaactcaaaaagaagagtttggcgaaatcgcgataagcaaagggaaaacgaaaccgttctccctcgctcgcgtccactatccagttctcaaaccgccacgcgccacacgttccgccacgcgcccaacggacgccggccaccccgcatgggcatcgaaccgcaccacaatccaagactgtggggtggcggtccgggaacccaaaagcacacccataccacccccggacgggacaggcccatccaagccaacgatctcttccacaccagcatccccacacgggccgtggaaccgttccacgcgcatggggcacacaccggacacgaaccgcgtcctgaactctccgtagaaaggaggtgatccagccgcaccttccggtacggctaccttgttacgacttagtcccaatcacgagcctcaccttagacggctccatcccacagaagggttaggccaccggcttcgggtgctgcccactttcatgacttgacgggcggtgtgtacaaggcccgggaacgcattcaccgcggcgttgctgatccgcgattactagcgactccgccttcatggagtcgggttgcagactccaatccgaactgagaccggttttcagggatccgctccatgtcgccatgtcgcatcccgctgtaccggccattgtagcatgcgtgaagccctggacgtaaggggcatgatgatctgacgtcatccccaccttcctccgagttgaccccggcggtcccccgtgagttcccaccatgacgtgctggcaacacagggcgagggttgcgctcgttgcgggacttaacccaacatctcacgacacgagctgacgacgaccatgcaccacctgtgaacccgccccgaagggaggccgcatctctacggccgtcgggaacatgtcaagcccaggtaaggttcttcgcgttgcatcgaattaatccgcatgctccgccgcttgtgcgggcccccgtcaatttctttgagttttagccttgcggccgtactccccaggcgggatgcttaacgcgttagctccgacacggaacccgtggaacgggccccacatccagcatccaccgtttacggcgtggactaccagggtatctaatcctgttcgctccccacgctttcgctcctcagcgtcagtgacggcccagagacctgccttcgccattggtgttcttcccgatatctacacattccaccgttacaccgggaattccagtctcccctaccgcactccagcccgcccgtacccggcgcagacccaccgttaagcgatgggctttcacaccggacgcgacgaaccgcctacgagccctttacgcccaataattccggataacgcttgcaccctacgtattaccgcggctgctggcacgtagttagccggtgcttattcgaagggtacactcaccccgaagggcttgctcccgatcaaaagcggtttacaacccgaaggcctccatcccgcacgcggcgtcgctgcatcaggcttgcgcccattgtgcaatattccccactgctgcctcccgtaggagtctgggccgtatctcagtcccaatgtggccggtcgccctctcaggccggctacccgtcgaagccatggtgggccgttaccccgccatcaagctgataggacgcgaccccatcccataccgatggaacctttcccggaaggacatgcatccaaccggagcatccggcattaccacccgtttccaggagctattccggtgtatggggcaggtcggtcacgcattactcacccgttcgccactctcacccggaggcgaacccccgggatcccgttcgacttgcatgtgttaagcacgccgccagcgttcatcctgagccagaatcgaaccctccacaaaaaaccatgaagagaaccgaaaacgactctcacaagaaaattgacgatcgccttataaggaaaggcgcatcgcacgaaaaccccaccgtccttcaaggcctcccggccactcgccgaaacacggcgagccgacgatggactggcaatcattgactataaagaagtagtacagatacgctcttgagttctcaaaccaccaccgcaccagcagaccgccccgaaccatgggagccgggccgccgtgctgagcagcaagagataaacatacacgggaacccgcgcccgcgcaaccccgcaggcacggaaggacccggaaccgttgcaaacacacgcctcccccggcgtgtcgaaaacccgggaaaaccatccggaaatcaccgacaccaccagaatagccccgcaaaactacgtccagatgaacgccatccgaacaacaaacggcgtgtcgcacacatcgtaaggcaaaacgccaaagccaaccgacgccaatcacaaacgaaagcgatagacccataagcgccgcgaagcccgaaacgagccttttccgattacacaaggcgcaagggcagcgaacgaagaaacttccgatatgaaaaaagccggaagcaactgcacgaacagctgacttccggcttgatcattcactgatcattcagttatgggatacagaaacgagattactcggccttatcgggttcgaccgtagccacggtcttcctgcgggccatgtagcgcctgatggtcaggaattccagaccgatgacgagcactgctgccacaccccagactacgtagaggatggcctgccagaccggcaattcctcctgcggctgaccgtcagcgtagtgatagctattagctgccatgtagaggatgttatggcaggcggtacgcatcgccttcactgaagtagcggatttgtcagtgatgttgttggtaaccgtagtagttgccagcatcaggtcaccaccaccgcggattgcacggtcaccgttcatgtacccataaccgccgaaatagtcggttagtacacaaccacggaatccccactcgtcgcgcaacacagtgttaagcagacgcgtgtcggagccagcccattcggtgccgatgtagctgaaggaactcatagtagccgtcgttccgccttccttcacgctcatctcgaacggcttgaaatagatctcacggattgcctgctcgttggaccagatgttcacctcactcaggcggttggtttcctgatcattgagagcgaagtgcttcatgaaggagtacacgcccttttctttggcaccggcaatctcactggagctcatagtaccggagagcagtgcatcctcagagaagtattcgaagttacggccggcgtaagcgttacgatgaatgttcatggctggcgcataccaaccagaagcgttcatatcatgcgccatattaccaatcatctcaccgaactgcttggcgaggtcacggttccaagtgcatgcgaatgaggtggaagccgggaaaccaatggaaccgactttggtaaaattgttgttcaacgccgcaggtccgtcaagatcggccatggcgattttaccaatagactttatggcttgcgtaccataaccgccattggcgatcagggtgttcatgtcatcaaaagtcaattggtcgagcaacttgtcccaatcggcgtcgtcatagtccttgccggccaaatcaccgagttcaagaccgtttttggctccggtggttggcatttcatcggaatcattgtcgtactgggtcggatcgtaattcgaattattgaagaacgtcttcttcacgtcttcctttaaggtgaagttggacggagccgcagttgcctcggcatagttcgcgaagtggtccgcgcggcttaggtaagtcacgtcaccagccgcgtcgtcaaactggttggtggccacggtctggtcaccgttgtgggtattcgaatcggaatcgtaagtgatggtctcatcgacgctgatggtcctgccgtcgattacggtgtgggagtcggattggatagagacgttatagtcgcccttctccagcacgtacgccttcgcgtccttgtagtcgtaggaagccatgtcatcgtcctcgaactcgacggtgaccgtctgggacgcgcccggcttgagcaagtcggtcttctcgaacgccaccaggttcgtgctggccttctcgatgccgccattggtgtacggcgggttgtagtagacctcgaccacgtccttgcctgcggtgtcgccggtgttggtcacggtcacatcgaacgaaaccttgccgcccttataggagatatcgcccatcttctgctcaaaggaggtgtagctcagtccatagccgaacgggaagaggacggaggcgtcatagtcgacgacaccttcatcatccgcggtttcccaatacttatatccgacatagatgccttcaacatagttgacgaacgccggggaagtctggccttcctcgaagttttccgtagcgaattccttcatgttgtcatatttgaaatcaccgaaattgttgtaggacggagcctcggtgagatccttgaggaaggtatcgggggtcttgccggaagggttggtctcaccgacgagcacctcgccaagagcagagaaaccggtctgccccgccggcgggcaccacaccacggacttgatctgtggataatcggacaggaagtcgaactggaacgtgttcgcgccgttgtacacgagcgtgacatcgctgaagttcgcggtaaccaggtcgatcatgtcgcgctcggtctggctcagctgcaggaagccctcgcccttctggaaatcggcgtagctctcggaattgttggtgtaggtaacgccgtcggcggtcatgtctgtcggcaggtcagcaccttcaccgccagctcgagtaatcacgaccacggccttaccggagaagtccttggcatcggaaatcagagaatccgtgtactgctttgcaggaacttccggcagggtccaatcctgctcggccatggctacgaccggacgatccgaacgataatcggtgtacagcttagaaagctcggagttagtctcgatgccgacttccttcatgccgtcaagcatggagacagtggaatactgctcattcatagacccggaaccagtgccgccatagaccggattggtagatccccaaccgaacacgttgaccttcttggaagacagcggcagattggaatcctcattcttcagcagagtgatcgcttccgactgcacctctttagccagcttgttcgcagctgacacggtagtgtcggagagcatgtacctcttggccgtagcattggtaaccaaggtgttcaacggtccaaacagcatcatggaaaccaccaccactgtggcgatcaggaatgccagccaagattcggaatgaattaacttgcgcgtgccgacattcttcaccgtcttcttgttgacggcaaaggtcaggatgattgccagaaccagcacaacgccgattgcaatcagatgcggtatcacggatttgaggacgttcatcacgtcaccccaattaatgccaagcatggtatgtctcctccttgattctcataaccaaacgacatgcagcctcgataccgttgtcgaagccaagcgactacacggcactgccccgcgccgctgcgtcaccaagaagtgaggacacctcttcatgccgatgttttgatttcatcaaaccccgtccgaaaagggtcagtcattctcccagcctgtcgattcgcgtgcataatctgcatgtattccgtgcatgatttgcatggaaaatacaccctttcagcgcgtgagagacaagaataagatgccgcaaagtacgatggttgccatgagcgacttaagcgcattgaatctggaagagggcagcctcgtaggcggctatacgctgatcgcccgacttggctcgggcgcgatgggatcggtatggcgtgtgcgggacgatggcggtcaccagtatgcgatgaagattctgcgcgactccctgaccgaagacggcacctcggcggaggcctcccgcgatcagataacggcccgcgaacgactgcgtcgtgaggcgatgtcgctgcagaaagtacgtcatcccggagtatgcggcatcgtcgacatggaactcgacgacgccttggcattcatcgtcactgagctgatcgaggggaaaaacctgcgcgaggacgtacgcatcaacggccgttacgtcggcgatgatctggagcgactgtcccgcaagctcatcgcagcagtgaaggcggtgcatgcggccggcatcgtgcaccgcgacatcaaaccgacgaacgtgatggtatccaccaccggcccggtattggtggatttcggcatcgccatgggcgagggtgaaagccatgtgacccgcactggcctggtgatgggtacaccgggcttcatcgcgccggaaatcattgacggtaccgaatcggatgagatgaccgactggtggtcggtggcgtcggtattggcgttcgccgcgaccggcgagccggtattcggtacgaaaccgatgatggcggtgctggaacgtgcggccgccggtaatgcgaacctgtccggattgcctgccggcaccatggcagcacttcgatcggcgctcgatccggaccgctcgaagcgctgcacaccggatgcgttgctgcaggcgattgcgttggatgcactcaacccgctggtttggcaacaggcacaacagtctgcacaaaccccgcccgcaggtgacgcgacggagatgatgcccccttttgatgaatccgcccaaggagacgtctccaacccgcgcgcattatggtatttgcaggacgacgtcggaggagaagacgccatcggtacgcagaccatgccgcgaatcggagaggccacgcaggtcatcgccgccgacacggacgcacctaccaggacgcttggaaccatggatgcagacaccgatgtcataccgacacaaggtggcacgcgaccacttccgcggactttgcggggcgaacaaacgcaaacgatgccgaccatgccgatgcaggatgcctggaatccgcaaatcgcaccgacgcaggttgacccgaccatcaaaccggccttgcaacgcgtggtgaatcaatcaacggcacaggccgcaccgcaaccgttgccgccgtccgtaattccgcacgccgacatcgcgcaaagccaacaactaccgatgcagcagccgtcgcagccatacgtagtcgccggccagccatcgcaattcgcgtcggccataccgcagaacgcaatcgacccgaacgcgccgcaatcgccgaatcccgcggatgtcaaacgcggtgaatatctgtcgcggggcgtgctgccctgcgctctgctctccataccggtggcaatctgcgcattgctctccccctggatggcgctcggcgtggccttggcactcagctgggtgctgttcaccatcggatgcaatgtggagtcacagcttgaacgcgaaggccgccgaggcggcgaacgacggaaatccgattgggccatccgcgtggccagcctgccttggcacatgctcaaaggctttggctacgcctgtgcccgcatgctgatcatggtgatcatcatggcattgggattggcgatatccacgcttgccttgcatctgccatatgcgctgctcgatgtcgaccttttcggtctgaccgttcccctgccgacattcaccgagggaccgctttcgcaaagtggactcgtacaggcgggattcggcgtaatcggctggctggtggcagccatcgcgccgggcgcgatggtgatgcggctcggcgccgggtcattacgcggcgcacggtagacggccgagcattatcgggcgaacgccctcgaaaccgtgcgacgtaccgctccgaatctccccttacgtatcgataaggtctcgccgttactatggtgcacagcaacatggtgccgcaatcactgggaaaggaatgggatggcccagagcaacaagaacgcgcagaagcgcgagagccgcgccgagcggagggccgccgaagccgcggccatcaaggcgcgtgccgaacaggcggaaaaggaacgcaagcagcagacgatgatcggcgccatcgtggtggcggtattggtgattctcgtcgccatcggcgcgttcaccgtctatcacaacatacacaagacaagcgatgcgcaggatgagctcacggtcgagcaggcctatgacaaactgcaggaagtcaagaacacgccgactttggtcgacaagaagggcggcctgctgatttccaagaacggttacggcaaatccgtggaaggcgcgccgaccatcgccatctatatggacttcctgtgccccggttgcggcaatctgcatcgtcagttggatgaggatctgcagaaaatgatcgatgcgggtcagattaacctggatctgcatttcatggcgttcatggaccgctggtccaccgacgaatattccagccgtgcagccaacgccgccatgtatctggccgagcatgacagcaatccggagcatctgatctccttcttggagaagatgtatgccgaagatttccagccggaggaaggctcgaactacaagtcggtgagcgacgccaagatcaagaagcagatgattgcggccggcgtttccaaggatgtcgccgacaaggcgttcaaccgcgaatatcaggattggctcgacgccattgacacgtatacgccgaagcgttccgaattgtggaatgtaagcggcaactacaagggcagcatgaccacgcctacggtgaccatcaacggcaagttctgggatatgaaccagctgtcgaccgccaagatgaccaccgctgaaggcctgctcgaagccatcggactcaaggcggatcaggtcggcgtcgccggcgacatgccgtccatcggttccaagaaaggtccgatttccgtcaccaccggcgagtagtgaccagccaccagcgcgccctaaggcgcacaagtcgagttgactgctttgggtgcgctggttatgctattcaagcgttccacttttcgaaaatccatttcggcaggtgacagcaagcctccttagctcagatggccagagcggccgccttgtaagcggcaggtcgtcggttcgatcccgacaggaggctcgaacccgatttctctcgggaataattcttaccatgggtaagtaatccagaagccttcccccaacttgtggcttctggaaatcgggcgaggcgtcccccaacctgtctcgcccgatatagggggcaggacatccccttctctcctgccccctttttcttttactaatccccgaaaatgtggcggtatggccaatgcgccggaaaaaccggtctctcattctgcaccgaccattagaatggcgacgttatatgcctgtatcggaaagaggagctatggcgagaagatggacccctcagaggtttgtgatgctacgccgtgtacgtgttgtcatctgcgtcacgacggtcaccctcgcttcggtgctggcattcggagtaggggcacgcaagacggtggcgttgacggtgaacggcgagaccaccaccgtgaccacgtatgcgatgagcgttgaccgtctgttgcaggaacagcaggtgaaggtgaagacccacgatctggtggaatccacatcatccggcaccctgcaaaaccattccgtcgtgacggtacgcagcgcctatcagaccaccgtcaccatcgacggccaagaagtgccgttctggacggtggcgaccagcgccgatcagctgcttggattcttcgaggcgaacgaagcggaggcgtcgaagatcaccgtcaacatcgataacgtttacaacaagctcaccggaggcctggtcatcaatcagaacggcccggtgaccgtcatcgccgacggtaaaagttccgtatcgcccaacggcaagctgccggcggcctccattctcgattccaaaggaatcatcctgaacaaagaggatcgcgtcagcgtcgaaaaagacaatggcgagaccattctgcgcgtgcaacgcgtaacgcatgacgagcagacacgtacgaaaaccgtgccgcacggcacccagaccatcatcgacgcgagtctgcagcccggcgaagccgtggtaaggcaggaaggcgaggatggcgaaatccagcagacctatgacgtcacctatgtggacggcgttgaggaaagcgaaaagctgatcaacgaggtgaccacaaaaatcgccatcgatcagatcatcgccgtcggtccggaaaagaccgagagctccgatgccgacaatgccgacaacggccaagccgattccggaagcaacgacagtgattcgagcaagtccgacaagaaagacgagtcggacaagaaagattcggattcgaccgacaagaagaacgattcctccgagaagaacgattcgacgtccactccaaccactgagccaacgcaaacaccgaccccaacgccgacgccgacacagcaacagcaacagacacagacgacaacgaacccttcggacggctgtcgactctaccatccatcggccgcccaggcacagacctatgcggccggcgcggcagcccagtatggctggaccggacagcattggaccaatctggtcaaactatggaatcgtgaatccagctggctgtggtattcggagaacgcgtcatccggagcgtacggcattccgcaatccctgccaggcagcaagatggcctctttcggcgcgaactggcgtgatgacgcagccgtgcagatcgattggggcctgaattacattgcgcaacgctacggcaatccgacgaaggcctgggagcattccgaacaatatggctggtactgatggaaaacggaaacaacgaacacatgactgaacacacgaccaataacgccatgcaaggccatctgctgggagccgctgacattcgccgcattgccgacgaggccggcataagccccaccaagaaattcgggcagaatttcgtcatcgaccccggtaccgtacgtcgcatcgtgcgcgaagccgcagtgacggccgacgatcatgtgctggaggtcgggccgggtctcggctcgctgaccttggcgattctggaaaccggcgcgtcaatgaccgccgtggagatcgacccgtcattggccgagcgtctgccgaacaccatcgccgaattcatgccggatgccgtggaacgcttccgtgtgatcaatcgtgacgcattgaccgtctcaccggagaacctgccggatttcagcggcgacgataccttcacgttggtggccaacctgccgtataacgtggccacgccgattctgctcaccttgttggaacgatttgacaatctgcattccttcctggtgatggtgcaaaaggaggtggccgaccgtctggccgcgaaaccggggtcgaagatctacggcaccccaagcgtgaagctcgcctggtacggtacggccgaacgtgcgggcatcatcggtcgtaacgtgttctggccggcaccgaacgtggattccgcattggtattgttcaagcgttacgaaggcgggcatacgccagccgccgatagcgccgatggtccggcggcaaagcgtgagacggtattccgcctgattgacgccgccttcggccagcgcagaaagaccttacatgccgcgttgagaagattcgtgcccgatgaggcgttcgatatggccggcatcgacccgacccgtcgtggcgaaacgctcaccatcgacgaattcgtagcgttggcgcgggcacttgacgccattcccggcgaggtgaacgcagcatgaccgccctgccttcagccgtgagcgtcgactgcccggcgaaaaccaatctgaccttgcatgtgggcgcgcctcgcgccgaatggaatggccgccacgagctcgacaccatctattgcgcagtcggcgtatacgatactgtcactgtcgcacgtaaagcgccaggaaccgggttctcgctcaatctcgaaggcgcgcatctgggtgacctggcatcatccggcagcgatatgcgccgtaatcatgccgtactcgccctgttcgccctggccgaagccagcggcaatgaaccggatgtggcgttgagcatcgacaagcgcattccggtcggggccggacttgccggcggttctgccgatgcggctgccacattgctggcgttgaacaagctgtggaatcttgattggccgctggcccgactccaacaggtcgccgccaccttgggcgccgatatgccgttctgcctatcgggagggtatgcgcatggcacaggattcggcgaacgaatcgaggaactgccatcggacggtgataccgtacgcgatctgaccgaccgaggttttgccggacgcttgctggtgggcgcctatcgtgcggaattacgcacgccggaagtatatgcgacattcgatcggatcggcgccggggaaggtgatgacaatcatctgcagcaggctgcgatctcactgcatccccgtagcgggcaggccatcgaagtggcgcttgaggctggtgcaagccacgcattcgtctcgggctcgggaccgtccgtcatcgctttcgtaccggatgacaggacatccgaatccgtaagtctcgcatggcgggagcggcacgcggtcgaccgcatcatcgcggcccaggcaccggccgtcccgattgtgcatatcattgcgtgacagtaaggttggtaccaattgacgttggaaaaaggaactcgcaaatgactcaagctatcgacgagcgcgaagcacgcaaacagtatgtacgccgccgtcagaaggtggtgttctccatcatcggcgccatcatggccgtggtcatggtgatctccctgttgttcttcttccatgtcggtggcctgggcaccgtcaaaacggccacggtgcaaccgaattacggccaacaggtgccctgtgcggtgaacgagcaggacggttccaaaggcaagtatgtggagaaccgcaacattacggtccgcgtgcttaacggcacgaaattcatcggcttcgccaaagcggtcagcggcgcgctggaaaatcgcgagttcaatacccagacacctgacaactacaccagttccaaggtggaacgcacgataatcttcttcggtaagaacgccatcaatcaggcatatacggtgaacagcaatttcaccgatgccatgatggtcatggacgatcgcaccgaccaactgatcgacatcgtggtgggagccaccttcgataatctgcaggacaccaagaaggtgccggccgcaggcaagcaaatcgagagcttcgaaggctgcgtggccgcggataagctgacagatctgccgaaagccgatcaacacgatccggtgaacccaccggagggctgagtgccgaccgcggcgtgcaatgaatgcccgccttcccgatcaggggaaggcgggcattcgtttcactgttcggcgtaccaacgattcagttcggccacagcgacatcatgctcgaccggaccgttatcaagacggtattcaagcatgtgcttgtaggccctgcctaccatcggaccaggttcgatgcccaacagctgcatgatctcgtcaccattgagatccggcctgatcgcgtcgaaatcctcctttttcttaaggtcccgtacacgctgttccatctcatccatggccgacgagaaaatcatggccttgcgacggttctgtgtggtcgcatcggcacgtgtcagacgattcagacgctcataaagcgggccagcgtccttgacgtagcgtcgtaccgcggaatcggtccacggctcctccacatacccatggaagcgtagatgcagattgaccaactcactgacgtcttcgatcatatgatggtcgaaacgtagggctttcagacgtttgcgcgtcattttcgcgccgacggcatcatgatgatggaagctcaccttgccgcccggttcgaaacgtcgggtcttcggcttgccgatgtcgtgcatgagcgccgccagacgcaaggtaaggtccggggccggcaccggaccgtcggggccggtttccaacgccactgcacggtcaacgacgatcatggtgtgctcgaatacatccttatggcgatgatgttcgtcaatctccagctgcaacgccgggatttccggaaagacgatgtcggcaagaccggaatcgaccaacgcctcgatacccgcacgcggacgatctgacaacagcagtttcgtcagctcgtcgcgaacacgttccgcggagacgatatcgatgcgttcgaccatgtctgagagtgcctcggcggtttccggctcgatgcggaagccgagttgcgccacgaaacgcaccgcgcgcatcatacgcagcggatcgtcatcgaatgactgacggggattgaccggcgtacgcagcacacccttgaccaagtcgttcgcgccgccgaacggatcgacgaattccagatccggcacacgcaacgccatcgcgttcaccgtgaaatcacgacgggacaggtctccctccaacgtgtcgccataattgacttccggtttgcgtgaatccggatcataggtatcggaacgataggtggtgacctccaccttcacctcgatgccgtcctcacggcggcgcattgcgcccagcgtgccgaacttgcggcccatgtcccagaatccgtcacggccaaaacgtcgcaggatgtgctcgaattgttcgggacgcgccgacgtacagaaatcaagatcatgtgatttgcggtgcagcagcaggtcacgcacaggacctcccaccaatgccaattcataaccctcttcggcaaacatacgccctaattcaatggcttcaggccatacttcgaagttcacgccatccctttccggcaaccacaagtccctgtgtactttctgcgtaccagcatagcgtgggcgcagtatgggctcccgtgaagcagaatgcaacttcacgcgaatacgaccctggcacaccgagacgcgatgggaaatccaacggactgatgccgagaccggcattcggtcacgcatgcatttccccattccccgcatgccagcatcttgtcgccggcttgcgtaggtttcgcaacactgcctctaggaataaggtgtcgggtttctgttttcaacattgggtgagtatggttaaaaccatgattacgcccgcagaccttgcacgcatgcttgcccatgctgcggacgagcatacccaaaatccgatggaaccggacgaattgctctacacgtcacagtccgtttccttggaacggcagaccatcatcacgcccagcacgcccacaccggcgatgatgccgcagcgacggaccggcgacggaccgaccaccttcgcctcgctggatgcgcaggaactcccggtggtgcgagaatactccgcaggcggactggtcttcgatgaccgtgggcgtgtggccatcatcgccagacattcgcgcagcggacatttggagtggtgtctgccgaagggccatatcgaaaaaggcgagaccccgcagcagaccgcagtgcgcgaagtgcatgaggagaccggaatcctaggcgaagtggtcgattccatcgccaccatcgactattggttcaccggtaccagccagcgcgtgcataagctcgtgcaccattttgcgctgcgccaaatcggcggtgaactgacggtggaaggcgaccccgaccatgaggccgaggatgccatctgggtggatttcaatgatttggatgacgtgctgagctatccgaacgaacggaagatcgcatggctgtacgcaaggaaactcaacagacaggcttaatggtgaatcactccgcatatcggaacgtttcgcgtgccctgcgcgcgctatcggcaatcctcgccatggtgctgaccatggcgttactgctgttatacgttcccacgcatacggccttcgccgaggacgggcaacaggatacgctgaccatcgactcctcgacggcggtgatgacggattcctccggatactacgtgacggccacggtgaccaacaccactgaccatgacctgcctgagggcacgctcacgttggcgttgaacgccttttacacattcgtgtcgcgcaatgacattcaggaatggtccgaaggcaccgcgcgcatccccacgccgaataccgtcggacaggtacaggtgcccgccctgcagccgggcacatcggcaagcgtctccatcgacgcggatgccacgcagcaatcgttgcaggccatcaacacgtggggcccgaagcccgttctgctcagctatcaggccgacaacacaccaatcgatgaagtgcacacgttcgtgacccgttccggcaccggactcaatacgccctccaccccggcgatgaacatcaccgtggtccagccactttcatcggacgggtggaccacggacaccaatgtgctggaacagctggtcgataagggaggtctcaagtcgggtaccgtagcgaaaatcgtgacgctcggcaaggatgacgccaaacccaaggagctggagcaggtcatcgccaagcatgacggcctgcagacaatcgccgatcccacctatctccaagccatgacgatgccaacgcaagtggacggcatcatgcaaccggcatcgttcgacatcaccgcatattcggccatggacaatgcggaaggctacagcagggccggtgtgaaacgatcctcctggaatgccaaaaaggccgtttcaacctatcgttcggcattgggagatgcacgtgcgcaggctcgcatctatgcttggcaaggaacgggcaattggaccagtaaggcactgacgcaggccaaacagcagggatacgatacggtcatcgccactcacgacttcgatgaaagcgacgccgccaccgtggaaaccggcaaaaccgtagtttccaccgatgcaggcgatgtcacggtactgtcggcgcaaaatgtgttgaccgatctggcgcaaggcaaggcaaccagcacacaggccgaggccgacggcgaaggctcctcagcaggcagactggcccgtttcgccgcacaaagcgcgttctaccagatggaacagccgtattcggaccgtaaccttttggtctgcctgtccgccaacggcaatcctgccgatgtggacgccctgatgtccgtcatcgaacaatcctcttggctgaatatcaccgacctcaacacgttggccgacgccgacgcacatctgaccggtgacgatgcgaccgcagcggtacccgacaccgacggtttgagtgccgacaggcgcaccggcatcgagcagacgctgaacaccctgaccgacacgtccaatgacgtcgccagattcaatgcgttcatcctgacggatgatgacaaactcaacgacaacgacgctatcgtcgaatggcgcaagcaactcgtccgcgcgcaatccacgctggccctgcatgccttgagcaacgactccgctcacagcgacacgatggtcaagggcgcccaacagctcgcttcgctactgaccgacggcgtggccattactccgacggacaacgtgaccgtggtgagcgaaacggcgaaaatgccggtgaccatcagcaacagccacccttacccggtgacggtaaaggtttcatcgaggaccaattccatggaaatcgtcacgtcgcgcatggataccgtggaggtgccggcccatggcgaagcccaggtcgcgttcaccattcgcgtggccacttccggcaacgccgacgccacactgtctctgatggaccgacagggcaccgtgttcggtgcagtgcagactacgcatatcaccagcgccctgcagatcagcgacaaaagcggtttcgtaatcatcggcattgccgtattgcttgcagcgctgggcctttggcgacaattcaaccgtaagaaggatcccgacgaatgagttcttccgttggccgtaattcactgatcatggcctccggcaccgcggcttcccgcgtgaccgggcagattcgcaccattttgctggcgtgggcgcttggcaccaccggctacgccgcgaacgcctaccaagccggatcgatgattccgcaggtcatctacacgctggtttccggtggcatcttcaacgcggtactcgtacctcagatcgtgcgcacgctgaaggacaaggacgctgagaccaaactcaacaagctgatcacgttgtccatcaccatgctgctcggcgtgacgctgctgatggccgtctgcacaccgttgctgacgaagctgtatgtgaacggcggtccggacacgatggctctcgccaacgcatttacgttatggtgcatgccgcagattttcttctatggcctttatacggtaatcgggcagattctggcggccaaggaccatttcgtcacctacgcatggagctcggtgggtgcgaatgtcatcagctgcatcggcttcggcgcgttcatcgcgctgttcggccgcgcttcggaacagcccgtcggtttctggtcctccgataagattctgcttaccgccggtacatggacgatcggcgtagcattccaagcgttgatcctgttcgttccgttgactcgtatcggattgcgataccgcccgaaattcggcattcgcggcatcggattgcgttcgatgggaccggtggccgcctggagtcttggcatcgtaggcgtcgatcagatcgtcaacgtgatccttacgcgcatcgccaccagcgccccatatcgcgcccatcagctttatggcatgaatcagctcgatgtcgccggcaacgcgacctatcagaacgcctatacgatctacatgctgccttactcactgatcgcggtatcgatcgctacggccatcttcccgaagatttccaaggccgttgcagacggcaatatcggtgaggcccgcaacgatctgagctccgcattgcgcaatctcaacctcatcatgtgctttctggcgacggcattcatcgtgctaccgctgccgatcgtgcttgcgctgctgccttccgtatccgtacgtgaggcattgctgatcagcgcaccgttgatggcattgggcatcggcctgccctatgccagctcatacctagtaatccagcgcacattctacgccttcgaagacggcaaacatccgttcatcttcatggcgatcaccatgggctttcaagcactcgccctgatcgtcggagccgcattgctgcctcccacgcaatggatcgttctgatcggcgcggtcatcacggtgagtttcatcctcccctaccctctgctgatgcgcatgctgcgaacccgtttcgccggcaatatcgacggctcgcgtattctgcgcgcctatgccaaggcaacattggcggaaatcgtcgcggcggccgtcggcctgctgtgccgtaacgccgtctatacgctggtcggcgcgcatatcggacgggatgatggttccatgaactgggggcaggccgtacttgcggcgatactgctgaccatcatcatcaccgtggtctatctggccgtgctgtgggcgttgcgttccgaggaactgacctctgtcatcgccatggtgacaagccgtattccgggaatgcgcacgaccagcccggacggtagaatatccccagtgccggcaactggcagcactcgaacgaacacacctattacagagccgaaggaacctatgaaacctcagctgggagataccgtcagcaaccgttatgtgctggtctcgccgcttcgcgaagaaacgggtctacaggtatggaaagccagcgaccacgtgctcgcacgagactgccagcttttcatcgtcaatagcaagaaggcgctggccgacgtcaatgcggccgcctccatgctggccatctcgcatgattcgcatttcacgccggtgctgcaactgcagcatgtcgatgacgtcgctctggtgatcacacagcttgattccggcatctcacttagcgattacctgtccagtcccgcagtgcagccattgagctatgaagcgatgcgatccatactgggcgaagtgctggaggctctgcgtgtattgcagcagaacaatctcacgcatttctccatcagcaccgacaccgtgcgtctgactcgcaacggcgtgcagattgccgacgctcccgtcagcatcatgctcgccgacatgtcccgcgtccaatccgcggatggcagggagcagcttgcgattcgccaaatcgccgcactgctgtatgccatgctgacccgtaagccgtcgacgcttgccactgatttcaatctatcggcgctgtcacaggacactcccatggaattccgcgtcatctgcaagcgcggccttgagttgcaggaagaggacggagtcccgaccattccgatggcaacacttgccgagctggatgcgttgctcgaccactatcagccgctgcaggcgctgacggaatccgacatcgcgttgccttccacggattcgcagtgttccatcgtcaacgttccggtgttgcagatcctcgacgaagacaccattgcactgccggataagctggtcagttccggcagtatccccgaactgaatttcgaagctccggaaccacacaccgatctgtctgacagcaaggaggccatcgccaagggcatggccgcgaccagcggtgccgtcaaagcgctatgggccaacagcaaagccgtactcagcgaagaggacatcgacggcgtagtggatgacgccgcgacccaattctcattccccatcacggtgaccgccgattccatatcggatgacaccgatgcggaatcccaattggaaaagaccgggcgcattccggtcatcggcgccgacggtcagatcattcaacccggcgaggaatcccaacgcgcattggaagccgaacgtgccgccattgacgcggcctacgcagccggcaacgcaccggtaccaccaagtttcgcaccgaagaatccgccgactgaagatgattcctccgacgtggcggatgccacattgttcggcaaggtcaagaccaaggtcgtggccatcatcatcgccgtcatcgttgtggcagtagccttgggattcgccatccacggactgaccaagaacacttccacgggcacttccgccggcacttccgcaagcgcctggccggagatgaatcttgacgatgtcccgttcggcaccgagactatgcagccctccgatgactccagctcggcggcggacgccgacgctagcccctccgctacgaagaaggccaccaagcaggcggaagataaggtcattaccactgataagaaggccaagaaggtaccggacccgaagcagccggagaacaacaccccgtatgagatcgacaatcgtcagttcgtgtccaatcccgacgggcagcagggctacggctactatgtgcatctgagtcaaccgcatgatgtctaccgtctggtcatcaagatccgctcttcgggcggtcagggctatgtgcgtgtcaataccacgtcgaaccccactcaaggtgagcaggtggcacagttcgagttcgatgccagcggcaccaccgatgtgaagttcgataggaccgtgaacacgcaggacatcctgctgtgggtgcctttggacagtctgccgggcaaccagctgtatatcgacagcttccaagtgttctaagcgccgtacttcttgttggcgttcctccaggccccgtatcattcgttcttcgtcgaatgatacggggccttcgcatgttttcgttcgcatggcggtgcggaacgttaccgcattcgttacatgacactcgttagtatgtgacctcgtgaaccaagagaacaccgttgaaatcactaccgaaaacgcttcggaacatactccggagaccacccgccacgaacatgtgcgcaatgtcgcagacctgttcgtcgaatgcctggtcaacgaaggcgtacacgtcatttatggcattcccggcgaagagaacatcccgctgatggaagccctggaacgcgatggacgcatacgtttcgtattgacccgccatgagcagggagcgggcttcatggcctccacgcaaggccatctcaccggcaaaccgggcgtctgcatggccacgctcggaccgggcgcattgaatctcaccctgccggtggcgcaagccaacgccagcaccattccgatggtcgccatctgcgcacagggcaatgtgagccgtctatacaaggaatcacatcagatcgtggatctggtgtcggtgttccgcccactgacgcaatggaccagtatgatcgccacaccaagttcggtgccggaaatcatccgtaaggccttctccgtagcacagcggaaacgccccggtgcaacctgtctgattctgcccgaagacgtggccgagatgcccgttccagccggaatcaggccactgccgttgccggatactatgcatatccgcccgacggacggtaccatcgcccgcgcggctgacatcatcagtcaggcgcagcatccgatcattctggccggtaacggcgtggcccgcgctcatgccgagaatcgtctgctggcactggccgaacagctgaatgtgccggtggccaccaccttcgaaggcaagggcgtgatttcggatcatattccgaacgcacttggcgtagtcggtttcatgaaacatgattatgaaaattttgcttttgatgaagctgatttaattatctctgtcggcttttccattcaacagttcgacccaaagaaaattaacccaaatgatgataagactatcattcatatcaatacctttattgaagataccgatgcgcactattcaaccgcattgaatatcatgggtgacatcgaccagactttggaggcgttgatcacccgtcttcaagtgaaaggcattcgcttcgacgaatcgcacccgttgattcacgagttgttgaattcggaattccgctcgtatgcaagcgatgattctttcccgatgaaaccgcaacgtatcgtatatgacacccgtcgcgccatggcggatgacgatatcacgctggtagacaccggcgcattgaagatgtggatggcccgcctgtacccgacgtactattccaacacctgcgtgatcgacaattcgttgtctaccatggcatggacattgcccggcgccgtggccgcatcactggaaaatcctggccgaccagtattggcggtaatgggcgatggcagtttcctgatgaacgtgcaggaaatagagacggccgttcgcgtaggtgcgcgtatggtggtgctggtgtgggtcgacaaggcctatggcctgatcaaatggaagatgaacattcacaatggctcgtacgaggatgtcgatttcgataatccggatgtgctggagttggcccatagttttggagcgcgtggtcatgtgatagaggcggccgacgagctctaccccaccctatgcgaggcgttaaagaaccagtccggcgtcgacatcatcgcctgccctgtcgattacagtgagaacatgaagctcatcgaaaaactcggcgaagtcgatttcggcaactgattttcactgaggtgccaacgatatgatgctggctgtttcacgtgaaacagccagcatccgtcatgttcattccctcttccaaccttcgtgatgaccggttatcgcaaaatacgataacgggtggaatacgccctgagctcatacggcatggctcggcggaagtgctcgtatggtgggaccatgagcgatttgcgagatgtagttattatcggatccggcccggcaggatacactgcagccatctatctaggccgtgcgggatacagaccactggtcatcgccggggcactgactcccggcggacagctggtcaacaccactgaggtggaaaatttcccgggatttcccgatggcattctcggccccgatcttatggacaacatgaggaaacaggccgaaaagttcggcgccgaaatcatctgggacgatgtcgtatccgttaccgtcgatatcgaatccgatacgaagaccgtgacccttgaccaaggcgacatatatcagaccagggccgtggtagtagccaccggttcccagtatcgcaaactcggcgtaccaggcgaatccgaattctccggcaagggcgtctcctactgcgcaacctgcgatggattcttcttccgagataagccgattgttgtaataggtggcggagatagcgccttcgaagaagccgatttcctatcccgttttggatcctccgttacgctgattcatcgccgtgattcgttccgtgcctctcaaattatggttgagcgagccaagaacaatccgaagattgatttcattcttaattccgtaattgaagagattaatggaaatgataatggagttaattcaatttctatacgtaacttgaaaaacgaatctatggaagttatttctgcaaatggggtttttgtcgctattggacacactcccgccactactttccttgatggtgtggtagatcgtgatgaggccggatatatccgggtggaaggtgccagtaccagaaccagcgctccgggaattttcgccgccggcgactgcgtcgatagtgtttatcgccaggccatcagcgccgccggaatgggttgccgcgccgctctcgacgcccaatcctatctgcagtagtctgcccggttttctgccgcattcccgcagcaagtcccgtattacgcgcttgtttttgtcatgtgtccacagagggggaggtgtggcatatcctatttaagaccgtagagactcggcctgagcggcccggagtgcgccgtaataggatatgtcattccctcccacggacatatcaatgaagcggacatatcaatcactgctgctgcatgagcagatcgacgattcggttcatgtcgtcttcggatttgaacacgatttcgatgcggccatgcttcttggatcccttgattgacaccttggtaccgaaacgttgttcaagacccatttgcaccggagtaccagcccagggattcagcttattcgccttgggtttcttcggctgatcgctttcggaaaccttcatcgacacgatttcctcggtgctacgcaccgacaatccttcggaaataatgcgagtcgccagctgttccatgtcagattcggcaggcaggcccaacaatgcgcgggcatgtccggcggaaagcagtcccgaagcgacttttttctgtacgaccgccggcagatgcagcaaccgcagggtattggcaatctgcgggcgtgacttcgaaacggatttggaaagctgcgcctgcgttaaaccgaaatcatcgatcatctgctgatatgcggccgcctcttccaatggattcaatgcaacacgatgcagattctccagcaaggcatcgcgcagcatatcgtcatccgcagtggttttgacgattgccggtatcgtcttcagaccggcaatctgcgaagcacgccaacgacgctcgcccatgatgagctcgtacatgctgtccatgcgggcctcgaacatattatgggcctcagacgcattctttgcgctctcctgcgcctgttcaccctgttccttacgtgcggcctcgatctgctcgcttgggcgcttacgcacaacgattggctgaagcacgccgacttcctgaatggagtcagccaactcacgcaaatcatcctcatcaaagatggtgcgtggctgatgcagattcggaccaacgtcactgagccgtaattcaacaagatagccgccttgaaccggcaacaattccggctcttcgctcttcttgtcagatgattcggtttcacgtgaaacacttgtttgtttttcaaccgactgttgcgacgattccacccccagaccggaaccaccgaagaacatatccgcaggatgggcggtttcattcaaggtaatggaaggcattgcattccgtcgacttgaagtttttttcgcagtttcacgtgaaacactctttttgccggactgtttcatgccatgcacggcatcgacggaggcctgtgcagtagcaacggaagtcttgctatcctgcggtttctcggcagcggcttgaggttcctgcacaacatcttcgtgcttctggctctcccccggcaaagcggggaataacgctccaagacccttgcccaaacgcgacttcgtagccataatcagttctcgtttcttctcgcatcaatagcctgcagcaccgtcggggaacgacgtgcgatttccaatgcagcctcgcaataggaaatcgctcccatacctttcggatcgtaggcgatcacactctgattgaaactcggagcttcggagattttcaccgtacgcggaatggtggtgtcaagcacgatggtcggatagtgctttttgacttcctcatgcacttcacggctcaacagcgtacgcttatcaaacatcgtgaccagcatggtggataccagcagggcgggattgaaatgctcctgcaccaaaccgatggtgttaatcagttgtccaagtccctccagtgcgtaatactccgcctgaattgggatcaacatctccgtaaccgcgcacatggcattgatgaccaacagccccaaactcggagggcagtcgatgatcacataatcatagtgctgttcgctggtgttcagaaattcatcgaccgcacgtttgagcaacacattacggtcagccatatcggcgacttccagctcggcaccacttagatcgatggaggccggcaccacgtcgagcaattcacaatcaggacaggtctgcttgacttcggcaatgctcatacgcccttcaagcacgtcatacacggaaggttcccccgaggtatgccgcgctccaagagcggtggaagcgttcccttgcggatccatatcaatcagtaatactcgggcaccatactgtgccagcgcggaggaaacgttcaccgcggtcgtcgttttgccgacgccacctttctgattggctacggcaatcatgcgagtacgttccggcttagggaacgtcaccttctgcagagcacgatatcgcgatgattcatcagctatctgtgcgcctaacggggaggagcttcctccgaaaatacgtttaatggtatccgtggcggattccatagacgtcaggttgtctggtccttcaggtccagtcatgaactagccctcctcgattacttacagtatgttcaagtttcttcatttgggtggacatgtagtacattgtgcgcaaatgtggataactgtgtatagttggtggataacctacgtggcgcttaaaaaattatccacaggataaacgttgcaatatagcgaaaattttttcatcccaaatcatgacgtctgcaagtgtggacaaagtggataacttcgccaaattgtggataacttatcttttgtcaaccatcagaatatgcgttgactccagtcccggccccacctcggcatcaaccacccgaggacggactcccccgctcttggcgatctccttcgaggccttatcgatctcatcttgtgcggattgtcctttcagggcgactaggcgacctcccgtctcaagcaagggcaacgtccatccggaaagtttggtcatgggcgctacggcacggcaggtcaccacggcaaacggatgacttgtggcaattggattaccatccaggtcgagtacgggagtggtatgcgatattgctcccctgttcttcctgctggttttggaaccgcggatggcatcaatcattgcattggcgcgtgaccgcaccaccgtgacattgtcaaggcccatgtcgttgacgcattcattgagccattcgacgcgacgttccatgggctccaccagcgtgaaccgatgatccggcagacatgcggccgcgacgattccaggaaatccaccgccactaccaatatcagccaccgtcttgaattgcctgcgtaccgttgcttcacgtacaaatggcacaatcgtcgcagaattcaggatatgtcgttcccagataatatcgacgtcatgcggtccgataagtccgcgggtctctccctcctgtgctagtttgtcatgaaagatacgcaacttcacaagcgcatccccaagtacttcttccaaaatcggcgaatcatcaagttcgtcagtcacttcagtcatgctctctatcctataaccacagggatatcaaccacctccataaataacatgacggcagtgttgtagtagagagagggagggcgatgttctttcgtgacagtctaagacacaactggaatattggccttcgaagctgtcacacataaaaaacgccgcacaatggcggcgttatgtttcacgtgaaacgaatcagatttcgacgatatcttcgaaatcatcctcttcggtggtcgttccggcagatcccgacttgaggtacaccgtcacataacgatgcggctcttcaccgtgggagcgggacttcagtccttcctcacgaactacatcatgcacgatcttgcgctcaaaagaattcatcggcttaagatccaccggctcaccggtttcacgcgcttcgtcgatggcgtccaatgcgatatcatgcagacgctgacgcttatgcttaagatagccgtcaacgtccacgatgaggtgagaccgttcgccggtcttctgctgaaccgccaaacgggtgagctgctgcaaggcatccaccacttccccattgcggccaatcagatgcttgatatcagtgtcatcatcggcaacaatctgtacggtcgggcgattgttgcgtacgcccatctcaatatcgccttcatagtcgacgatatccagcaattcttcaagataatcggcagcgatatcagcttcttcattgagctgatcgatggtcttttcatcatcttgcgccatggttgtgtactcctttgagcggggtgtctgttctcagtctaagtcctgtttatcacttcggtaataaccctgaaggaagggcgtgtcccgtgtttcacgtgaaacacgggacaccttgctcacttctttttcttcttgcgagatggctgctgccgctgatacccgttcttcgttttgctctcggctgcaatcttggccttctccaactcctcttcttcgagagatggaaggccggccttgacgcggcgggcattctcatgttcgtgatcacgaacggtcttggcttccgccgccggggaacccggagtcgggaaggcgtagacctgccatagtgaacgacaaaggttcagaatgttgttggcaagccagtacaccagcacagcgaacggcatggtggcaccggagaagatgtacatgatcgggaacatccaaagcatcatcttctgcatcatctcggtctgcttggtttgcggaccattctgaggcatgttgcgcttcatgttgttgtactgcatgaaccacaggcagaagcacatcagcgccacgaagatggcgatgacgaccttaccgccgatgttggccgtcatgaagttatcggtgacattggtattgaacaccgtggtcttggtgaactgcaacgcggtggcctgatcaaaagcgcccagcgcggcacgtttgccgcgggcgatgtatggaatggccgacagcgtgtagaacatgcacatgaatatagggccctgaatcagcatcggcagacacgagcccatcgggttcgcgtcgttgtcctgatacagcttcatcatttcacgctgcatggcctctttgctggcctgatcgtttttgcccttgtatttgttctggatgcgcgccatcttcggctggatttcctgcattttgcgcatcgacttcatggtcttgtagtacagcgggaacacgcacgcatgcaccacgagcaccaggaagatgatggatagcacccacgagaagccgaccgggtgcatacccaacagagtcagaaacttatggaaaatggccatgatctgcgtcatgagccactcgattggcgtcaggagcttatacaaccagccccagaaaccgctatcgaggagaaattgattttgattcagcattgcaggcccgtctccttatcgtctgcggccagtggtgtgagtcgtggctcttcatgagcctttgaccacgaaaatctatagcaaatggaatagcgctgcggaacatcgtcgattcccccgcgactccaaggcctgcagcgcaggatacgcaaaaaggcaagaaggccgcctctgaggcagccaaaacgtgtcacagcctgaatcgcgtaattggaacaacttggatagtatctgcaacagggcggggttttcgcggaaatgtgacgctgataccaacgtatggcacgaatcatccaatcaccgctacgccccatcctcgtcattgatgtgctgccttacggcttatcgcctcgaagcaggctgccatctgatgatccaaggatgaaaaatcggcatgcgccgcgctaggcttcgcacgcaaaacgatgtcgcaggattcaggcagtaagaattcgtgctttcgcgcgagcacacggaaacgacgtttgacggtattacgcgttactgcgttaccgacagccttggaaacggccagaccgacacgtcggccactcctcgccgtggaatcggatatgaagacatcgtcatgcattgcataatgtacgacgatgtcttcacgcgataccctacgacggcgtttgagcaccgcgacgaaatcgcgatggcttttcagccgttccaccgctatgccactaaatacaatcaggcagcgagggacttgcggcccttggcgcggcgacgattgatcagagcgcgacctgcgcgggtgcgcatgcgatggcggaaaccgtgcttcatgtgacgacgacggttgttcggctggaatgtcctcttcataattaatgctcccggtgttttagccatgccaaggcacggctcctcatgagtcaagctctactaaattactctgacccctgaacacagtcaaaatcatgcgtcgtccttcactggataagcggggaatctcccccgtgcaatatccacaaaatcgttggaacaacgccgaattccccacgaaagttatccacaaactacacttatgttattcacatttcagacgtttcaacacgctagacggtggataacttggggaaaaaagagtaaaaagaaacagttgcacatccgtaggccttctattgggaaagggaatcc

SEQ ID NO: 712 - DNA, 1005375 bp, Veillonella atypica
  source 1..1005375: mol_type = genomic DNA
cttattaaactcatctgtagaaaggcaaacaactaaataatctcccatttgttttgctctttttaataagttaatatgcccataatgcagcaaatcaaatgttccatatgtaataacttttttcataataacatcttacccttaatttattcttttatattccccactaattatatgttcccaccagtcttgattatccatataccattgaatggttctctttattccctcatcaaaagatgtttttggcaaccatcctaattcatcattgatttttgtaggatctatagcataccgttggtcatgccctggtcgatctgtaacataagtaattaacgattcatcttttcccaatgtagataaaatcgtttttactacatcaatattggcacgttcattatgaccaccaatattataaatctctcctacactaccttttctaacgattaaatcaatggcctcacaatgatcttctacatataaccaatctcgtacattctgcccatccccatatacaggtaattgtttattattaaaagcattaataatcatcaatggaattaatttttctggaaaatgatacggcccataattatttgaacaacgagaaattgttacaggtaagccatacgtcctatgataggccaatactaataaatcagcagatgccttagatgatgaatatggactcgatgtatgaatcggtgtctcttctgtaaagaataaatctggtcgatctagtggtaaatcaccatacacttcatctgtagatacttgatgatatctctgaatcccatatttacgacaagcatccattaatatagcagttcccataatattcgtacgcaagaatacttctggattttcaatacttctatctacatgcgattcagctgcaaaattaataactatatctggcttatattgctcaaatatttcatatatagcttgtctatctgcaatgtctgctttcacgaaagaaaaattagacttatcttttacagattctaacgtttctaaattacctgcataggttagtgcatcaacgcatatgatctggtcctctgggtacttagctaccatcatatgtacaaagttaccaccaataaacccagcaccaccggttacaataatattcatatgttcaccaccctattgttcactatcagacattgtaaaggatatcttattctctacttcatcaaaaaatggtgattgggtatccttctcagatagaatagggttttctattccccaattaatagctaatgtaggatcattccatcgaatacccccatctgcttctggtgcgtaatagttatctgctttatacataaactcaacatgatctgttaaggttacaaaaccatgtccaaagccacgaggaattagaaattgtttttgattttcttcactaagttcaacaccataccattgcttatatgtaggactatccttacgaaaatcaactcctacatcaagtactgcaccacgaacacatcgtactaattttgcttgtgccttatccccatattggaaatgaataccacgcaatgtgccttttacagtagatgatgaatgattatcttgtacgaaattataaaataagccaacttcttccatagttcgcttattccatgattccataaagaatcctcgatgatcaccaaaaacttgtggttcaataatcacaagacctgggatacctgtttctgtaaccttaattcccatactatacaacccctatccttgtatttgcccctctgctacacgccgtaaatgtttaccatatggtgatttgccataaagctttgcgctctcaagtaattgttctttactaatccattcattacggtaagcaatttcctctaatgcggatatttcaatgccagaacgtgtctgaataactcgaacaaattcggatgcatcactaagagaatccacagttcctgtatctaaccaagaataccctctaccaagtgtgtgaacacgtaaatcaccacgttctaagtacatcttatttaaatctgtaatttctaattctccacgatcagatggtgttacctttttagccaatttacaaacgtctttatcatagaaatataaccctgtaacggcataatttgatttaggatgttttggtttttcttcaatagattttactaatccattttcatcaaattcaacaacaccaaatcgttctggatcttctacatgataaccaaatacagtcgcaccactcgtggcctgtgcagcttcttgtaattgttttctcatccctgcaccataaaaaatattatcgcccaaaatcatggcacaagaatcaccatcaataaagtcttcaccaataataaaggcttgtgctaatccatctggggatggttgctctttatattgtaaattaatgccatatctagaaccatcacctaataagcgttcaaaattaggtaaatcctgcggtgttgatataatcaagatatccttaatctctgctaacataagcatagataatggataaaatatcattggtttatcataaacaggcaataattgcttagacgttactaatgttagtggatagagacgtgtccctgatccaccagctaaaataatccccttcatactaccccttctcttttcttctaagaaaaaattaattttaatgcatttgtcaaattatatttttctcttataatacaaccacccgaataagctattttatttctttcaagttcatgttcaagataatattttatcttctcaactaattcattagtatcactataacaatcaaaatgtactaattcctctaactgtaaatcatacttattttggatatcacttaagagaaaattattattacccattacctcaaaggttcgacaattataacaagtatgaccttctatatgaatattaagattaattttagttcgtttataatatttaataacctcttctggtgatagcaccttatttttgactactttagataaataagggtatttaaggccaaatttaaatttacctataatttcctgataccaatgatgactatgccatacacgacctaaaactagcatcttataattattctcataagctaccttagcagcggcttctaataattctaatctttttttagatcctgcaatagttcctataaaaaagatatccaaatcttgtacatctgttacttctctaggcgaagaataaaattctgggcctgcatataaaggtaaataatgtgcagtaatagaacaatatttttctaattgaattacatcattaatttcaatagaataaatatttgaatataaattaatatgattacccaatgattgtacatcatgaatagaatcccaaacccataaacgacaatcaacttttttagctatatcttcattaataaaatataacttatttggaaaacgaaaatcattaagaaataatgctaattctatattatttccatctataaactccaataaacgttttctttcatcttgtatatttttatcatagtttaattcaaatatataagtattattacctaactgatgatttgcctctatcaaattattagaaaacatagcactatttctatgattagttacaatacaaatatccatttattttccctaattaatataaccaatatataatattacttccaatacgcttcaacattatgacctacctgttgttcctttggcggtaacttcatataatcaccgtatgtttgctttagcatatcatcgtattctttaataataggtactttattattttcaaactctacttctataaattctttaaaccaatcatatttataaatagatttattaaaatcagttttcttttgataatcttgtgtcaatgatacaacaggtgttaattgtctattatatttgttcttacattccatcaatttttttgccatcgtatctaaattaggcaatggtaaatggcatttacgtacaaatctattccactttttaaagtgccgttgaaaatgttgaatccatttccaataaaatctaacatccataaataatttacgttgttcatttttttcaataggaatatgatctaatacaaaaatatcaatatacacaccatattcaactacttttccctttgaaaaatgttcatataaaacagtttccgtatcaaaaaacttagcacaaaatgccataaagtaattctcttcatccatttcaggccatagtttatagcgatctgtactatttaatatatattgtttccaagctttttcaaatttttcatattctgggcgcatcataataacatcaatatcatcgtcccaagggataaagcctttatgtcgaatagcccccaatgctgttccatatgcaatcgtatatttaatattattctttgtacaaaactcattaaatcgtaataaagttttcaataatacagatttgagttctttcccctttattggttgattcattatactaagcaactcctatttttttatcatactgaataatagttcttcccattgagaccatataatatctggtgcaaattgtttcatcgaatctactgcttgtcttcccaatgcagaacataactcagaattccccataagcttttctaaacctagtgctatatctgcaggattatcttttactaagattccattatatccatcttgtatcatatctgatacaccaagccatgtatcacaagctataaccggtaaccctttagccatcgcttcagccatagataaaccaaaaccttctgatgcactcatcatggcatatatatcccctgttgataaaacagattccacatccttagtaatacctttaaataagatcctatctgataaatttgcctgttttatcatcaattctaattgtgctttataggctttattttcatcagccccccacagttcaacaatccaatttggaaattgatctgccactttagaaaaagcttcaattaataagtgaggtcgcttatgtccctttgccaaacgacctataaataaaattttatgtacatcttttggttttgttaagtctacttgattagtaaattgtggtactacatttcctataaccacaattttattattaggaagatgtccttctaatacttttttaaatgatggtaatagcacttgatttacatcagaacgtttcacagcttctaaagacaaaacaggataaaaatcaaaataatcttctggattaccatgactcatagtaataataggaactttatcttgtaaatttaaatcaatgattaaacttttagaagtacctggcgtgaatgaaacaataatatctggctgaataccttttattatctttcccatataagggcaaatatatttataaaaaaaatcactgtttacagtacgagctttttgtttactaaataatcgataaaactcacgttttaaacgtaatgaaagaggatatttgattcgttttccattctgtagtcgtacatcataacactttatatcctcatcaatagggaagaaaaaatcaccgctacgttcatcagcataaataacggatactttatgtcctcgtttgtgcatttcattagcaaaagcactcgttacttttgctaatccacctgtatctccaaccatcttagtcgtatttactagtaaaatattcattatcaatccccattatatataactactgaaaaaggtgcttactgactgtaatagttacatttattatagcatatatggacctttaattacgcataaactcatactttattcatttattaaaatgtatctaatcacttaaattttaatcctataaaaaaacttctactatataatcaattacatttaatagtagaagttttatacatcccaatattctattttaaatacgtcttcaaattttctcttatttgttcttcgtactgattcaataattcatatctcttccgatattgactacgtttttgtgatttaatttcttcaatcggttttctgtattcttccaatggtattttgaagaatcgtggatcttgtgtaactgtaccgccaatgtcttcccacaatggatcgagttcagctacttttgccttatggccgcgtaccatgtgtgtgttggcgtagaaaccttcgtcagatacggcgtacatggattgaactttacagtatttagcaagttcccgaatcaaaaatacaataaagttttttggacgatagccaaacattttctttgtaatatgttttgcattatctaaaccatctttatacccttggatggtaccaatccacaatgctggttccccttctagacctttaccgaggcggatattcgcatggtatacgccttggtcccctagttgtaatagaatagtaaataagccttccttgcgttgaccagtcataaagttaaggtgtgccgtcatgtttaaatcagcatcttcccaaagtagaataccttgttttaatccttctggttttagttcatctggattatatagcatttcaatggtttctggtgtaaatacatcttctaaagctgtaaagtgattctttaccgcatcaatgcgttcacgcaaggtagattctttaaacaagaatatgcggctcatcaactcatagagaccttcttgtttatctaaaatatgttgatctggtgcatagctttcaaaaaaagccttgtattccatcatctcttgtttgtggcccacagttcgcaagaaatgcaagattacgcgtcgtgtttcacgccacgattttttcccataaatagctcgaccattagcccattggtcctttatatattgaaacatacactctcctaaaaatagaacaaactaaaatcttttatattaaattatttaaatctatattatttatatgacttagtaatatgttttttcaaagtatctatcatttttatttgatcaacggtattcaaacttatatgatacaatttacttttagtttttccagtactcataatcaatttgttttcttctagcacctctagtgctttattaactttatatctcgtaaattgcgccatatttactatagctgttacggataaaaatgattcagattcttttaatatattgtaaacttctttagcttcatcagataaattaggcacggttgtaatagtatccacgccccatatagtaagttcagttttaaatacatcagtatctagttctggttgcctataatcatattgattaggaatttgaaatataataggtcctcctgaaccaatacgttcagatagaccaatacgtctaaataaattaactaataaatcatttcttggatttgatgttcctcctgtaataaactcttctagctccacacgtaaacatccaggatttttaaatttatagaaaaagtcactaacttctatcactatatcagacaaactactatgataatctgcatgaactaaactattaataaaggcttctctaatagccgtaataaaattatcataagttaatctctctataccatcaatcaacttaaatggagcattaatagctgagattaatttatccataacaactaagtaaaattcaaatacatttaaatctatatattgactatcgccaaaagcaaccctatccttccatcgatcttgaatattataaataccacgtttatcaatataatctaagtgaaatttaggaaaacgacttcttatagcttcttcttttccaaaaaataaaagagcagcttcagttaacttatactttctttcatcatttctatcaatacatctaacacctatagaagttagtaattcttcatcagacatatttgtgtatctatcatttttattagaaataaattgtctatatttttgtatcgtctcagatgacaaatcttccagtgtataattatctaaaagcaccgaatcttggttactatttttatctctaaaaaaggtactaatttgctcatcagtagcaattcgatcaccttcatataatctgatatatgttttattaggattattattcaaaaatataggtttatcactaatatgagcttctggaactttaatataaataataggtttaccattatctaatattttttgctctatatgtctattatctaatatattcttactaatcttctctctattattaatagtattccaaaaatcttgaattattttaggagcattattaactccaacttcttcataatttccgttatcttcagaaacaccaagaattattaaaccaccttaagtattagcaaacgccgaatatgttggccatatatcacttggtaatttatcaaatgattccttatattcaatattttcattttcatgtattaaatcaaaatcttcaaaatctacctacttataatccacctcaattcgccgtataaatttaagtatttcaaaagatcgtcaaaagattgtcaaaagattatttttactataagcccttattttatctatattttttagtttatctaatctatcaatataataatttcaaaagattatcaaaagattattttaagaattttcgtatagttatacattaataatcgaatcgatcatccgtttatgtccaaagtcttcattggcttgtaccaaacctgcctcatatatctctggatgttcaatcattttgtttacgaattgttctaatccagcgcgaatcgtatccaccgaggatatatctaagctttcaccaacatggtaatcgtgcagcacctcaggattgatttcaggcgataccaaggccggtttatagaacccgatagccgtgtagagcatggcgctccagtgatagcgatagcgttcggcaccgtatggcatcaagatggcgtctacatcgagtagagccttgtcccaatcgggtcctatgaggttcgcatgtaggaatgaaagccctggcacgtccttgtattcgtcagcgatggcatcgaatagttcgccgtcctcaggttttgctgtcgccccttgtaccaagagttctacgggacctgtaaaggtagccgttttaaaagcatccaataatgagataatatttttttccttgcggaactgaccgaaaaagccaagacgaagcggcgtatgtgtagagaaggttggtgtttcgcctgtggatggcgtaaacacaggaggtaagataggacggacgcgcggtagatcactgcgcagcatatcgtcgcgcaaggtaataacatctaggtaaatatttggatatcgattggcacgttccgcttgttttaagaaccgtacgttttcacccttgccaatgccatggaaaataaagtgaactggtacctttgcatgttttaaaggcgtatccaatagtgcttttatatagcgatacgtggaggtaggaataatcaaagcatcacagttgtgttcctctaatttcttagcagccgaagtaaaccatgcgcggcggcggcgttcgcgtaatatagacaagaacggctttttccatttcgatgcacctgcataggtcactacctctccgccctcaagatagataacgtcaacgccataatcaaccttaaaggtaaagttctccggcaccatcaataccggttcatgaccttggcgttttaattcattgatgatcatccggtcaaattccacctcatgaccagcaggcataatgatgctttccaaaatggctacgcgcattgtggtccttcctttctctactaacactcatctgttatctagaatctattatctagatctgttatagtttcccattggatttcaataaataatatagctttacgtacttaatcatggtatagaaataatggttcacggataggataaatcctatttttccatctaaaaaacctctatctaaaatgtacaccttgaaaaaagcccagcttggacgaataagaatatcctttacaaaggaacaggattttccgttttccttatatttcttagccgccaatgtcgtataattattgaatttattaaaatactgatgccaattatcgtaagtataatgatacattttgccatgtaatttggcctcaggataggtgctggatatagtttcgtgtacaaatccttctatattcgtaccctcttttggcataaatcgcaacacgtaatcaggacgcaacacaccatgagtggccttattgtgatggaacacattggaccgttcaatccagtatgcttttttctcattcttagccagcacatcttgtacttctcgttgtaattctggcgaaatgcgttcatctgcatcgaggaagaaaatccattcggaccgagcctcttcaacagcaaagcgtcgttgttgggaccaatcgccgttcatagcgtgatgtacaacgcgagcccccatagatttagctatctctaccgttttatccgtgctgccatcgtcgataagaagtacctcatcagcaaattgtgcagatgcgatacagtctttcatatgttgttcttcatttttagccaaaataatgaccgtaagtgttgccatgtatatctcccctattgtacattagcataaaatttcatcatccacgccgataaggagcgccagtattctgcgtcctgcgcgtggttatcgattgggcgaatgtattcggatggttccgccgtgtaggtttggtattgtccgtaatcgccgagcacatcccctaccatgtcgcttgtaatccattggtatggcgttacatgcacatccggttgttcatcgaatgcggatggcaccgccgcataatattcgaacccttttggcgcgatggcctctatgatggttggcatgatgcttagatgcgtgccgatagatgcaggtagtgatgtttgtgaaagctctggatgttgcatataaaatacggtatttcgaatttcacgcatcgtataatcccgatgcaagaaggatgtattattaaattcaccaaatagattggaatggtcacccgttacgatgaacaagctatctgggaacttcgctttcatagcgtctacaaaatcaaagatggccttatcacaatatttgtaggttgctaagcccttattgccatccttgcgatttaaaatatcatcgccaacgccaggcaaatcgcggtgtgcatcgaaatcaaggtacttatcttctaatttatagggaccatgattagtcgttgtatatacaaaatggaatgtcggttcctccatatccacaatgcgttttgccgcctcttcgaggaatacgtgatcgtatacaccaagccatgtttgcggcgcttgaggaccacagaattcggtagcattttcaatacagtcaaagccttgggccttgccgtatttcgtaaagttaccactcgatgagttaccaccgtaccagtaaatggtttggtatcctaatcgttttatctgtgctgccagagcagttggcaatgtattgttccaaaaaatttccttttcatttaattccatgccgctatcatagataccgcttatgaggcttgaaatagaaggacgtgacacattaccggctggcaagaaattaggcacacacgccgtatgcacatcggccacaaactcacgcaatcctggacagatattaaaattcatatacaagggatccatggaccactgagggatgctttcaccaacaatcaaaaagatatgcttaggtttagcaatgcgagcaccctttgccacgcgtttaaaagcatgcaatggattatccaaggtttgccaatcacggcacggcataagatgattcacatcctctacgagttcctcatcggatttcatttgcgccgccgtcaacggcgttttgcgaaccaatttgagagcctctaaatcgtcaatggaggcctttgcaaagaagatatcctccttaacgatggttggcaccacgtcccattccggtttattgcggtgattcaaggtcccaccataatgaagccagtagtaaatcaccacatagattaccaaaaatccaaaggcactagcgccagctgcgatattgctttcaaaatgaggatacggaatggatggaatcgcagacaataatgtgctagccccatagctaatggccgctacaggaatgaatccggcgagcacccaccaacccttgtcttgattaaagaaaatatcgatgaggtttttcttatccgcatgcttaccatagtgcaacatgtagttataggtatcgttaaaatgcttgtagaactgcatcttaccggcaaaggcagcatatataatgcagctcaacaccgtatttaaaacgatggctgccatcatgtagtaatctggaaaagccaagaacggcaaggttccaagcacaagcaaaatcaatagctgataggcgttgatatccatgccccaccaaaatccaaaggtaaagcaagtacgaatgatgtgtcccttgccctttagcgtttcatatggatggtacacgccgataaagatagccctaaagatagcacagagtataggcatccagaggaatagtttaatattttgttggagggataagaaaaattgttcacccatgatagttccttttgtaagtaaacaaaccctatatattccctgacaatatggagttcattttgttaatgatataaattaaaatattcccctattggatactatccccatgttttaaccgccaagccgttaattctcgcatggttttcatataattcgcataatcttgcggcatttgctcattttctaaataaataccatttgtatccatccacaaacggtgattaaatacgaacggaccttgattaaatagactcggtaccatagcctcataggtttgccctgtacgtcctacaagttccgccaaggtcggaatgatttgaatactcataccgaatgcatcttgtgaaagccattcttttttgatgccttgtccatagaaaataattggaatcgtagagaacacattagcactttgttcacgagcaaaggtaaagcgttcgctatggtcaccggtgataacaaataatgaagttggatcagattgttcctctttgctaataaattcacccatcacatggtctgcataccatatgtggcccatttcattgatttgtttatccgtattggcaatggaatctggcaagttcttacgaaccttatccgcatcatagccttccttcgccacattcacactatatggaggatgattcgacgtagtcatgatgacattgatgatcttttcgccacgatgtttgtccatgtatgcattgatagccttgaacatatctccatcggctacgccccaagcatttgtttcattgctcggcatttcagatgcatcgtggaattcatcaaaaccttgttctaaggcaaagttcttaacattttgccaagtactaaaaccgccataccaaaatacggttttataacctaattttttcataaccggtccaatgccgaggccatacggttcttgtaacatgcctacgctataatttggatacatccccgtatccggcatgcccgtcaataacccgataatggctggcatcgtacccgttccttgggccaaggccatttgtgtacccatcgcctgtggactagccgcgtactttcgaccttgctctacaagataagcaccaggttcgttgaattcagcaaggaatggccataaaccataggattcaccgagaatgatattaatagattgcggttgttgttgtaatcgctctgttgttatcgtttttgtgaaagcttcatcaaatcgtgtactattaggattaccgccaatggattgtattttttcatgtaactcagcaggcgttaaatgaatatcctctaattctgaagtccgtttcgcaatggatttcacacggtataatgcttgtgcatcgtccaaaatcgtttcatttaacagattagaattaagacgcgctgcgctttcccagctaatggaattcgtgtaaccaaatgctccaccaaagcggaaaaatacgaatagtacaccaaatccaacaaaactgaggattcccgtaatccatttactatgcttagtgctaggtgtccattgaatggttttcgtattaaggactttcaccaacagccaagtcaaaccaatgctcagcacaataccaccaattaaatatggtataccatgatattcgttgatagccgtattgataatggcatgaatatcgtcatgtttgccattgataagcatcgcattgtaagaggagttaaatatggtataaaacgggatacgccccataaagagcaatgtaaagaagatggtaacaaatccgtaccaaaccttgcgtacaccttgggccttccatttcggccacactatagatggcaatgtagcaaatagcaaacttacaaggacaattgatccaacggtcttcaaactcaaccgaaaaccaagccataaagacattaaaatactgtccattgtagtcgtatctaattgagattgaaatataattaaaaatacgattctaaaaagcgtaaacaagatagaaaagaacaaaaatgcttttaattcctgttgaatgccttttatccagttcaaccaacgattcataccattccccaactttatatactatatttcctacaccgcggccctttgcaccgcttgcattttccacagcccttatccgtagttttctgtccgtggtcatctatgaaatctacggttagtccttttttgtggatttttgagactccttcttcaaggctttttctaattttttagcctttttatccttcttagcatccttgtcttttttagcttttttagaatccttatccttcttgctctttttggactctttgtccttcttggacttcttagattcctttacaagttcgaattctttcttagactgcttgtctttcttgtccttttttttatctttgtctttctttttcttatcttttttatcctttttacctgaaagcttcgcccattcttcttctacgcgtttcagttgttttttgataagcttgtcgatttccttttgttgtttagttttatccttatcgcccgtggattgtttggagtacaacaaggaatttaccatatcataaggatctaaagatgtacgaatatctctgtctaatgggctttcatcatcaaaatcgttctcttcgtcatcatcattgatgtcattacgactagatgttgttttcttattggctgaatgctcattaaaataaacagcatcttgattatcgataggatattccttagaaaggtcgatatcttcgatgtcatgatctacatcgtgtaacttaacttgctccatcgcatagtctaagttgtcttgattcgacgcaccataacccattggtttatcaaaggaaagaacatcgccaaataaatcgcgttccaagctttcataagaattaagcatacccatgcggtcctgaacagcctcaatttgattccacaattccatcaaattcgccgtatactgcatgcgttccttaacctctaaataggcttggtgaataacaaacagttctttttcattaagaccttcttctgcgccgatttcttcaatcatttgctgaatctcttgatcgcgattataacgctctactaaggcactgcgaatttcttcaataagacttgctgacacgcgttccatacgttcctcctttatggtatatactcagccctaatcactatgattaatcattacgaatcaatacataccatggtgaatagaaaaaataaatttttatactctctaatctattattatatcagaaaatatgcggattttctgcgtgttttagtgaaagtacgtaaaatttgactatccttttatatcatgctattctatgagtaacaaaggaaattagtatgaggcaatgttttcatacgaaaaaatagcagggtggcagccctgctatttttttagatgaatcaatttactaaaacacattcgggttataggacaaaaagtgttgctcttaatgccgatggaactagttaaatactagctccatcggcattttatcttttgagtaacttttacatataggacaaaaagtgttgctaaaaagtctgaaaccccttgattttactgactcaaataaggttttatctttctaaagagatatattttttagaaggagtataattatgaaactagtcagatgccctaattgtggtttcgtttgtaagagaaatggtaaaacaaatgcgggttctcaacgttggtattgtaatcaatgttcttgctcattcacaaataaagtgaataaaactaacaataatttacagatatttttggattggttatttggtaaacacacacagttagatatggctggcgatggacgttcatttcgtagaaaaacatcacagttttgggagctttggccattaccaccaaaagttgaatcatcaagtagtgtggtatttgttgatggtatttatttagctagaaatgcttgtattttaatctgttgtaatgagacgcatgtcttaggctggtatgtttgtagatatgagcattctaaggcttgggaggctttattacgacgtatttcatcacctatagtagttatatccgatggtggtaccggctttcaaaaggcattaaaaaaagtttggccgaaagccaaactacaaaggtgcttatttcatgcatttcaacaagtaaaacgctatacaacaatacgtcctaaaacgattgctggttgtgagttatatggaattgcaagggatttattaacaatacacacgcaagatcatgctatgaagtgggtacaaaacgttatgtcatggaaagtacgacatagggtattcctatcagaaataacagttgatgaaaacggtacgatacgacctaaacatgaacgacttataaaagcagaaaattccttagttaaattgattaacaaaagatgtttatttacttacttagatgcatcgttaacatgtacctgcccagctactaataatcgtatagaaggtggtgtaaatgctcagttacgcactatgttacgtaatcatagaggaatgtctattgaaagacgaataaaagcggtgttctggtggtgctatatgcactcaccaaacccgctttctaatgcagaaatacttaaggttatgccgaccaacaagagtatttctgatatatatcataccatacatgaacaatctaggttagaagcttctattccgacttggggtgatgctattgtttggagtgatttgcataattatgatcgcctatttaccaatctttgggactaaaatagcaacactttttgtcctataacccacacattcaccctatacaccaatatgcgttctttttcatcagtttcttgaaataaatcaccacactgtataggtttttctgcttcaaggcgcacgtggttatttaggaaattctctacttcttcgttaatataatagaagaatagtagaatttctcttggatgatgatataaagaatcaaagatattacctagtacgcgtttaatggtgtgaagtgcaaagggattaaagaaaaagcatcgatctgcattgtctggcaatgtataggtagctgcatcgcctaggacaaaggatacacggttcttggcagctgggctttcaccatttaagatggcccgttcatacaaacgttcatcgtattcgataccaatggaatggcaccgtgtctggttggccataaatatgctaacgcgccccttgccactgccgtaatcgataagggtgttttgtttcgtaatataaccactacttgcgaggcgctcaagaacacaatagtccgtcggctcatacggatgatgctctgcatccgaacggctatcatcacgacctgttgttttgatttgtaatatactttcccattcttggtcggttgccattgatacactcccaactatcgtattttagttactttatatattcttgtatatacctactcgattatatctatagcaattgttgtttttattatactatcttacaaaatctactactaatttcctactacattatatttctctatcaatacataaagattacctatccaatcaataaataaagattatctatccaatatatgtaattataaattacacgattcctaataaattgcactaaatttaattttattatataatttaatcaatattttgataaacgctgtaaaataaggagatatgatgaataaaatcttattaatagctcttgtgctaggcacactttctacaacaaatgtactagctgcaacagacatggctactactatttctagtacaaactctaccactgctatctctggagttaagactcatcaaacagaagcatacggcatacaatctgtaacggcagtgccaaaaatttatggtgatggtgaaaaaatagcggctatcatcatcaaatatccagaagcaatccaagaaagtgcactagcgctcaatactttcacagtagaaggcaaaacaatcaacaatatctatactaattctgtgcctgaactgaaagaaaattacaaatctacagctaaaggtttgcacaatggtgcccctcaaatagatgcaacagtaggacaaacaaatacggtcaaagctagtaaaaaagacaaaaactccaaagctacagcagctgatcaatacgttgtagtggaatttgaatatgaaaactctacaccattcgttttagcaccacgccctaataaaccaaaaaataatggtgctgtaggcgtcgatgcaccactgcattccaatcgtaaattacctgatttaaatgttacagtcacacaagttcaaccggtagtgactaaaacaggtactatatacggcccttcacaaacgagcgtaatcaatacatctacggcatctactattatggatgagtttaaaacatatatttacacagatccaactacgggtaatagtattccttacaatgtatttttaccgaaaaactatgatgcatcaaaacaatatcctctatacttcttcatagctgattccagtgccaatatcaatgataatcgcacggtactattccaaggtaatggtgctactgttttcgctagccctgaggaacaagcaaaacatgaagccatcatcgttgcccctcaatacactcaagatttagtagatacacttggtatgatgactaccgataaaaatgaatggactccaggtcttaccttagtagataatctattacatcatgtcatcgctacatatccaattgataaaaaccgaatttacggttctggtcagtctcaaggtggtatggcaaatattgccattagcgacaaacatcctgatttgtttacggctcaattcctcgtagcatgccaatggaatacggaggaaatgaaagtattaaaggataaaaaattgtggatactcgtatccgaaggcgatgacaaagcatatcctggcatgaatacagctactaaaaattgggccgacttaggcactaaaattgcaacctctcctatgtgggatagccattctacaccggaacaattcgacgcattggtgaaagctacagtcgatcaaaaggctcctattaattacacggtatttaaagatggcaaccatatgtacacatggtctgtagcttataatatcgaaggcattagagattggttattcagccaaactaaggaaaaatagaccctatataaatgaaccgcccccttaatgttagaccaaaaatctcaacgttatcaatcattgtatacatagatagcatcatttacaaacgttaaataatcatgtaatatgatatatgacaaaggaagtcaatgtgtaacacattttctgtgctagttactgacgaaaatatctatctagccacttgcagatgtaatgacaggttacacctgctacgatggatacaattaaagaaaccaatacgtcaaacaaaagaggagggtgtccgccctcctctttttgtactatttaccatatatgattcgaatatgatatactaaagagtaatatttcaattttctcatgtgcagaattgtatctcataaaaaggagtatttacttacatggacagtgatctgaccttagattttataattatcgtcattttaatcatcgcgaacggcattttttctatgaccgagctcgctatcgtcaatgccaagaagcgccgcctcgaggagatggccgaatctggcaatgagcgcgccaagaaggcctttgagttggcggagaatccgaacgagatgttctctaccatccaaataggcatcaccctcgtcggcattttgactggtttgtattccggtgctaccttttccgcgccgttagaggacgttttggtgaaagccttccctagtatcgctccttatgcggcttctattagttccttcttgattgtttctatcatcacctatttatcccttgttatcggtgaattggtgccaaaacgcctagctatcaacagccctgaggcgattgccgttgttgtttccaagccgatttactggctttcacaagcattaaaaccaatcgtactattcctcggcgtgtccacggattttctattgaaaatattaggcgtcactgtgaaagaagaagcgcctgtaacagagtcggaaattaacaaaatgctcaccgaaggcgtagccatgggggcctttgaagaagaggaaccaatcctcgtagaaaatattttccacctagcagatatgaacgcaggcgacgtcatgacaccgcggacgcaactcaaatggattgatttaaactcgtccgaagaagaaatcatggaggtcctaaaaacggcgaaccaataccgcattccagtaggtgaagactcgctcgacgaattgcgcggcgtagtcaatgtaaccgatgtgatggtccaatgcttacaaggcgaaaaatcattgcatcatgtcatccattcttgcttgaaagaaccattgctcgtacctgagtccatttctcttatgaaattactcaacacattgcgtaacgaaggcgttcacgaaaccatcgtcctcgacgaatatggtggctttagcggcctcgttaccttgcacgacatcatggaagaaatcgtaggtctcatgccatccggcgaagaagagcgccaagaagaagaaaaccgcatcgtcgaacgcgaagacggcacatggctcgtagacggtctactcgacgtagacgaattcaaagaattcttccacattgtcaaagaactaccacgcgaagaagacgatctctacaaaacactgggcggccttatgaaccttctattcggtagaatcccacgcgaaggcgacaaaaccacctgggacggatacacattcgaaatcgtggacatggataatacacggatagacaaaattttggttagttatgttgaaccagttgtggaacaaacagaagaataaggattgaagagagaacccctcctgaaagccgacacgctactgcgctacgcggagcccgaagtcgttttcaggaggggttctctcttcttctattctacgtttgttgcacaacttagttaacataatcttttacggataaacaggccgggtctaactccggcctacggcctccgcaggtccgacgcagggtgtgagctaacaaaggagcgtagcgacgcatgggagccacacatcgctaatccagaggcgtaagattttccatcggaaaatccacagcatctgggaaagtcgtttttggaagtctattttttattactaatatcctatgatactacgtgctcaaattttcatttctactgtattcgcacaacctaaatttctccccgaaggtcccctctctccaattattagaaaatatatatgtttgtatttttcaaattcagatttacagtaaagaaggaatggcttgtcccaaaacgacttcgggctccgcgaagcgcagtagcgtgtcggctttggggcgagccattccttttatattgctaaactgtattcttcaagccatcaggcgcagaccgttaaggtagctggaggttttaggaaggtgcctcgtagttactaaatttagaaaacatatatattttctaatataattaatatccttatagaatttttatctaatatatagtattatttaattgtataaaatatatatttcatagtagttattgcttttacaataatctctattacgtgtgtgaaggagaggattatgaatcgtagtgtattaggtttgaccacagctctgttgatgagtgcactcatcatcggcggttgtgggtcgaatcaagatgatcatgatacgagtctcaaggttcggacgatcacgattggcgaagaggctggcacgacgagtgctggttattcgggaaccatcaagaatcgtacggaaacgaatctggcattccaggtgggcggtcgcgtgattaacaagtttgtcagtgttggtactgctgtgcaggccggacaggtgattgctcagattaatggcgctgacacggcgagtcaggtgcaaaatgcgcaaggtgctgttacagcggcgcaatccgcctatgatttagccagtacgaatgctgaaagataccgcgctttgtacgctgagcaggctatcagtaaattacaattggatcaggctgaaaatcaactgaatgcggcgaaggctcagttgcaacaggctcaagcaggtcttaatttgagtaacaatcaaaatagttatactactttggttgctccagacagcggtattatcacggccctcaatgtcgaagccggtcaagtcgtggcagcaggccagactataggtaccttggcggccggtcatgaacctgaggcagttatcgctttaccagagcaagaaatgagtaaaattcatccaggtagtacggcgaccattagtttttgggctttgcctgatgtgaaagtacaaggtattgtccgtgaaatttcaccggttccagaccccgtggcgcggacgtatacggtcaaaattaccttacaaaaccctccaaaagaggtgcagctcggtatgaccatcaatgccatcctcaatcaaacggatacaacggacatctccataccgttgacggcgttggtgaaagacaaacaaggtaataatgcagtgtatatcattcgagacaagaaagcacatctcgttcctattcaaactggcgaatttggtaataattcggtcattgttaaaaatggcctcgctaaaggggatattgtcattaccgcaggtactcaacaattacaagaaggaacggcggtgcatgaatgaagaagtttaacttagccgattgggcgctacgccataaatccattatctactacttcatcgccgtactcctcacctttggtatattctcattcacccacatgggacgtatggaagatccagactttacgatgcgtaccatggttgtgggcgtctcatggcccggtgcttcaccgcaacaaatgtcagatcaagtaacggataagctcgaagaaaagctacgagatttgccgggtgtagattatacgaagtctttcacagatggtagcaaatctgtcatttatatcaatctgaaagaagatttaccgtctaacaaaattcgtcccgcttgggaagaagcgcgaaatatgatcaatgacgaatggaaatctttgccatccggtgtacaaggcccatctatcaacgatcgattcgatgatgtatatggcaccatttacgcgctttcaggtgacgaattctcgtatgaagaaaaacggcaacaggcggaagatttaaaacggcagctcttgtccgttccgaatgttaaaaagattaccctcatcggtgtacaagaaaagtccttggatgtaacgattaacaaggacaagctcgcatcgtatcaggtgagcacccaacaattattgacggcccttaaacagcaaagcgccatggtgccggcgggcatggtcaatacggatacgaataatgtatatttacgcattaacggcgtctttgatagcgtggatgcggtcaaaaatatgccgattcgcatcaataaccaaacaattcgactcggcgatattgcagacgtaacgatgacctataaggacccatctagtcctcaattctactacgaaggcaagccggccattggcatcgccatttccatggatgcaggcgccaataatatcgaatttggtaacgctatcgatacgaaactgaaagaactaaaaacaacgattcctgcaggcttaaacctcgaccaagtgtcgaatcaaccacacattgttaaggaatccattggcgatttctcgcaatctttattcgaagccatcgccatcgtattgctcgtcagctttgcatccctcggcattcgcaccggtatcgtggtggccctcaccattccggtcgtcgtgtctacgacattcatactgatgtatgaaaatggcatttatttgcataaggttagccttggcgccctcattttggcacttggcctgctcgttgatgatgccatcatcgtcgtggaaatgatgagcgttaagctcgaagaaggctttaatcactggcgcgccgctacgtttgcctacgaatcaacggcctttccgatgctgtccggtacgctcattacctgtgccggcttcttacctctcgccttggcggagggcatggttgcggaattcacgaaatccctgtccattgttgtcttcatggccctcatcctatcctggattgcgtccgttctggtcagtccggtgctaggctataaaatcatcgaaaacaaggctgaaaaacccgagtcggaatggactcgtcgcgatcatatcatgcatcgtttgaaaaccgttttctatgctcgttttgaaagtctccttcactgggcactaggtcatcataaggccgtattactcctaacattgggggctttcatcctatccttgctttcattcccgctcatcaaacaggaatttttcccatcttcgacgcgaagtgaaatcatcgtatccatgcaatttcctcaaagctcatccatcgattatacccaaaaccaagctaaatcattggatgctttgttaaaggataatgaacatatcgaccatttcaccacctatgtaggcgaagggtctccgcggtttgtattgaccttagaaccagaattgccacgtgctaatttcatgcaaaccatcatcgttaccaaatccttagaggatcgagatgcgttattcaaggatttacaagatcaactaaacgatcaatatccatcggcgctcatcaatatgcaattcgtccaaatcggaccgccgtccaaataccctgttatgctccgcatatcaggtcctgatgcatctgaggttaaaacgattgcaaacgatgtgaaagccaaaatgcaggaggataaagatttacataatatcgccttcgattggccggatacagagccagttgctcaaatccacattgacccagataaagcgcgtatgctaggcattaatagttatgccgtatcgcttcatctacaaagtttattatccggtacaaaatccggtgaatactatgaaggaaaccaaaccattcctgttactttcagattaagcggcaatgaaaaccacaacttggcggcactttcatcattaccaatccaaacaggaaatggttcctatgtaccgctcagccaaatcgcaacgatttctatgagccaagaggaaggcattatttggcaccgcaacatgatgccaaccattagcattcatgctaatgtaggacctggcgtgctcggtaatgctaagacgaaagaaatttacaataaacttgctgaatatcgtcaagacttgccaactggctatactattgatctcgatggttctgctgaaaagagcgtcactgctgtacaaaaattgctcgttccaatgccaatcatgctctttgcgatcatgacgattctcatgttccaattaaagagaattgcccttatgtttatggccctattcacggccccgcttggactcatcggtgttgtactggccttaaatattacgcgtacaccacttggatttatggccatactaggcatcattgccctctccggcatgatcattcgtaactccatcatcctgttggaccaaatcgaaattcaccgcgccgaaggacaatctgcccgcgaagccatcatcaactccgctacattgcgtttcataccaatcatgctaaccgccatcgcggccatccttggtatgataccactcatgggatccgtattctggagcccactcgccatcgcattcagcggcggtctactcgtagcaaccatactaacactcatcgtactaccagttatgtacgcaacatggtataaggttaaataagtaatatataatagatatctattataatctaatatttgattgactactaattctgataatgttaatataactttgacaagggaaataaataagttgcaatgtattcacgcaacaaagaaaaaacagcagggtggcagccctgctgttttatatttccttacatatatatccctattttaaaatagaacaggcctgttctattttttaagagcaccatacataccttttttaaattagtacacgcctgttctatttctaaaaagcactatacacacctttcttaaattagtacacgcctgttctatttctaaaaagcactatacacacctttcttaaattagtacacgcctgttctatttctaaaaagcaccatacacaccttttttgaattactacacgcctgttctatttctaaaatcactatacatacctttcttaaattagtacacgcctgttctatttctaaaaagcactatacatacctttcttaaattagtacacgcctgttctatttctaaagacacaatacatacctttccaaaaatagaacacgcctgttctattttttaagagcctcatcattgaatactaaaaggcagcagattttgtaatctgctgcctttttctcatctaaacctaccggtggaagttttaagcaaaataagataagtagtgtttccgaacgactttttttcatttagccgattgtatttaatagaaaatagatggggccacttgtttcatgactttggccctgcggaacccgaagggcggagtcagatccggccggtggagcagagaagtcatgctcagctttttccccttattaaattacaacggccgtcccattacatgtcaccataagcatgccattttgtgcccctacggtgctgtattggaatgatacgccaataacggcgttagcgccgattttgctagctcgttttgccatttcatcgattgctgcttggcgtgcgctcattaaggaatcttcatagcttccgctgcggccaccaacaatgtcacgaatgccagacataaaatcttttacaaagttacggccttctacgacctcaccaaatacgatacctttgtactcttgtacaggtttgttttcaatatgcatagttgtagtaataatcataattatatcctctctaattaactacaatatattttgattcattatagcaaggcttttatagaaaaacaatctcataatgatagctttcatataaaaacaattacctaatactgcatatacaaaaaaagacctattcactactttcataatgaataggtctaattgtattgcgtttttatttatcaaaatcgcggtctaggtttacttctttcaacggaacgagtttagttttgttgatgtatttgtaacctaggtaaacagcgaaaaagataggcaatccgatatacgcaacggatacgccgtaccagtcgatggtatcgcctgtgaaagcggagtagttttggccacagatgatgataacgcataggatgaacgccaagattggaccaactgggaacaaccacgccttgtaaggcaattctttaagatctctgccttgtgcaatgaacgcacggcggaagcgataatgggaaatggcaatacctacccaagcgatgaaaccgcaaaggccggagatgttaacaatccatgtatacgctgtaccttcgccgataaagcttgtaaggaatgcaaacaagccaatggctgtagtcaatatcaatgcaggcactggaacgccacgtttgttgagcttagcaaagatttgtggtgcttgaccttccttagcgagtgcgtaaagcatacgcgtagaggaatagaggccagagttaccagcactcaatacggcagttaagatgatagcattgataaagctagctgcaaacgcgaatccaaaacggtcaaatacgagtgtaaatggagaaatggatacgttttctacactggaattcaataggtttggatcagtgtaaggaatgagaaaaccgataactatgaaagccccaatatagaacaataggatgcgccagaagatggagttaatcgcttttggcacgttcttttcagggtcttctgcttccccagcggctacgccgataagctcagtaccttggaaggagaaaccagccaccatgaagatagcaaggatggattcccaaccgcctacgaatggtgcttcccctactgtccaattctcaaatccaggggatgtaccgccgataccaaagatgagcataaagccacagaataggaatacgaaaacggtaataaccttgatggacgagaacacgtactcgctttcaccaaaggaacgagtggacaaatagttaagcccaaatagaattaacaggaataatgcggaccaaacgatggccggtatgtcagggaaccaatatttcatgatgagagcccctgccagtacttcggcagccaatgtaatagcccagttaaaccagtagttccaacctaaggcaaagccaaaggcagggtctacatagcgttttgcgtaggttccgaaagaacctggaattggcaagtacgtcgccatttccccaagggatgtcatgaggaaatataccatgataccgatgaggccataggccacaagagcaccaccaggaccagccgtacttactacttcaccaccggctacgaataagcctgtaccgatggcaccacccaaggcgatcatattcatatgacgcgctttgagggatcgttttaaatgtttttgagtattagaagtatactctacgttagtattctgattatctgccatgggtcacctcttacaaatctagattgcgcacatattttgcgttgtcttcaataaatttacgtcgaggttcaaccttgtcgcccatgagcaccgtaaagattttatcagcttcgatagaatcctctaagctaacttgtaaaatcgtacgattttcagggttcattgttgtttcccataattgttcagggttcatttcacctaaacctttgtaacgttgaattgtaataccatcacggcctacttcatcaagcttagctgtaagttctgcatcagagtacacataccaatgagatttgccttttttaatttggtataaaggcggttgtgcgatgtagatatggccttcttctactaatggtttcatatagcggtagaagaatgtgagaagcaatgtacggatgtgagcgccgtcaacgtccgcatctgtcatgataataatcttgttataacgggattttgtaatatcgaattcgtcgccaatgcctgtaccaaatgcggtaatcatggaacgaatttcgttattcgctaaaatcttatcaagacgcgctttttctacgttaaggattttaccacgcaatggtaaaatcgcttggtaacgacgatcgcgaccttgttttgcagaaccgcccgcagaatcaccttcgactagataaatttctgtcatagatgtatctttttcagagcaatctgccaatttaccaggaaggctagatacttccaacgcatttttacggcgtgttaagtcgcgggccttacgagcagcctcgcgagcacgacttgccatcgttgctttttcgatgattttcttcgcatcttgtggatgttcttcaaagaatgttttaagaccttcagatacgataacatcggtaatacctttaacttcgctattgccaagtttcgttttagtttgaccttcgaactgaggttctaatactttcacagacacaaccgctgtcaaaccttcacgtacatcctcgccggaaagattgctttcattttccttgattaaaccggatttacggccataatcattgagggtacgcgtcaaggcagcacggaaaccggataaatgggtaccgccgtcaacagtgttgatgttgtttacgaaggacaacaagttttcgctgtaactatcgttgtattgcaacgccacgtctaccacaacgtcatcctttgtattttcgatgtctataacagttgggttaacaacttccttgttttcgttcaagaatgtaatgaaagaacttaaaccaccttcgtaatggaagctttcaatgcgaggttcctcttggcgcaaatcactcaatgtgatgcgaaggcccttgttaaggaatgccaactcttgtaaacgaattttcaatgtatcgaaattgaacaccgtcgtttcaaaaatttcagaatctggtttgaaaataacagtcgtaccagtaccttctgctttgccaatttcgtgcaattcagatgttttatgaccacgggaaaaatcgatttcttgaataaagccattttgagatacttgaaccttagtccattcactcaacgcattgactacggaaatacctacaccgtgaaggccgccggacaccttatagccgccaccgccgaatttaccgccagcatgcaattttgttaaaaccaactctaccgcagacatgccggactcatgcattcctgttggaataccacgaccatcatcgacaacggtaatactattatcttcattaatggatacttcgatatgcgtcgcataccctgcgagcgcttcgtccactgaattgtctactacttcataaacgaggtgatgcaaaccgcgaatggacgtactaccaatgtacatccctgggcgtttacggaccgcgtctagaccctcaagaacttgtatattctgagcgccataattttcttcagccattaaacaaactcctcctaacgacataaaccgcaatatgctaatacacaacacatctgcggtgctagattatctctctattatactatagattgcttatatcgtgaaagccctataatttgctacttagcagcatataaaactcatcaatcctttttttaagcgttttaagtgatataccagatgcatacacaccatcatctgttacaatatatgtctttaccttatcctcgggcacaatatatataacctctgcatcataatgcgaaatgcccgtcctatgatgcttaccagactccgcatgaatcatcgtaagaattgaattcatagggatactaaaattatcgccaatatgtaagtacatatttttcctcttattttcatttaagtaagaatgctaaataaactccatttttctctgtcctgctattgaatagatgaccattaatttcgcagcgactttggccctgcgaagcccgaagggcgtagtcagacccggccggtggagcgagaaataatggtcatctattccaatatccccctaagcatatttagctctttttgtttttcctcgctcaagaattttgatcggtatttattacacaagttgataacgtgctggtctgtcagttcttcaagccgtttatgggtgatgagcatggtggccatgtacatgtggtttcggctcgtagacccatggtagaccttatctaaatagaaatagatcagttctcgcatagctatggaaaaatctttaaaggtgcatttgatgtattgttgagcttcgctatattttatgtacggatatcgtctaatttgtgtttttatatcattaatatgattgcgatgcatttcatattcgcaggacacacaatattttgttttcctgctcatcaacgtatgacaacgctcgcatcgatgatagccgtgttctagcaaatagacttcctttttgcggctgctaatgagcacctttcgaaacggttcttttaatgtatcttctgctaagctttcaaccatagcatcaatagatttcatatcatcattggacaagacgattttcgacatgtcgatatagccatcgatatcgggcatgtctattttcaaaatttcagtattcaccgtttctttcacatagctctgccgatgcatgatgaggcccatttcagtgatgatatcacttttgtaatagtcattaatggccttgaggatgcgtttttggttcatcttaacctcttgcatccactgcgaattatccgcgctgagcacaattttcggaggtttgatgtcgataatgcgcgtatgaccagcataaatggggcccaccacatcacgccaatgatgaatgagtgtattcagtttaaattgttccagtaaacctaattcatgtaggccaccaggtaagcacatttcaaggctttccataatggatgtgcccctcctgacattgaataaattgaacaccttgcatgttttcaaaatcatgtatatccgtcgtggtaatgacggtttgaatgcgtttatgaatgaactgcaacaaattgttccgtctcgcctcgtcgagctcgctcaacacatcgtctaaaagcaatacgggatattcgcctacttcggatttgatgaattctaattcgctcagttttagtgaaagcacagccgtccgctgttgcccttgagatccaaatttttttaaatcgatagcatcggaaaaaaatcgtaaatcatcgcgatgaggacctatgcttgtggtcatgcgatgacgatcttgaggcaatgcctcttgcagtaaatcgtaaaaggcctccttcgtgtacaccatatgaccctcttccccatatggttgttcatagcctatggtgagattttctaggcctcccgtcaatttacgattcatcaaatcaataagtaaattgattttctttaaactttccatccgtttttttacgatgaaagccgccatatctgccagttgtacatcccattcagcaagaggaatattctgtttaccgcgatattccttcaacaatgtattccgttgttgcaataaacgattatattgcaataattgatgataataagtagcgctcgtttgggatatttccatatctaaaaatctgcgacgacccgatggacttcccttgatgagctgtaaatcctctgggcagaagatgaccgtatttaaagtaccaatcaattccttttgagaaatcttagtatcatttaagcggatatccttaggaccttgtcgaaatagcttgatattaaccttttgcggtgtctcctttttctcaaagttcaccacaatgcccgcttcattagcgttaaataaaagcatatccgacgtatcattcgtgcgatggcttttaccaatagtaccgacataaatagcctctaaaatattggttttaccagccccattggtgccgtacaagacgatgatttcaggctgcaaatcaagggttaaatccttatagttgcgaaattggaacaattgcagtgagttaattctcaccgattatgcctcctctttggtaacgatgaattccacatcgagaccttctacaccaatcacatcgccaacgcgacattttttgcgtttttctgtaaccatattgccgtttaatgtaagcacttgatcatcgataaggccttttacttggccccctgtttcgatgacgccttccaatttaagcaattgatcgatttgaatgtactccgtatggattggtacagtttgttgtttcataacgtcctcctatggtggacaaatcacaagatataccaagtatataatcataactaaaacgcatcgttatatacttggtattatgaatttttatgcatataaatatgcaattatttatatgtaatacataattaattctcaatataaaaagcagtattagaaatagctttcacaaatatgagaatatattaccatatctaacaattaagaatttgtacgaacaggtgttactacataggtatagttcggattattatcttggcgaatcacaacaggaccattttgttttaaatacatatggatgttgtcgcctgtgctgtgacgcaagatatcggaaatgtaacgaccattgaaggaaatcgtgaacggtgtgcccttaaattccacaggaatttcttccttcgccataccgatttcagcattttggctggacaaagtcacttgttcttcggaccaatcatagcgaataacgttgtaactcatatcttttgctaacaaggatacgcgatcaacagcaccggcaaagtccttgcgatctacaacagcactagaatcgaattgagcaggaattaccttttcgtattctgggtacgtgccttcgattaaacgggaaataatgtagatggattcgaacatgaatacgatttgtgtgcggttccaaatgattttaataatagaaggattatcggttggcaataaacgagatacttctgccaaagcctttgttggaataataacgcgcataggggatgtggcaggttcatcgatagttacttttttaacagccatgcgatgtgtatcggtagcaaccatagtcacttctttgtcgtttgcatctttgatttcgagcaaagcaccagcaaatacagggcgatcatcgtcgcttgctgctgcatagttcgtaaggtcgatgagttctttcatagcttgactatcgatattgacataatcttggtcgtgaatttgttctaccaatgagaaatcatctggatgcaaggttactaaattgaattcagaggaaccggatgtgatttttaacgtattgccatcctcaggtttgctcaattgaatcgtttcacctggtaatttgcggattaattcttggaaataacgagaagcaaccactaatgtacctggttctaagatatctgcgtcgattgttaatttaatgcccaattcaaaatcgttgccttgtagttccacttgattattttttgttgttatataaatggaacctggtagatttgaacttgttttattttgtgatactttttgtagaacgttaatggctttttggagattggccttagggaatttgatgttcataacgtaaatactctccttgtttgtaatattcgttgtgcgattttcgttggtcctctatagataatcaacgatagatcggttttctgatatgtttttgatttgtttgttagtttagtagtatttgtagtaggcgctgtgaatgtgtgtacatgtgaaagttttctagatttcatgcgtttccacagttgtggataagtgtgtgtataccttgttttaggttatccacataatcacagaaaatattgattttttcaatatccacagatttatacacaacatatccacagagttatccacacctgttttagttgagtgatgacagtttagatttgatgtctaggataatttgttttgtttccggatttttgtcgatttctttgctaatcttatcgtatgcatgcaaaatcgtcgtatgatctctggaaaaagcagctgcgatttgtgggtagctttcattaatcacatcgcggcacaaatacatggcaatttgccgtggaaatgcgaactgagccttccgtttcttgcctaacaaatcttgtttcttaatattaaaataggtactgataaagtcttgaatggactcgatgtcgataagtgttacccgttctgtcgtgatgatatcggataatgttttcttcgtgtactccaaatcgatgctgctggtccgttgttctaaggatgcagtaccgatgagtttattgaaagccccttgtagtacgcgaatgttttcatcgaattgcaacgccacgtaattgatggcatcgttgtcgataacgagattacgattcttgttgttttccttttcaacgagggctttcaaaatggcgatacgcgtttccaaatctggattttccatagttgccacataaccagcttggaatctagaacgcaagcgttcttcaaactgatccatgtcgtttggcatagtatcgctggtgaggacgatttgcttgttattgtccaataattcattgaaggtgttgaaaaactctgttttcgtgccctctttattttccaaaaactgaatatcatcgatgagcaatacgtcgatgttgcggaacgtattgcggaacaactctccttgccgcttgcgtatggattcgatgaataaattcatgaacttttcgctcgttgtgcacatcaccttgagattaggatatctttcaacgatggcattgccgatggcgtgcatcaaatgcgttttaccgaggcccgatggaccgtaaataaagagcggattataatcgccgccaggatgttccgacacattttgggctgctccaaacggaatgcggtttgcattgcctgtaatgtaattatcaaatcgataaccactgttgagctgtgacgatgacaaatcgataggaatatccgtagattgtaacgtttgcaccatttgtggctgctctacaggaaacatcggttcatctggaattaactcgtccacctctttacgctggatatacacaggatctgcgtacaccggtgtgtaaaattcctcttgatatggaacctcctgctttgcaggttttgaggattttttatcgatgttgtccgcgtcacttaccaccgtattttctatagtgttcgtactagtattttctgcagtattctctgtgaaagtatctgctacatgcggtgctgttggaacatcatccttttgtggaaacaaatccaataaaaccatatttaattctttgcctgtcacttgcttgatggcatctgttaacaacttactgaccgtttgctgagattcgatgacactttttataaaactctgcataaccccaatgtgtatagaattattatctatactcatcggtatgagagaagtactcaaacttgaataaatcgcaggcggcagtgtttgttttgctacttgtaatatacgttcccatatatcattaatatcagctgcttgcattttgttcctcttgtgtataacttttactaaaaatgtgtataactttcgttattatgtgcataacttattctaaaactgtggaaaaaccacaaacacctgtgaataacctgtgcacaacttgtgaataagagaaaataaaattcccttccaaccttataaatactgagtttatactattcacaggttaaaagagaaaaaatgtggataacttttctaaactatccgaaaaaaacttataaaaatatatattttttaccaatttcaattatgattgtaccaaaaatgaggaagattgtcattcaatctgtggataacttttatggaatttgtttattttagcattttgagtgaaatccggtttggtggtcactttttagctccaccggccgggtctgtctccggcctacggccttcgcagggccaaagtcgctaaaaagtgaccaccaaacctactttaatctaaaattagctaaaataaacaaatttcatatgggtagaaggacaccggccgggtctgtcttcgcccttcgggcttcgcagggccaaagtcgcgaaaaagtgaccaccaaacttactttaatctaaaactagttaaaataaacaaatttcataatgggtagaagaaaaatggcagggcctgactccgcccttcgcagggaaataagtagggtgttccggaaaatagaacaggcgtgtactaattcaaaataggtatgtgtatagggtgttctgaaaaatagaacaggcgtgtactaattcaaaataggtatgtgtataggatgttccgaaaaatagaacaggcgtgtactaattcgaaataggtatgtgtatagggtgtaccgaaaaatagaacaggcgtgtactaattcaaaataggtatgtgtatagggtgttctgaaaaatagaacaggcctgttctatttcaaaagaggtgtaggtatgttgccctaaaatagtagattttgtcttccccgccaagggaaggtgcgcgcaatctgtttcaataaaaaaaacaggtatttacttatttgtttttaatatgtgcgaaaccgataggatgatctttgaatgcaatataatttgtttgacgttttcatagttacagtagaatgaggaaaggaccatgattttgcagagactttggccctgcggaggccgtaggccggagtcagacccggccggtggagcgaaaaattatggtcctttcctcattactaaattatgaaaatgttggcagcaaacaaattatatattcaaaatagtgtgatatcggtttcgcatatactaaaaatactaagaaaacacctgttttttattgacagatttgcgttttccctctataattaccctgttatggtataagtaaaacaaatatataacgaggaggtgttttactaatgaaacgtacatatcaaccaaatactctttggagaaaacgtacccatggtttccgtgaacgcatgaaaactatcggtggccgtctcgtattaaaaagaagacgtgctaaaggcagaaaacgcttatctgcataatataatggctcagcaagagctttcagaaaacttggcgctcttgccaagtttttctattctataggactcggacgatacaatggattaccgcttagataaaacgagacgtattataaacaataatgaatatcgccttgtgtataagcatggtaagtacgaggtaggacgcctatgtgtgttatatcgtatgcctgtagcgaagcaaaagactcgcatcggatttgtgacgggtaaaaaggtgggttgtgcggttgaacgcaatcgagcacgtcgccttatgaaagaggtatatcgcctcaatcagcatcaaattcgcgaagggtatcatattgttatcgttggacgtggccctctgaaggacgcaacctatgaacgagcggaaaaggaaatactgtacttattgcgtaaaagcaagctcttagtataatcctatataggaccacaagcatggacagcgctatgctttggtcctattcgcgtattatgaggtatatggatttggtggaaatgtcttagatacatacgctaatccaatcatggtgaattctatgaaagatacatgtataactttattaaatcttataaaacgaggggttacctttgttttatggctcgttattcgcttctatcagattgccatttcccctctcaaaccgggatgttgccgatattatcccacttgttccgcatatactctgcaggccattgaaaaatatggtcctttgaaaggtagctggcttgggctaaaacgcattttgcgttgtcatccattccacaagggcgggtatgatcccgttccgtagattggttttggtgaaagctaacgctagttagggctttcacaagcaatagtaaaatggcgttagtgaaaactttcacaaataatattcgtctaagcgagcacagttttggaaatacctgagcatctgtatggatgaaatttagaccataccataacgatatatggatgcgcgaaggaacccaatttagacctgtactcgaaggagaaacaatggaaatttttaactatttagttgaatttatgcgcacacttgtgacatatgctttcaacttcactgacatggtcggcttcccaagctatggggtggctattatcatcattactgtcattattaaagcgattttagcgccgttgacagtaaaacaaattaaatctatgaaagcaatgcaagagttacaacctcgcatgaaagagcttcaagaaaaatacaaaaacgaccctcaacgtttacaagctgagatgggtgctatgtataaagaaatgggcgtaaacccattggctggctgcttgcctttattggtgcaaatgccgttcttgattgctattttctacgcattgcaaggatatccttacaatcctgaattcgaacatttcttatggcttcctagccttggcgaatcagatccatactacattttgccagtattgagtgctttgtccacatggcttatgtcccgacaaactggtatgggtgctagtggtgccgctgcacaacaacaaaagattatgcaaatctttatgccattgttcatcggttacatttccttgaacttcccatctggtcttgttatttactggattgtatccaatgtgttccaattggtgcaacaacattttatttacaaaggcttagaagctaataaataggaggcactatggaatttatcgatgtatctgctaaaacgattgaagatgccatcgctaaaggggttgcagaactttctatagatggccgtgaattggtagaaacaaaggttattgaacaaccttctaatggttttttaggtattggccgtaaaccagctgtggttcgtttgttctatacaatggtatcagctgcggctacggaagaagaaaaagaagtcatcgctgagacttctgatgctgtatcggatgtgcctgttgagactgatgaacgcgatgtggctgaatctgttgatgattcaccggtatctgtgaaagctaaacaagagctttcaaaagaaactcaacaaatcatcgctgaaaaaggtaaggaattccttgaaaagatgtttgctcaaatgggccttatcgtgatgattgaaaagatgtttaccagtgataaaatcacgttccaagtacatggtgaagaccttggtatcttgattggtaaacacggtcaaacccttgatgctatccaatatttaacgaatttggtggctcacaaagaggtgtctggccattgtcacatcgtggtggatgtggaaaattaccgtgctcgtcgtgaagaaacgttgatcaatcttgcaaaacgccttgcagctaaggtaaaacgtaaccgtcaaaaggtttccttagaacctatgaatgcatttgaacgcaaaatcattcatacggcgttgcatgatgataaacacatcgtcacagaatccgctggtgatgaaccattccgtcacattgtgatttcatataagaaataatgatagtaatgcctgtattccgagaacctccaccggccgggtctgactccggcctacggccttcgcagggccaaagtcggtttcggaatactggcatcacttttctaatttctaatataggtacggtggaggttttggaacaccatcgttatcgcaatcaataagttatggtgaaagctaacttaaggtaatcttcgcatgggtaagattggtttagtttaactttcacaggcgaagaagatataaaagatattcgaagtacggagatttttatgtatatagatgatacaatagcggccattgcgacgccgcccggcatcggcggggttggtattattcgggtcagcggtaaggatagttttcctattgtaaatagcctgttcaagagcgctggcacggttccgttgatggagcgccaaaatagaacgatacaatacgggaccattgtgaattccgaaacgaacaagaccatcgacgaggttcttgtgttattaatgaaaggtcctcattcttacacggcagaggatgtagtggaaattcagtgtcacggcggcattgtgccggttcgacaaattctaaaattgctcgttaatcacgatgtgcgcatggcagaggccggcgaatttacgaagcgcgcctttatgaacggacgcatcgacctcactcaagcagaggcgatcattgatattattgaagcaaaaacggaggaatccctctccctcgctgtatcgcagctagatgggacagtttcgtcctttgtaaaagatgtacgtgaacagctcatcgctatgattgcgcatttagaggtaaccatcgactatcctgaagaggatattgaggacgtaacgagccaagaggttcgtgagcagcttgagcctattttgaaagctatggacgaactgttatccacagccaatacaggccgcctcattcgcgacggtattacaacggttatcgtaggccgtccaaatgcaggcaaatcgagcctcatgaatgctctattgcgcgaaaaccgcgctatcgtaacagatattcctggtacgacgcgggacagcattgaagaatatatgaccgtagaaggcatttccttgcgcctcatcgatacggcaggtatccgcgatacacaagatacgatagaagccctcggtgtggagcgtgctcgcgactatatcaacaaagcagatatcgtgctctgtgtaatcgatgggtctactccattaaaccctgaagaaatcgaaattttgacctctgtgagcggtttgaacaccatcgtattccttaataagtccgatgtggctcaagtcgttacagacgaaaatattaaagaacatggaacctttacggctatcgagcgcatcagtgctaaagacggcgaaggctctgcagttctttccaaatgggtgcaagaactcgtctatggcggccgcgtaaaacaagacaacagcgccatgatcagtaacgtgcgccacattagccttatggaacaagcgaaggcacaagtcgaacaagccatctcctccatcgacatgggtatgcctgtggactttgtggctaccgatttgcgtagcgcctgggaactactgggcgatattacaggcgataccatccgtgaaagtatgatagatgaattgtttagtagattctgtctcggtaagtaaaataaactttcaaaataagtaataattataaggaattcaatagatatgtatactgtagataattatgatgtcatcgtcatcggtggcggtcatgctggttgtgaggcggccctcgcctgtgctcgcatgggtcatcgcacgttgatggcgaccatcagtttggataatattgcacttatgccgtgcaaccctgccgttggcggtcctggtaaaagtcatcttgtgtatgagctcgacgcattgggtggccaaatgggtatcaacgcggatgctacggccattcaaatgcgtatgctcaacatggggaaagggcctgccgttcattccttgcgttgccaatcggataaaatcaaataccaacatttgatgaaacaaaccttggaaaatacggataatcttaatgttaagcaaattatggtaactgagcttaaggttgaggatggcaaggtaacgggcatcgttacggaacttggcgaattttatggagctaaggctgtcattctttgtacaggcacttatttgaaaggcaaaatccttatcggcgatatcgactatgtgggtggtccaaatggtcaacgggtagcggaacaattctctcaatccctattagataatggcgttgaattgatgcgttttaaaaccggtacgccagcccgcgtagataaacgtacgctgaacattgaaaatatggctgttcaagaaggcgatgcacatcatcatgcattttcttttatggacgaatggatcaaccgcaacgaagatgtgtgttggttaacgtatacgaataaggaaacgcatgagattattaaaagcaacattcatcgcgctcctatgtatagtggtaaaattgaaggcgttggcccgcgctactgcccttccatcgaagataaggtggtgcgctttgccgataaagaacgtcatcaattattcgtagaaccagaaggtacgagcacaaatgaaatgtacgtgcaaggcatgagtacatcccttcctatggatgtacaatacgcattccttcgcaccattcctggtcttgaaaacgtcgaaatcatgcgcccagcgtatgccattgaatacgattgcttgaaccctacacaattgacgccagctcttcaagtgaaacatattgaaggcctctactctgctggtcaagcgaatggtacatctggctacgaagaagccgctgctcaaggccttatggcgggtatcaacgcagccttgtggctcgaaggtaaggaacctttcatccttgcacgctccgaagcatacatcggcgttctcatcgatgatctggtaacaaaaggtaccaacgaaccgtaccgcatgatgacgagccgcagcgaatatcgtctattgcttcgtcaagacaatgcggatatgcgccttaccgaaaaaggtcgtaaaatcggccttgtgaaagacgatcgttgggctaaatttacagctaaaaaagcggccatcgaagaaggcatggaattgttgcgcaacacacctgtcaatccgtccaaggaaacgcaagccttgcttgaaagcttgggcacagcccctatcaaaacaggcatccacgcatatgatttggtaaaacgtaatgaactttcctatgctaccgtagctgatgcattcggtttgaaacgctttacacctgacgtagaagaagctatggatattgccattacctacgaaggttacatcaagaagcaaatggaacaagttgagaaggttcgtaaactagaagaaaaaattcttccaaaagaatgggattatacagaaattaaaggtatttcccttgaagcgcaacaaaagctcaacaaaattcgacctcactccatcggccaagccagccgtatctctggcgtatccccggcggatgtgtctgttctgttgattcaactagaacaatacaataggaacaaatagaataatatgtgattacatagaaaaagctagctaatcgtttttgattaactagctttttctgttataaggtttcccgttcctgatgctcattgacttcgcgaccttgactcatataatctggagtaaataaggatagcccaagtttaaataagaaccacatacatttttgtttcatgggtatcacctcctattgattgtagtgtatctataaatgataccattagcaagctttattttttataaatgtaaaagtgagtatatacgtaaaagtttgtatatttatatgaatatttataaaatgtatattattctactagtaaaatatgtacactagagaaatacactaagtgtacattcagaatagacaaaacaatttatatgtgaagaaaagttcatagtgataaattatagataaacagtaacatttaaaaggtagaaataagatatataaatttggaaaaggatgtgttagaaggttaacaaattaggtttacaattatgaggcggtttagatgatataagatttttatgcgtacctcctctttttgtacttttatctatataataaatgagaatatattgagaatatgatataatagatacaaatatgactcttatatttcgcttgtatgctcttttttaagtgatttgtatataattatcatagaagcacataaataggtcttacagcgcgaataaatgaattttagcctaaattatatacatatagttaggagcaccgatgaaagaaaaatatgatgtgcctatcgctagtgaatctgagtttgtagaatatatgctttcacaaatggcagcatttggattgccatgcacgcagcagcaagcaaaggatttctacgtgtactatgcacgcatgattgaaacaaataaatatctcaacctgacgggcattacggacatgaaggaagtcgtggttaagcacatgattgattccctatcctgttatgatccgtcgataatcaaatctggttcctctattattgacgtcgggaccggtgcaggatttcccggcattcccttggccatttatgatagaaccgtgcacgtaacattgtttgattccctcaagaaacgccttaccttccttgagtccgttatcgacgaattgcaattgacgaactgcaagaccttacatggacgcgctgaagatttgagtcatcaagattatcgtgaaagctttgatatcgccacaagccgtgccgttgcaagattacaaatcctactagaatggaccgtgccctacgttaaacaaggaggctatgttatcgccttaaaaggcgctatctacgaagaagaagtcggcgaatctgataaagctcttagcacattaaaagcatccatcgaagatgtaagaaccgtgaccttaccgacattggatgataaacgagctatcgtgtacattaagaaaacaggaaaaacacctgggaaatatccaagaaaaccaaaagagataaaggataaaccgttataaaaaatagaccatcccaaaaaacgatacgctactgcgcttcgcggagcccgaaatcgtttttggaatggtctattttttcctttatattacaacaaaagcctccgcagggccaaagtcgttttttgaaaggtgtttttagattaaactatatattataggtaacaataaataagaaaagattgtagcatattaatactaacggctatatcggaaacaaaacagggaacaaatcaattttgatttgttccctgttctttttaaacttgcatattcttgattacgtgtatgttttatagactaaaaaaaggaatgtccttccaaaaccgactttacgctcactgtggatttcgtttcacgaaatcttatgttcgcgactaagtgatgtgtggaccccatgcgtcgctacgctcctctgttgcctcacaccctacttatggccctttctttaagacttgtatattatttatcatgtgtatatttgattacagaaaaaaagtacccaacagctttccaaaaatgacttcgggtcccgctttagcgcgatagcgtgtcatttttgggaggctgttgggagcacttttgctgttatttaagatttacacgtgatcaataatatgcaaagtcgtatctatatcattaagcggcatgatatgtacgcctgcagcgatttttttgatttgttccagtgtttcgatggcgatttctgtacccgcttcttttccgcctttttctacgcggtctagaatgtcttgggtaaggttgattccaggtactttttcatgaaggtatgttgccattttaaagcttttaagaggaatcaaaccaagcatgataggtacattgaattcagacattttgtcgatatagcgtttagcttgttctaaatcatagattggttgtgtttgcacgaaatgggcaccatttttgattttagcagctagtttttgacgttcgatttctaaatctggtgcaccgggattacctgtagcaccgatgtagaaattcgttggctcttcaaggtcgttaccagcaaggtccttgcctgcgttcaatgtttttgcaatgttaagtaagcccatgcagtccacttcaaatacggattgtgcgaatggatggtcgccatggtctggcttatcgcctgttagtgtcaaaatgttattaacaccaagtgctgcagcaccgagcagttcggattgtaagcctatgatgttgcggtcacggcatgtgaggtggaaaattgtttcgatgccttcattatgttgcaataaataggacaaggaaatagggctcatgcgcattttagacatagggctgtccgcaatgtttatggcgtcaaccttgccttttaggcgcgctgcttgttcaaaaaccttttgggcagaactgcttttaggtgggtccaattcaacggtgatggtgaactggcctttttggtgtttctcacgtaatgtcatcatatacctcttatctattctatgtatggtgaaagcctcatatgcgttatgtgagcattgttttagactttcaccatgagtattatctatattatatgcctagattagccattatttcaaagtttcaaagaaatcgtttgcgtggtttacagccgcgatgccgtccttggcgtaaatatctgcgcccgcttggtcagcgtaatcttgggatactacggcgccaccaaccatgaccttcgttttaaggcctgctgcacgaatagcagcgatggtattgtcgatttgaggcattgtagtcgtcatcaaggaacaaatgcctacgagggccgccttgttgtccttaatagcttgtacgatgacctcagggtcaacatccttgccgagatcgacgattttataaccattgttttcgagcaatgcagctacgatattcttgcctaaatcgtgaatatcgcccttaacagtagctacaacaacggttcctttatctaaactgtcgctggccggaatgatttctttgatagtgttgaaagcagcttgcatcgtttctgcagcgagcataacttgtggcaagaataatttaccagaaccgaatttgtcccctactacgttcatggcttctgaaagcccttttttcgtaatatccaatggatccatgccgtcagctaatgctttttttacaagatcaacaatggcttccttttcgccttgttctacacaagtgcggatattggctaatgggtcattgctgtcaaaggatactttatctggaccttttggcgccgcattgcctggtgctgtagtttcgtcttcgtaaccatagtctttgatgaattcagcagaacctgggtcccaaccaagtaatgtagtgcttgatacaaatgcttttttagctgcgtagttgagcggattcatgattggtgtagtcaaaccggatgcaagggccattgttaggaattgaccgtttagatatgggcgttgtggcatgccgaaggaaatattggataagcccataacagttgggaaaccgaatttttctttatataaacgcaatgtgctaagcgtttgtcgtgcactatcttcgccgctggcaagtgttaataccaatgggtcaagcaagaggtcgtgcggttgtaaaccatagccatatgcgcgatttacgatgctttcagccaaagcaacgcgatcctcagccttttcaggcaaatcgccactgcagattggcaagcaaagtaatgcagcgccatagcgtttagccaatggcataacgtgtgttatggactcttcttctccatttacagagttgataagtgcacggccaggatagtttttaagggctacctccatggctttaggatccaaggtgtcgatggataatggcgtttctacaagcatggacaattcgaagatggctttttccatcaaaggtgtttgatccataccggctacccccatattcacatcgaggatatctgcacctgcttctacttggtctaaggcatcgcgttttacacgaatgaaagaaccatcccgtagttcttgagcgagcaccttacggcctgttggattgatacgttcgccgataatcaatggctttacattatgacctaattcgattaattttgtacggcttgtaatcaccgttttaggttcaatatgagcgcgttccttaggcgtatgtgcttttacagcatcagaaatcgattgaatatgcgctggtgttgtaccgcagcagccacctacatagcttgcaccggcatcaatgattggaatcatcaatgggcccatgtcttctgctgaaagcggaaataccgtttgcttgttaatgagttgtggcatacctgcgtttggttggcagatgattggtaaattagtaacactagcgattttttcgataagtggtgtgatttgttcaggtccaagagaacagttaataccgatgatatcggcccccattgcctctacgatagttgtggcaacctctggaggtgtaccggtgatggtacgaccgtcttcactgaatgaaaattgacagataatttggacatcttctttagtcttacctgctgcttcgcgagcatccaaagatgctaatagagcggcacgcatttcttgtacgtcgataatcgtttcgataatgatgaaatcaacgccaccttcaatcaaagcctctgcttgttctctatatgtatcataaatagaatcaaagctcatattccccaatggttgtaaaaaacgtcctgtagggcccatagaaccggctacacgagcggatggcttgaactctgcaattgcttctttggcaacctttacggctgctatatttatttcttttacacgatcttgtaaatcgtaatcttctaatttaaggccgcatgcgccaaatgtattagtagtaattacatcactaccatgttgtaaatattgtgcgtggatattttttaccacttctggtcgttccacgttaaataattctgggcaatagccctcttctaggcctgctgcttggagcattgtacccatagcgccgtcaaaaatgtacatgtgaatcatcctttatatataatagatgcaattattgatatatgaactctgtgatgtcagcccgccttaaagtatgtaaacattagagttgtgaatgaacatttctttctcgctccaccggccgggtctgtctacgcccttcgggctccgcagggccaaagtcgctgcgaaagtaatgttcattcacaattatctttatatactcttctgtgcgggctttcaatccccttgttcatcataacaattgcatcttttcgatatcatcaatagattgtttcacgtgaaacatttttgattgcacatgggtacaatggtacagatgtacaaggtaatgtttcacgtgaaacatcgtgtgttaaaaatttattctgttggttgtgctttcatagctataccagatgtttcggctgttgttttgcttgtttctggttttgtagccgctgctttttctggaagttttcttgattggcaatctttttgtgagcaagagctacaaccgcgttttgttgtcaagcattgatctcctggcatcaaaccgataatagctgttacggattttcttggaaataataagaagttttctgtaacttgtagtccgatttgttcggttttgatgattttgccaagttgtggttgaatttctaaaggccagttgccatagcctgggctgaaacgccatgtaggtgcataaccttgtttcttagcaatgttattgattacctcgttaacttggtcagccacttgttcaactgcagttgttgcagccgcatctagtaagagacctactgtgtagttgccttgtttgaatagctgttcgctacgtctttcaacatcttcgccgaccgtaacacctagcacatacacctttgttgatttttcaagatgtttttcaatgatggatccttcaattttgagcggcggattacttaggataactttgttttccgcatcgtaatcatattcttggtagacaccctttggtgtcgctaataattgaatttctttacaagcttcgtcgacgaatttttctggaaaatcttcggcatgacgaagtcctgcatatcgctttacttcatccttgttgatgacgggaagcattccgttataaatgggcatgtgaaacgcctcctttaaaaataaaatagattgtatggttaaaatgttaaacctattaaaatactgtcttttataagtataaatatatctatatatactgtaaaggctatagcttcatataatttattaaggtgcgtccatagaaaaaagttatatgtaaatattttatacctaatggtgtaaatctatttagtaatgatacataatcaaataaatttataagctggtatatcgtgttagtgaatatatgtttttttgaaatgtttcacgtgaaacattcttatttgttttagattttatttgaaaaatgatggtcacacctataaagttctatttcttttgcgtgccctatgttataatgaaatgaaatatttttgaacgtaaagttgaggtgaattttgtgggcaaagtaatagcgattactaatcaaaaaggcggtgtaggcaagactacaacatctgttaatctcagtgcttgtttagctgatgcaggcaaaaaggtgttattaatagatttggatccgcagggtaatgctagttctggattaggcattgaaaaagatgatttggaattatgtattcacgatgtgttgatagatggcgaagacattgctaatgtgattcaacctacaatgcttaaaaagctttttgtagcgcctgcaacgattcaattggctggtgctgaggtagaattagtagggattgtttcacgtgaaacaattttgaaaaaagccatcgcttctgtacgcgatgagtatgattttatcatcattgattgcccgccatctcttggtttgctaacattgaatgctttcacagcggctgacagtgttttgattccaattcaaactgaattttatgccttggaaggtgttagtcaacttgttaagacgattacaatcgtgcaacaaacatctaataaagaccttgtaattgaaggtgtgttactcactatgtttgatggacgtactaatttgtctgtccaagtggcagatgaggtaaaatcgttctttggtactaaggtgtataaaacaattattcctcgaaatgttcgcctcagtgaagcaccaagttatggggaaccgattattgtgtatgatccgaaatcaaagggtgcggctgtttacactaaattagctaaagaggttattcgagattctaagaaaacgaaataattggtatagaatagactaaataaatataattatgtaatgtaagcacaaactgtatattggtttgtgctgcattttatatatgcggtgtgaaagtactaatagattggggttaattatggcgatgaagcagaaaaaggaacgaaaaacattagcagcaatgatgggagaacagtccatagagacggctttacctgaacgtgaagttcacgagttgcctataggggatgtaattcctaatgaggatcaaccacgtaagaattttgatgaacaaagtttagctactttggctgagtccattaagaatctaggcatttttcaaccaatcgtcgttcgcaagcaaaaggataaataccaaatcgtagccggtgagcgccgctatcgtgctgcattgatggtgggcctagaaacagtacctgtagttgtaaaaaattataatacagaggaaatgacagaagtcgctttggtagaaaatctccaacgtgaaggcttggatcctattgaagaagctttggcgtatcaaggtttgatgaatacgtataagcaaactcaggagatgatttctgcacgccttggacgtagccgttcatatattgccaatatgatgcgccttttgaaattagccgcatctgttcaaaaggatttgattgaaggcgatttaactgttggtcaagctcgacctttattggctttacgtagtgcagcgcaacaagtagaagcagcagagcgcatcaaagagggcgagttaagcgctcgtcaagcagagcagctcgtgaaagcaatgatgtctaaaaagactaagtctaaagacactacagagccacatgatacagctgaggttcgcgcattggtagatcgtttaaaattgagcctaggttctccagtatctattaaatttagagctggtaagaaggtacaaggtaaaattgaaattgcctttagttctgaaactgaattagaacgtcttattgcgtatatggatgctcaggagagcacagatgatgaagaaacaatggagtttcgcgtataatggaacaaacaccaaaggcgaaccgcgtacacatcggcttttttggccgttgtaatgcgggtaaatcgaccttaattaatatgctaacggatcaaccagtatcccttgtgtctgaggtggcaggtactacgaccgatcccgttagcaaatctatggaaatattgcctctaggccctgtggtcattaccgatacggcgggtattgacgatacatcggaactgggcgctcttcgcattgaaaaatccgaagaaattatcaaaaaaatcaatctcgctgtctatgtgttgcgtaatgatgaagcgcccactgctgatgatatgatgtggcttaataagttgaaacaaaacaatgtgcctgtcgcattattcatcaatgaaattaacgcttttgatagtgaaagcactcatgataacgatagcaatggtaatgatactaatccaaattatgtagatgcgtatcctgatttatctgctattgccactgtcgtaggctctacggattttacatcgaatcgcgatcgtcttacattgctcgatttgctaggagggttaacaccgctcgatgtagaaggcgagcaatctctattacaagggttagttgatccaggggatactatcattttggtatgtcctattgattcggcggcgccaaagggtcgtctaatcttgcctcaggttcagacaattcgtgagattttggaccataaaggccttgccttggtgtgccaaacagaagagctaccgaccatgctcagtaagcttttacaaaaaccaaaactcgtcatcaccgattcgcaagcctttgaagcggtgaatgcgttgacgcctgcggatattccattaacatcattttccatcttaatggctcggttcaagggaaaattgcaggatttagtaacgggggtgaaagcccttaacaacttgaaacctggtgcgcgtgtgctcatcagtgagggctgcacacatcgtcgccaatgcgatgatattggaaccgttaaaattccgatgtggctcaaaaagaaggggcatacggatttacagcttgaatttaccagcggtggcgcgttccctaaggatgtgagcggttatgatcttatcatccattgcggggcttgtatgttgacgcgtcgcgaggtgttacggcgcattgattgtgccgttgtgcaaggtacgcctattgtgaattatggtgtacttattgcgtcattacatggtatactagaacgtgctattagtccgtttatggacgaattagatagaaagggttttgaatgttagaatctatacaaccctatatcggtgtattaggatgcgtattagccgttattttattggtatattgcattatcctacacattagattagggagcttaacgaagaagttcaatttctttatgcaaggtgaaaatggggctagcctagaacgtaaactttcagtagaaatcactgaaattcgcgaggccgcaaagggattgcaggatatgattgaggaacaaactcaaattcgcaatattcaaggtaacacattgcaaaaaatcggctttaagaagtataatgcatttgataacatcggcaacgatttgtcctttgcccttacattgcttgatggcaataataatggggtttgcatttccagtatctatggccgaaatgactctcgtattttcagtaaaccaattgtgaaaggtaaaagtctcgttaatctttcacaagaggaattagaaagtttaaatgaagcgcttggggaacgtacgaatgaggaagcgttagcgagcgttatccattctcaataggcaaatcgccttatcgtgttcatatagagcgcacatgcatgatgagttgagaaatgattaaaagtaaggaaggcattttgaaagtaccaagtattttgagttctgtagtgtctcagaatggtgataattgcaccattacattgagtcataaacaagcgaagattgtagccgtagtggccgtaatcttatttgtagcagcacttgttttatccatttggggcattgcacgacaagcagaaatcgttcaattgcgtcaacaaacacaattgcaaacagaacaattaaaactgttacaacaaaaaacagaagtgttggataagaaaatccaaaacttaaatcaaattagtgaagaaaacaaacaaatgttgaagggtgctgagtccggcacaccatctcaaggtggtagcgatggctctgacccaaagcaggaagccgctagcgatgagactagtcccacgctaagtgcggcgcaactttcagcaagactatctaaattagataaggatgcacaaaaattattggttagcttctacacgatgcgaaacattttgcgcgatggtggggctcaagacatcgctgcattgcaacaattgaactacaccacaggttctggtggatatacgaatagtacaacgccaagcatctggccaagtaagggtgttattacatccccatatggcactcgtgtcgatcctgtgaccggtgctgctagcgcattccacgaaggtgtcgatatcgctgacgattacggcacacctatcgttgctactgcagcgggtaccgtaacatttgcaggctacaccgaaggcggttatggtaacctcgtagaaattgatcatggcaacggatttgtgactcgctatggccacaatagcgctgttctcgttacaccgggcatgaccgtaaaacaaggccaagtcatcgcccttatgggtagtactggtaaaagtactggcgcacacgtacactacgaagtacggattaatgggtccgcggttgatcccatggtatttttgccaattagtaattaaatacgctataagacgggataccccctgttcgaaagccgacacgctactgcgcttacgcggagcccgaagtcgtcttcgaacagggggtatcccttttggcgtattactaattactaaactggcgggagtggagacgctactgcgcttacgtggagcccgaaatcattttccggaggggtctatcttttctatctaaatttagttgactaattggcataaaataccattgtacaacttagcataagggagagcccgaagtcattttccggaggggtctatcttttttctatctaaatttagttagttgactaattggcgtaaaataccattgcacaatttaggataaagaagtgtacgagattggcttatatatgccttataaaaaattagaacaggcgtgttctaattctgagtacctaatatatgtgccctaaaaaatagaacaggcgtgtactaattctggggacctagtatatgtgtcttaaacaatagaacaggcgtgtactaattctggggacctagtatatgtgttttaaaatagaacaggcgtgtactaattctgaggatttagtatatgtgtcttaaacaatagaacaggcgtgtactaattctggggacctagtatatgtgtttaaacaatagaacaggcgtgtactaattctgaggatctagtatatgggtcttaaaaaatagaacaggtctgttctattttttgagacccattataaggaacctatgtaacaagtattcattacatttcttcccaaacggctgggttggtagtaattcatataccataattggtacatgtttatatactgatggtatagatatcacatgtgggataatccttttgggttgatactaatatctattggatattgtattggtgtctattattttataagcatacattattgaagtgctagatagtaatatgatgatggggttctaaatccgactttggccctgcgaaggccgaaggccgtagtcagacctggccggtggaggatttagggccccatcatcatcttgtttggcaccaatgtgtaggtaatataattaatggatcaatagatattattatcttatgcataattaggattgtctttcatgtgatatctattccttttcgtctataaatattgtacaattatggtatatgaacggaggtatatctatgaaggcctatgtacaagtttataccggcgaaggcaagggtaaaacgacggctgctatcggcctcgctatacgtgctataggcgctggcaaaaaggttctatttttacagtttatgaagtctaaagtgtatagtgaacataatattttaccgaccctcaaaaatattacattagaaactgtaggtaaaccgttttttatcatcaaggaaggcatgaagagcaaggatgagctcgccaaatggggtgatgaggtggttgtatttgaatcgggaaatccgcctaaggattatgtagcgcttattgaaaagggctatgaacgcgcgttagaggctgtatctagcggcgactatgatttggtggttctcgacgaatataacatggctttgttctttgaactcattgattggaaaaaaacggaggctctattagaggctcgtaatccggaaaccgaagtggtgtttacggggcgcggggcaccgcaagaacttcttgatgtggccgatcttgtgacggaaatgaaggaagttaagcattattacatgcaaggtgtaatggctcgcaagggcattgaaaattagagtatactttcacaaatcccataacctaaggaggtgatgtggttgagtatagtcgctattgtggcactcgtcgtagtgcttctcatcgtagcgctgatcatgattatcctactaacgccaatcacatatagcatcgaatggaacggcaggacgccgtaccgcgtagaactgtcagtcaaatggctgtggcgcgtattgtcgctgtatctcgcatattttcagggcaaacctttttttaaacaactttatctattaggtatgcagaaaataggccctgtgaaagaatatgacgaatggattcaacaacgggttgatgatgaatatcagaaggctgttgacgaatttgaaaatgatccgatggctgcgcaagcggaagcgatgatgaaagccatgcatggcggcggtcagggcagtagtgaaccgactgagccgacgactgctggtgcttctggtgaaagcctagatgctacgcgcagtgcagggcaagcatcagatgcacaaggtaaacaggttcgcgttgaacgtgttgatacatctaaggatgataataagggtgctgaagcgcgggctgcacaatatgattcaattcgcgataacccgacgatgaaacctgatgatgaagtggtggaaaaggtcactttcaatagtgatggcaccgtaaaagagaaggtatttacgaaaatagacggcttgaaagatagcgtaaaatcgcgctttcaaaaaccagatcctaatgatccggtggctagctttaaatcgaaaatcccgaccttttggttcatgaaacatgtgacgaatacggaattgtggcgtcaattgttgcttgtttctaagcggtgttatgaccattctaaaccacgagatatcgctgtagaagggcgtatcggcatcggtgatccttttaagggcggcgtgcttgcttcgatgttgtacagcatctggcctgaacaggctgaacatatcgagattgattatttgaattggcatttagaaggtagcggccacattaaagggcgcattattctaggcgcgttggcatggcacggcacgcgattcgtgctttcacaaccaatgcgtgcactcatagctgaaacgggcaaggtcgtttgggttaagcgcaaagaaaagaaagaattagaacgattgaaagcggaacaagccgctaacgcatagttgacatcagtggaggtactacgatggagaacagtaacgtaaaagaaaatttagaagtcctttttgagaagttcaaaaatatgattaaggtggaaactgtagtaggtgaagcggtgcaaatcggcgatactacattggttccatttgtggacgtaacatttggtttcggcactggcacaaaccataacacatctggcaagaaccatgaatgtggcggcggtggcggcggcgctcgcatggaaccaagcgctgtgctcgtgatcaaaggcgaacgcatcgagttattcaacattaaaggcaatccttacagcaatagctttgatcgccttatcggcttggtgcctgacctcgtgtccaaattgaaatccgataaatacatctatcttaatgacgaacaataatagatagtaaatttttaataagggttcatgatgaattcatgggcccttattattatttaatagtatacaatttaattattagatgctatatctcatctatgatttttgagggtttttacttgtgaaagcaagttagatttgatatagtaaaaatagtgcattacatgtttgtgtaatgaaactttactgttcaggaggatctcaaatgaaattaactaaaaaattgacaacattggctattgttggtgctatctccgctactactgctgtggcaagcgctgctaacattggtttggtgcaaatgagtcaagttgtaaatagctatcctggttacggtgcactcgatatgaaaatgcaacaagtagatgcacaataccgtccacaaattgaaaagaaaatgcaagaaattgacaaaattaaagatcaagctcaagcagaagcagaattcaataaatccgtagctccattgttacaaaaagaaaatgacgaagtgaataaaattgcacaaccaatgatgcaaaacattcacaacgctattgaatccgttcgcgttgaaaagaaaatggacgttgtattagacgacccatacacaattcgcgcagctgatgcaaatagtaacgttgaaaatattacagatgaagtaattaaacgtctaaaaaaataatattttaatgtcgctttggcgataagtaaaaagacaccctcctaaaaactccaccggccgggtctgttcctttggaacagggccaaagtcgtttttaggagggtgtcttttttctctctaaattacatataaaatattatttttttagacagtaggtagaaagacaaagtcgtttttcgagagggggctgttttcctctatccaagataggtattaattttttcagacaatagggggaagggccaaagtcgttttcagaggggtatcccttttttcgttaatctctttgaataaaatattatttttttagactaaggaccagggggacgcagggtgttttgtgctggttggtttgttatgatttagttgtaattgagggcgacgaaggaggttttgtagatgtcttttatgcaggtttgttggagtttgatgcggtatccgcggtcaaaggggattccgtatattatggagaatggtacgtttgatcaagcgctagtttttatgttgcgtttgtttggcattatgcttggtttgtcggtggtggaaaatggtatcatatttcttatcacgcctgtaactgtgctagatacgattgtatcgattttaggctttgtttttgcctggtttttcctaaaagggctttggttgatattggcccatttttatgtgaaagctattagtaatcgtgatcttatgtttaaggatacgttcatggccgtttcgtatgcgatggcctttgatttacctataactgtattgtccttactcggtgctgtactcgttattgcattgagccttgccggagcgggtatgattgcgttcggagttcaatctattttgggcctaatcgcatttgtattagctatatattatatgctttgctcccttggactctaccgtcagatgttaaagactacatcaatgcatattattatcattgctattgtatatactgtacttttaacaagtgcatatatgatgttacgagtataggtgaaagttatttcataaatattaaacaatacaatacgtgaaagcaaaaaaacgagcttagaatgaatccaggctcgttttattttatgtgctaaatgggcagataaagaatttagtattttatttagtcaatcgatagctcatgtcgaggagcatttttattctttcagtaggcacagagccatccaaagaaacggttagccaattggccttgttcatatgataggctgcatatatgcctggttccttacgaaaggcaccaatcatggtgggctcgcatttgatgtttaacacatcgataggccgaatgcttgaccatcctaatttatcggtagtaatattcatgactagggcgaaccatttatgattactttgatggcggtacaccttgtaatgcgggaactgcgtccaaggcgtattggtggtagtatcctcaaattgattgtgaatataggtttctaaatcttcgcgtgtcatgtaaatccttctttctctcttacataattagtatattctcttatgaaagcaactgcaagcgaaaacactatattctatagaaatatagttatgaaattaagatattaggactaagaatgtaaaaaacacctatatatggtaatagttactgttttatgtaacttaccacttataggtgttttttatatatagacactaaggaaaggaggaggtcatatctatataatcttattcaggtttatgaacgaggtttacgatgaattcgctgtcttcaacaagcgttgcttgaatgtagttatcgccattaaattcgagaacttcacctggtacgagtacatgttcttctgtttcgttaaggaatacttgaactgtgcccttaacaacagtaaagataacattggcttcaggatgattgtgtttttctaccttttcgcctgctttaccacctttttttacgatcacataattaggaccttggaataataaacctaactctttttttactgtgcctgccatgatgctgcacctcctatatttgaaagtatatgagtaatgatttatcttatagttctattataactgatatttcttatcaattctgtgtctgtagctacacttttataaggaattttaaaatagaacaggcctgtactatttttaagacacatatactatgtccttagaaatagaacacgcctgttttatttttttagacatatacactagattcccagaattagaacacgcctgttctaattttttaggcacatatattggatcattagaaataaaaaacgcgagcgtaaaattttacgttcacgttttcgttcgtttttcgtccgtttcagcgaacgaaatggtatttattttttagcgattgtatataatcgtgtgccattgtcttcggtggtgataagctcgaattcaggatcgatagctttcacaaaggcctcgaaccatgtttggtatgcgagcatcatgaatttagggtctacgcctgcagtgcgccagtagccagcttgtaagcggtggtcgccgacccatgtgaaacggtccgcgctgtcctcaacgatttggtcgccgccgtcgcaaggcatgccgtttacatagaagttttgaagggcgttgtagatggctggcgccgtatgttcttcgaggctatcttgggccacaacgccgcatgcttgaccttgtacagcgaaggcatcgagaatagcggttactacgtgaatagcattttcatcagcatttgtatcgagcatgtctttgatgaaagctgcctcgcggacggatgctatgttgatttggttggagagccaaccgtgaatgttgttgtggtcgataatgttttccaatggaatgctagggttaattggttcgccgtatgtatctacggagatggaatgtaattcctcagcaagatcgtctacaacctttgttgttttttcgagaattaagttttcgcgctctacgagcaattggattttacggtataaccagtagtgaatgtgacctaaaaatgcagacatgtggaactcctttgtataaatttctatgataatggggaagggacctatgtatttacataggtccttatatatttctaattatgcacctttgcgggcagtttctagtttgttaagtaaatcgtacacgttgacgccgtggatttcagcggcttgccatagtggttccatcgtagaggatggacaaccgaggcaacccatgccgatgctttgcagtacaggtactgtatttggatagatgtccacgatatcgcggatgattgtatccggtgtaattggttgacctggttcaaggcgtggcgtctcaacctctggatcattgccgtgacctggcaagttaacaataggttctgctgctttcgcttctgtaggagccccttcaaggtcgcctagtacagcttctttgaaagcctctaagccgatgcggtcgatgaattcacccattcgttcgatttgtgcatttgctttgtaatattcgatgatgcggtccacaagtgcaagggcttctttttctgttgttacctctgcaatgaggtcgccaatgcgtggatgcgcaccgccgctgccgccagcgtagacgctccagccctcaacagaaccgataacgccaacgtccttcatgcggctttcagtacaagaattaatgcagccggacacgccgattttcatcttgctaggcatttcttgggacaaatatttgcgttccaattgcatgccaagatgcacgctgtcttgtttagcccgtttacagaacgttgtgcctgggcaaatcttgacgctacgcacgcggttggacaccatgtacgccggctccatgccgagcatttcccacgctgcgtctacgtcctcagctttcaaattcgtaatcataatgcgttggctgccagttagtttaagaacagcgccaaatttgttcgccacatcaatgtatttttgcaattgatctggttgaataaaacccgctggaatgcgcggtgtaatagcataacggcgttggccgtttttaattcgttgtaaatttcctgcgatttgagccattgtaatcccctctaaattgtaatgaactacttatattctatcatatattttcactgtgaaagtctctattagcacatgctagagatgatgcgtttcgacggtaatgtacgtccaaacgatacatgttctagagagctagtaagagatcgttatgaaatgattgttatcatcatttcaaattacatatactagtataattcattttacaataaaataatgtgtcccaagctacaaaaaagcaaaaatttttgacactgtttcacgtgaaactaaatacaaaagtacggccctaaaccttgatttggggtcgttttttcatggggaaaaatattattcctctttttgaaacgaatttgcttgtcacgagcctctttttggaatgtatataggtgaaaggaggtgatcagatggctgaactaaaacgcacaaagttagtgttacgttttaatatcggtacggaagaaaaaccgaagtacaaagacgtcactttcacacgcgtcgctgaagaagctactgatgatgcggtcaaaatcgtcggtaccgcattggctggtctctatgagaacaccattgctgacgtaatacgcgtcaacgaagtatcccttggtcattaatgtgctttcaatcataatagttagcacataatggctgcgtgaaggttcgtagtaatccaaaccctgtggacctatcgcgatcattcccatccttatgtatatgaattagaaaggagtgcccaacatggctgataaacgtgtggtatatcttaaatttgctacagtcgatggtaaaagcgcatcgatcacaattagtggacctcgcactggccttactttggaacaagctaaaacggcagctaatgcgctagtagcgaacaaggtaatcttaggctctggcgacgctccattggcaagctttacctctgccagtgaagtatctacgcaaagtaaagatttgcaataaaacaacatatcgctaatgtacagatgaatctatcgcatctgtgcctagcacaactaaggccgcgatgcctaatataaatatggcgattatgccaaatacaactatcgctgttatgcgatgaatatcttatccctgaccatatgatagtctcggaacctgtcatatggcgcctcccagcgggccgctcttcggagtggcccgttttgttgtataatgaacctagaattatcttgatgtaggaggaatgatgaaggttctatacgatacaattttgaaagcaacttatacaggtcgtcccaatcggtttgtggtgactttggatcttaatggtgaaagcgtacttgctcatttaccaaatccaggtcgtatgtgggaactgttatttaccggtgtcacgatgtatatcgtgcctcatgataagcctgatgcgaagacgaagtaccgcgttataggcattgagcgcgacggtgtggttattatgctcgatacgaactacagcaatgatgtggctcagcatttgattgaaaacaaactcattcctggctgggaacaatggcgtgttgtacgtcgcgaatatacggtaaaactacatggggcgacatcacgctttgatttactcctcactaacgacgatggtgaagaattcctgttagaggttaaatcctgcaccttgttctccaagaccggtgccatgttccccgatgctattacagaacggggacgcaagcatttattgcacttacgggaactgcaaaatgaaggctaccatacgggcgtattattccttgtacaatgggaccaagctaaatggttcttgccagactaccatacggatctagaatttgccacgacctttaaagaagtggcaccattcctcgactggaaagccgttgctgtggcgtgggatgagactttcacaatgcctaccgtgacgcgcgcctgcacctatccgagctatgttctcgacagcgaagcgcacgatagcggcgtatacatcatggtgatgcaccttgaccatgaactagatctcgaaatcggatctaagggcatgatgcattttaatgcaggttattacatgtatgtcggctccgccaaggcgaatcttacgaaacgcattgagcgccataagagaaaacgcaagaaaatgcattggcacctcgactacttccgcggctattgcgaaatgatagcggccgtgcccattcgcacaagtggattgccccttgaaagctggagcctcacccatgagccatatccgtccatgccgagcatgccagatcccgatgtagacgtgagcgtcgaatgtgctttggctgatgcagtacgcgccattgccgaatgggacgtgccaaaatttggctgctccgactgtgattgcacgagccatttgtttggtatgactgaaaatccaatacataataaggcctttatggacgtggtagaagaatttaggatgaatcaactggattccataattgttgagaattaataaagtagcatatttgagatgtgttagtagttatttccaaaatggaaacaactgctgatgatatgataaaaggacgtgtaaatcaatttgatttgcacgtcctttataggtattggaatttttatgataaaggtaaattagaaaggttttgaacttgttccaaaatggaacaggtttaaatggaaagtttaaggattgcaatccctaaatatgttataattgaagagtatagggattacaatccttatatttttaaaaatagagttggattaggattgctatcctaaaacacatatactgattgtgtattaacagtgatatagtgctaggaaaaggaggtcatgatgtctttaattcaacgtgagcaatacttagattttttgagacgtcataaagatcaagatgtaataaaagtcgtttctggtgtgcgtcggtgcggtaaatctacattatttgaattatttaaacaagaattattagacagtggtgttaaaccaaatcaaattatctctattaattttgaagatttagagtttgaaccgctacaggagtatcatgccctccatgagtatatagtagaacgattgattccagagactcccatgtatgtatttttagatgaagtacagcatgtaccacaatttgaaaaggtcgtagggagtttatttatcaaacccaatgtggatatttatattactggttcaaatgcgtattttatgtcctctgatattgccacattattaaccggtagatatgtgcaagttgagatgctaccgctttcatttaaagaatttcacagtgcatatagtcagcaaaatttatcagatatggaaatatataatttatatattgaacatagttcatttccaagattagtgcgtgttgaggatgatgaaagcattgatgaatatttggaaagcattcttaatacagttgttttgaaagatattgtaacgagattaaaaattacagatgttcctttattactggatattattagatatttattggctaatatagggagtctgattaatcctacgaaaattgcgaatacgctcactagttatggccgtaaaacggataataaaacggttgagaaatatttacaaggccttaaagatggtcttttaatctatgaagttgaccggtttgatgtaaaggggaaggcgttattacagcgaaatgccaaatattatgttgtagatagtgcattccgtaagtttttattaagtcgtacagactcggaccgaggtcatatattagaaaatattgtatatttggaattagttagacgtggctatcgtgtatatgtggggcatctacaaaatggtgaaatagattttgttgctaaaaaaccacatcggttagaatattatcaagttagctatacagtgatggaagatactacattacaacgtgaattatcatcgttagagcaacttgatgataactaccctaaatatttacttacaatggatgtattacataaaacagataaccataatggtatagagcaaaagaatgttctggattggctattagaataggcgaggcagctttcacaaaaatccttataacaatagcgctaaacccttaaaaatgctataataatatgatgaattgtaatcagtgttagtaaaatgaggtgagattgtggcagaccaacaatggtcccacgggaatattcatcccgttcagattgataaagaaatgaagaacgcctatatcgattatgcgatgtccgtaatcgtaatgcgtgctcttcctgatgtgcgcgatggcttgaaaccagtacatcgtcgtattttgtacgcgatgcacgaaacaggcatgacgcctaataaaccgtacaagaaatccgctcgtatcgtcggtgacgtactcggtaaatatcatccacatggtgatatctccgtttacgatgcaacggttcgtttagcgcaagatttcaatacgcgctatctcttggtagacggccacggcaattttggttccatcgacggcgatagtgccgctgcgatgcgttataccgaagtacgtatggcgaaaattacgcaagaaatgctcgctgatatcgacaaggaaactgttgatttcatgccgaactatgatgaaagcttgcaagaacctacagtattgccagcgaagatcccaaatcttctcatcaatggttccagcggtatcgccgtagggatggcgacaaatattccgccgcacaaccttaacgaggtatgtaatggccttgaaatgctcatcgataatccagatgtaactgtggacgaattgatgacacaaattaaaggtccagacttcccgactggggcgctcattttgggccgggaaggcattaaaaaagcgtactccacaggtcgtggcagcgtaaaaatgcgcgctcgtgcaaccattgaagaaatggcgaagggcaagcataaaatcgtagtgactgagattccataccaagttaacaaggctcgcgttatcgaaacgattgcgaacttgagccgcgacaaggtcatcgacggtatcacagcacttcgcgacgaatctgaccgtcaaggtatgcgcatcgttatcgaattgcgcgctgatgtgcaaccggatatcgtcctcaataaattgtataaacatactcaattacaagaatcttttggcgtgattatgttggccctcgtagatggtcatcctcgcgtattgaatttgaaagaagtattgggttactacttagatcatcgtctcaatgtaatcgtacgccgtactcaattcgagcttaacaaagctgaagcgcgtgcacatatcttggaaggcttgttgatcgccctcgaccacatcgatgaagttatcgctacaatccgcagttctcaaactgacgaaatcgcacgtaacgcattgatgcaaaaattcgggctttcagaaaaacaagcagtagccatcctcgacatgcgtttacgccgtttaacaggtttggaacgcgagaaaatcgaagaggaatacaaggaattgttggcattgattgaagatttgaaagctatcttggctagcgaagcgcgtcaacgtcaaatcatcaaagacgaactggaagatatgaagaagaaatacggcgatcctcgtcgttctgaaatcactatcgacacgtccgaccttgatgtagaagacctcatcgctgacgaagagatggtaattaccttgacgaaacaaggttatatcaaacgcatgaacgcgaacgtatatcgcaaccaacataagggcggcgctggcgttatcggcatgaagacgaaggaagacgattatgtaacgcaaattatgcatgttcgtacgcataatacattgttgttcttcacgtccactggccgtacatatcgcctcaaagcgtacgaagtgcctgaagcaggttcccgtaattctcgcggtaccgccatggttaacgtattgccactcgctgtaggtgaatccgttacgactatgatcgaccttgaacgtatccatgaaaatgtaaacttattcatggttactgaattcggtgttgtaaaacgtacggctatcgaagaataccgcaacattcgtcgttctggcctcaatgcgattaaccttgacgatggggaccgcttgatttgcgtaattgtaaccacaggcaaccaagatatcctaatcggtacgaaacttggcatggccatccgttgcaacgaagaggatgttcgtctcatgaaacgtgcggctcatggtgttcgtggcattaagttgaaaactggcgacgttgttgtaggcgctggtgttcttgagtctgatgaaagcgaagcacaagtgttcactatttccgaagagggttatggtaaacgtaacgaagcagatgcgtacaatgtacaaaaacgcggcggcatcggtacaaagaacttccgcattaacgataaaactggcgatgtagtagccgttgaagtcgttcacaatgatgatgaagtgatgctcatttccgaacaaggtaaaatcattcgctttaacatgaatgacattgccgttaaaaaaggcaaagccatttctggtgtgaaaacacaaaacctcgacgaaggtgataaggtagcaagcattgctgtaattcctgcatctgaaatcgaaagcgaagactaatatcgtatatgtcatatagatttatttgtattctatatgcaaagtaacgaaaatatactatatctaacatagatatgcacaattggcgatcacctaagtggtcgccactcgtgttatacaggacgagcagttgcgttatctattaggccctgacgttctgtagagaccaaaccacaatcatgcccatatatagttgaatgaataaaggattgaataggagagaatgatgaaaaaatggttagctgccattatggcagcaggatgtatatttttcggtggctttggcgtagccaatgctgctgattggtactacgttgatgcggacacagacgattccgcgtggtttatcgataactcatctgtgtttaaaacagattctatggcgcgtattttggtgaaagccaacaatgtagaaggttatacctatatctacactgttgaaattaatcgcccagatagcacttggacagaagtgaacgcaactgtgtatagccaatctggtgtaccgttgttgagtagcaatgaaaaacaaaaacctgtgaaaattgagaaagatacaataggatcagaagtaatgcaggccctttggggaaaataatttaatatagatgttttgaaacctcgctctgaatattagcattctggtgtggtatgtagaaatggatggtgtctaaaaatcctccaccggccgggtctgacttcggcctacggccttcgcagggctaaagtcggtttttagacaccatccatttccccgcctaccctagcagcatattcagagcgaggtttcttttattctacattagtattattttctacaaagggccgggaaagggaaataccggccgggtctgactccggcctacggcctctgcagagccaaagtcgttttttcgaacctatcaatcccttttcataatctatcatttacacaaattcagagaattgagttctttttatctacaaaattattttccacaaagggccggaaaagggaggataccggccgggtctgacttcggcctacggcctttgcagggacataagtagggtgtgagctaacagaggagcggagcgacgcatgggagccacacatcacttagtcctgaacgtaagatttcgagaatcgaaatccacagtgagggtaaagtcggtttttagacaccatccagttcccagcctaccctagcaacatattcagagcgaggtttcttttattctatattagtattattttctacaaagggccggagaaggaagatatatttttatttatttatcgcctaaattgtattaaaattaggggagaaatgttcgcttaggggaaaggtggtgcggtatgcgtagttttgattatcggcggctcggggattgtctgtgggatggcgaggttgtgtcgttactttcacagattcatgagtataaggggcggcaggatttgtttgtatcgcagaggcccagcagtgtggcgcggcttgtggatattgcgaaggtgcagagtgtggagtcgtcgaaccggattgaaggaattgtgacgacgaaggctcggattcggtcgttggtggcggataagacaacgccccgtaatcgggatgaggaagagattatggggtatcgcgatgtgttgaatacggtacacgaaaattacgagtatatcgatttgacaaggcaaattgtactgcagttgcatcgtgatttgtatgcgtattcccataaggggattggcggcctatcgtgattttgaaagccgtattgaattgctgactatgtcgttatctgcaaaggatcgtataaaaatcataattagtgccactattggtaagattacgaaatctggaattcttgagaaacaaccagatatagctgtatctactgttgaaaaagctttgaaagaacttgtagaagagggatttattgagcgacatggtgtaggacgaagtacattttacgtaaaagtatcgcaaaaaattagctttcacgcaaaatacatttaatatatggtataataaattaaatttgattttatacgaggtgaaatatatgaaaaaattactaggtacatgtttagctgctgctgcaatttgcgcattcggtttcggttctgctagtgctgttaactggcaagtatttggtcaagatagtgcaggtatcacttggtccatcgatcaagatagcgttcaaaaaagcgataaaactgcaactgtaatgatcaaagctcaagattctgaaggttatcatttcatcgcaactgaagaattcaaccacaaaaagaaaactgtaaaagaccaaaaagttgtattgtacaacccacaaggttacgcagaacgtgaagataaagttgatggcaaagaccgtccagttgttgctggttccccatccgaagcagtttacaacttcttatggccacaacaagcaaaacaaggtaaaaaataatatacaccttatacgacaaagcagctcgaaagagctgcttttttgtgtttatatgcagagtatggggttataggacaaaaagtgttgctcttaatgccgatggaactagttaaatactagctccatcggcattttatcttttgagtaacttttacatataggacaaaaagtgttgctaaaaagtctgaaaccccttgattttactgactcaaataaggttttatctttctaaagagatatattttttagaaggagtataattatgaaactagtcagatgccctaattgtggtttcgtttgtaagagaaatggtaaaacaaatgcgggttctcaacgttggtattgtaatcaatgttcttgctcattcacaaataaagtgaataaaactaacaataatttacagatatttttggattggttatttggtaaacacacacagttagatatggctggcgatggacgttcatttcgtagaaaaacatcacagttttgggagctttggccattaccaccaaaagttgaatcatcaagtagtgtggtatttgttgatggtatttatttagctagaaatgcttgtattttaatctgttgtaatgagacgcatgtcttaggctggtatgtttgtagatatgagcattctaaggcttgggaggctttattacgacgtatttcatcacctatagtagttatatccgatggtggtaccggctttcaaaaggcattaaaaaaagtttggccgaaagccaaactacaaaggtgcttatttcatgcatttcaacaagtaaaacgctatacaacaatacgtcctaaaacgattgctggttgtgagttatatggaattgcaagggatttattaacaatacacacgcaagatcatgctatgaagtgggtacaaaacgttatgtcatggaaagtacgacatagggtattcctatcagaaataacagttgatgaaaacggtacgatacgacctaaacatgaacgacttataaaagcagaaaattccttagttaaattgattaacaaaagatgtttatttacttacttagatgcatcgttaacatgtacctgcccagctactaataatcgtatagaaggtggtgtaaatgctcagttacgcactatgttacgtaatcatagaggaatgtctattgaaagacgaataaaagcggtgttctggtggtgctatatgcactcaccaaacccgctttctaatgcagaaatacttaaggttatgccgaccaacaagagtatttctgatatatatcataccatacatgaacaatctaggttagaagcttctattccgacttggggtgatgctattgtttggagtgatttgcataattatgatcgcctatttaccaatctttgggactaaaatagcaacactttttgtcctataacccagagtatgagtttgagttataggacaaaacgtgtgggtaaaaatctttataacactagatagacactgatatgataagtgttttatcttgttttgtaatttagtataacgtaatatagtatatcgtaatatactatattgtgttatactaaagaagatatagataggatatttgttgcatagcgtaatttagattaacgaggaggtgcgatatggtatttgtaggccgtgaacatgaattagcttctctggaggcgcaatataattcaaaacgttttgaattggctattgtgtatggacgccgtcgtgtgggtaagacgtatttgttgcaccactttttgtcgtctcatgatggcgcgtatatggtgggcctcgaatctggtgcgagtaacaatttagaggcgctttcacaagctgtatatcgtgcaacggggatgattgaaaccggtaaattacagtccacattaccgaattttccaacgatcacggcggcgttgacccatttatttgagtatagcttagaccatcgttgtatatttattatcgacgaatattcgtacttggcggaatcgattccgtccgtttcgtctgagcttcaagccttgattgacgcgtataaaaatcggtctcagttaatgctcatcttgtgcggttcgtccatgagttttatggaaaatcaggtgctaggccataagagccctttgtatggtcgccgcacggcacagtataaaattaaaccgtttacgtatatcgaggcccgtcaaatggtaccccatctttcctatgaggatagtgctatcgcctttggtcttaccggtggtgtggctgaatatttatcatattttagggatggtgattctcttgatgaaagtattatcaccttgtttttcacgcctacaggacgtcttgtagatgagccatcgagtctattaaagcaggaattacgggagccgcgccagtataatgcaatcctcagtgctatcgccaagggagccagccgtaataacgaaattgctactaaggtagatatgacgacgggggcattgaataattatctaaaaagccttattgatttacagatcatcgaaaaaatacatcctgttggatctaagtctaataagagtatttataccattaaagattctatgtataccttttggtatcgttttgtagaaccgaaccaaggagccattgaaaactttaatggcaaacttgtataccatcaatacgttaaacctatgctttcacatttcatgggacccgtatttgaaacgatggcagcacaatatgtacaggcgcgcattcaccaaggctcagttccgttcttgccacaacaaataggtcattggtggggcacggatagtgcaacgaaaaagcaagttgaaatcgatttagtggccatggcggacatacaagcagatcccaatgcacggcctgtacgtcatttattagtaggcgagtgcaaatggaaaaatgaaccgattggccaagatgtgctgggatcactcatggaaaaagcccgtgtattgcacggtgaaccatactattggctatttagcaaacgagggtttggatttgtctcagacgatgaacgggtagagctcatcgatgtaccgatgatgtatgaactttaaagtttcctgtttatgaagtccaataatctttcaattcctactagcctagtacgttgattgatggcctccttatttgttatgctagtaatataggagaaattaaaactttcacaataggtatgattatacagaacgaggaggtcctcatgtcccaatttgaatttatcgacaaacgcgtgccaatcgcgctcgacaacccgtccatttaccacgatatttcgaagtgtaagaattgcaccttgtgccgtcgcgcttgcgccgatgtgatgagtgtgctcgattattacgatcttgaatcaaccggtgatgtgccaatgtgcatccactgtggtcaatgtgcggctgcctgtccattcgattccatgcatgcgaaatctgagcttgataaggtgaaagcggctattgccgaccctgacaagatcgttgttatccaaacggcgcctgctgtgcgcgtagctatcggcgaaggctttggctacgaaccaggcacattcttagaaggtaaaatggttagcgcccttcgtaaattgggtgctgattatgtggttgatacgaactttggtgcggatttgactattatggaagaagcatctgagcttgtagatcgtctaaagaatggcggtactatccctcaattcacatcctgttgccctgcatgggtgcgctttgcggaaatctatttccctgaactcattccaaacttgtccagtacccgttcttgcatcgccatggaggcggccatgatcaaaacgtactttgctgagaaaaagggcatcaatcctgcaaatatcgtgtctgtcagcgttaacccttgtacggcgaagaaggctgaaactaagcgtgttgaggaaaatgcggcggctcgttattacgatgatgaaagcctcggcatggatacggatatttccattaccacacgtgaattcattcgctggctcaatgacgaaggtgttgattttggcagcttagaagactctaagttcgatgatttaatcggtatggaaactggtgcatctatcatttttggtaatacaggtggtgttatggaagcagctatgcgtacggcgtataagctcatcactgacaaggaaccacctccatatgcattgacccacctcgaagacgttcgcggcatgaatggtgttaaagaagcgactgtacaactcggtgacgacgtaacattgtccgttgctgttgtacacggcggtaaaaatactcgtgacttccttaacacattgaaagaaagtggcaaacactatgactttatcgaagttatggcatgcccaggtggttgtatcggtggtggtggtcaaccacgtactaaattaccacaagccgtgaaaacaaaagaagcccgcattggcggactttacaaagctgatgaagaatataaatatgtggcatcctatgaaaacccagaaattcaagacctatacaaaaacttcttgggcgaaccattaggacataaagcacacgaactacttcatacacactatatagaccgtagtgcacaattaggggaccgcaaagacgtggtgcctgaaacatgccctacatcacctaaatacaaagggtaattatagttagaccctatcggcccctcaaagccgacacgctactgcgctacgcggagcccgaagtcgttttgaggggccgatagggtctttctctatttacgtttgtggtttaggtgatgttagggcattgttttggtgaagagaaaaaatcctccaccggccgggtctgactccggcctgcggcctccgcagggccaaagtcggttttggaacagatgggggctttttctatgtacgtttgtggtttaggtgatgtcagggcataattttgcatttatatggtacggaatttacacgtttgtgattgtatacttctcttaaggatggtattgttattataaattgatcgagttttatgtaccggggttggttagggtagttgtttgtattattaggggatgcggaatatgtttgacgaacgaatcgtggagaataatatttttagttttgcgacgaatgagttgtcgcaggatgcttttatttgttggtgtttgaattggattaatatgcctgttcgcgatgataatgcaagtgggcgtcagtttggagctcgatttttatctcgtttgttgaacgggggctatgatgtatctagtgttaaccagatatatatttttaggcagttacttaatatcgatgtacttgtattgattccagaattacaggtagccttaattattgaagataaaacatcatcgcaggagcacggtaatcagatcaatcggtataaatatttgctttcaaaaacatttgaatcgaatcaatataatgggttggatatatatcaacatctttcagatgataaaaaggaacaacagcaaaaacgtgatgagagcgcttgctggggcgcggtgaatagtattcgatgggcgttacgagatgaaccgggagactttgatttgtcaaagtatacgattcatacggcgtatttgaagacggattggttcaatgatgatgactggcatacggttcgagaactggaaaaggattctaaggttaatacttatgtggatgggccagagtttttgtccttgttattatcttgtcgtgagtggaataatccaattttaatgagctttgtggattatttgagctctaaaattagggctactatagagcatagctgtttttgggaatactataaggatattgatgggtatattcgtttttatatccaagatactgcaattgcccaacggagatttttgcagactgtatttaatcagccaaatcacgaagcaccatttatgaccgacttgaaacaacacgttgagaatattgacgattcgtatgtatatggtcgtatagatgatgcgtctcatactcatacgattcagcatggtagcagctttggtaccccttggtctttgatgcatttttggccacgttctctagaccgaactgttgatgccgattattggggctttcaaaatacaaatgaggataatttaactgttaagccctatatgttttggcgtgttgataaaattaaagaaggcccagttttgagtttacgttactatacgtggtgggaaaagggcgccagtgataatggtgaaagcaatacctgctcatataaaacccgtgtgtataactatattaaagatcgcatattatcagtaaagaatatttctgatactgtgagggctattgatgaattatataaaagtgaggctgatactggggatatatgctctgaaggtaaattatataagcaatatgaaaatattctcttgcaatttaaattacataagatactaattgattggaatgatgcggataagcgtgcacaatttatatccttaatgcgtgatttaaatgcagaattaacgcaggagatcgaggacgtgaaatgggaccttgtgcgtaaaggggtgctaaagtagaggtgaccttatgacagaggaagagttatataatcgttatcatgaaatacaatcaacatatgtagaggttagatttattgatggagagtcattaataggtaagttggactcttttgtttctggtgtaaataatgagccagatgaggcctcgatatatgttggttgttatgaattatttgctagtgaaattagtgaaatagtagagatctcatgatgtatgagtaatagtagttagcatttataattttagggatagtaatagcatagattataaaagactcgtatcacagcaaatgatacgagtcttttatgtttatgtattttattcgtaataggaatcagttaattgaccatcttggtcttggataatccagttgttgttttttaccatagttacattgccggtgaatgtttgatgtttgatacggccgttaatgaggtctttactttcaatgcgataattatatacgacggtgtctggtgagacggatacagcttttgctgaaagtaatgtggtggatagggttgatttatatccattgcgccagtagtcgtaggtaccgaggctagcacgttgttcatcagagaggtacgtgtatgcattagcaaagtctttattggttaggtagcgatagtagttttgcaatgcttttgtactttcttcaaccgcattattttgtgccactgattgtgtatttgttgatgctggttgtggggcaggtatagctttcacagacgaattattactgttagtattcgtagaatagtgggcaggtgttgcattgtttataggattaaaactagtagcgatagtagcagcgctcaagccaatacttatgcttatgaatacgacataggcaatgatatacaacgcggtagatgtggaggttggcgatggtcggagcccatattgtcgctggatatctggggtgatttggatataggaggttctttcaccatagttattagtatatgtatcacctttggttagcattaagattaaaaaccaaatgggtcctacgataggaataaagttgataaggaagaaccaaccagatttattggtgtcgtgtagacggcggacggcaatagctaagcctggaagtattaatgctaattcgataatacctagtaggacatataagacgataacagtcatgatattattagacactaatttaatgatacccattatgataggaatgattgttagacaaagagaaatcatcaaattatatctgaaaaattcgctacgactggcacgaccttgaaattcagcatatttcttggtgagcacaaacgtaagtgtgtctagctcattgagttcaaagggatcccagtcataaacaggactggtcttttgtgttggtggagttcttactgcttctggtgcagttgatgtgttagtaactggtgttccacaattgctacagaataatgtattgggctctaatggggtgccacaattgttacatgttaattgtgcttgaggttggccgcaaatactgcaaaatttagcgccttcaggtaagggattgccgcaatgttgacaaatcatgattctctccttgtcttgtttcgtatgtgataggaatatattttaattttaaccctataaatcatagtgcttcaagtgatttggtttcggaattttttcttaaatgtttctgaatttttcatcttattgaaatagaccgcttcttttgattttatgcagtgacaaagaatgtgaattggtttggcacttgtttttgaatacgcataatataatcgatatccatcagcggtttccatatgataaatagggaatcccaatgaattgattttactattatgagtggcatcaatttgtgttggatcatcggctgcatataggcgagtgagcattttttggatataaacgcgcactgtttgattagtacttgtataatccgctaagaattgtttctctagttcaaatttttcgtaaatttgttgtaaacctttagcatcatttagacgctttgcatcgttctcatatgctttttcatcttccgccatcaattgtagttgcgtttctagctcatgaattttttgtgccgattgattttcttggtccgtcatccgttgttggagcgatttatttttctcttcgaattcatagctacatttttggtaataattagattcctcttgatatgttttataagtaaatttattagtagccattacgtaacccttcccttatatacacattcataaaaccttcatattttatatagtatcatacaacaacctttcggaaaatcgtttatgtgaaagctttgatatcacttactatttattgtatatagttaaaaagacagagttgatatacggagtaatgtagatatactataaacacaaaaaactctaccctagatcttctaaggtagagctttcatctataaatctctataatacgatacttattgtatcgtatgtttgtttgatatataattaacataagatagttaggcgaggttgggcctctcttcgtcattgaagggaggggtaagcctatgagtgattatgaaatcattatgctcctattacaggtgatgaccgtggttatcgcctttggggcgttaatagcgcttatttgtctaggaaaagacaaatagcccttcatttccactaacccggagattagtaaaaacgaaaaggccatttctcaaaattttatgttttccgagatgagcctgacgcaactactcgtctgactatcttcttatattataacgacggtttagttcatcgtcaaatatagatgatgtaagttgttgctattgaggaactaatagagtttttgtctaggaaaagacaaatagcccttcgttatctttgataattcgataactgaaaggccatttctacatgtatatgtaatttagagatgagcctgacgtatccactcgtctgactatcttcttttattataacggcgatttcattcatcgtcaaatatagatgatatatggagttttagtatatagtttgttatataggaggtactatgcgtcacgttacgattagtacaacaggtgtatttaatacgattcggtcgtccttgttcccgccgatagaggggaaggaaacgacgacgtttttgcttggcttggattttcatacttgttttctttgcccaagacaaatggcgctactttgaaggcaaacatggtaacatctgggacttgccaatcgccgtagacccagaggcgacacaacctacattaaccgagtggttaaccaactatacaccgaaattctctaccattgacgagtataagaaggcattggtatcttggatgagttatgtattccattaaataatattgtttgaatagtatatatgcatgaaaatagccagtatctttgaagagaggtactggctatatctatggattatataaattgactattgcattgaaatttgtgttgtgttaaaacagttttaaacatgttgtgtagaaaggcgatacatatgaaacagtatttaaaacaatttgctacatcaagatggtttgatttaatcggcgtggcactcgtagttggcattgcaatctctgcagggtatcttaattctcgacttgagaaatttgtagattggggaccatggactgcgttagttccatttggccttatttctgttatcaatgttggtatttctatgttgtctacacgatttactggccaattgaacaaatggggtaactatcttggcattgttaatactgtgttatcaggtgtaattgatttcattcttggtaataaagccgcgattattacatatcctgttacctttattatttatacatttgctataaaaaaatggaaagcatcgcatgatgggattcctaatacgatgagtccatcacaaaaacgatgggtaggatctatgattaccgtgatggcttttattttttctatcatagctaactttattgggtttagcggtcatattaatttcttatcgattcttacaacgattgtatttgccttatctctcatcgctaatctatttaacgctctaaaattaaatacgcaatggccattttggatggtctataatatcgttcagcttctaaaagcattcactcaaggaaattttgccaatgttggtaaatatgtattttatattcttaatgccattggtgcattgctagtttggaatgataaagaagcgaaataaacattttgcttgtattcagatttatagccagtatctcgacaatgaggtactggctattttatgtatagacaggctataatgtttataaaataaaagcttgatgaggtgcatagattggggattagcattgatggttattgaaattactaaaaagcatattattgtggctattacatgtttagcaattggtgttgctataggtgttggtacagttatgttggtcaatcacgaatcaaagaatatgggccaaacggagacaacgagcgcacaagtaaagccagttgaggcaccaagacaggaaacgtcaacaccgacaaatcaagctaatactaactcgatagatgtgtttacgtatcgtaatgcccgattcggcttttctgttcgttatcctagtacatgggtaaaggggcaggaaccgactaatggtgatgggtgtgttatatcacctcaagatggaactattgaagttaccgtatctggttcgaataatacacttaatgaaacaacacaagcagcttattatcggactcttaatgtagccaagcaacgaggtatacctggatttcataccgtcagtgatgattggtatgtcgtaacgtatactgatggtacatttatttattatgtgaaaggttttgttggtgctggttctgaaaataaattgcatattaagtatttacaatcaaagaaagatcaatatcaagatgtagtacaacaattagaaaatggatttaaccatggaaatttagatgcagggcactaactgatgatataactataatctatatgtttaagaggtgagtctattgaaatatatgcttgtaaaattcttattgagttctattcttatcattggttgtatgggacaaactgcgtttgccaaaactgatgatgcaggtgttttagccggattagaatctaattcggatatgtactcttatttgaatcattaccattattctttatggctagcagatcatcgttattctagtcatgatatgtacatctctgcggaccaatcagttattatttcattatgggattatagcacaccaccaagtatgatatatattacaaaatcaggatatgctaccaataaaggggccatggtaggtatgacgcgtagtgaagtggaatctctttatggaccgcttcttgaggatactgaatggggacgtccggcagagccatatggcgacatctaccatggttatgatacatatacagggtactatgtgggcgaatacgtaggttatcacaatgaaggcttatcttttgtgttcaataagtatacaaatcgagtcgtattgattcggtaccaacgtgatcgacatggaaatagtaatgtattgagtgatgtaaaagaatataacttactaccttatttactatagtgaatagtataatgtagatatgaaaagaaacctctacctagaatttttaggtagaggtttatctataaatcggtataatacgatgcttattgtttcgtatgtttgtttgctatataataagcctaagatagttagacgaggttgggcctctcttcgttattgaagggaggggtaagcctatgagtgattatgaaatcattatgcttctattacaggtgatgactgttgttatcgcttttggagcactgatagcgcttatttgccttacaaaaagcaaatagccctccgttaccgcttggtagctagataaacgaaaaggccatttcctaagtaaattaattttcgagatgagcctgacgttacgactcgtctagctatcttcttatattataataaggttatgatatatcgtcaaattaagatgaatgagcgagtgaggtatagtgtttctaactataatctctaagaggagtgttttatgttaaaacgtatttttataatgttagcagtagcgctagctttcaccatacctatccaagcgatatcgatacaggaactcaagtcatcaccgcagtttaaggtgatgtatgaggtaactcctgatggtcctaatgcagatgagcatactacatggtatttagatacgaaatccatagaggtattagagtatgcgccacctatgtataaaattaaagccacggtatataatgcgtaccaatcgccgcgaaaaaacgttatttttagtgattcttggattgtgtcctatgatactcgtctatcgctggcaagtcaggtatatcatgcgaaacaagtgggtgcttcgttgacgacggttattgatacggcacagacgaaaacaggtatgacaggcactaaggaaccattaggtgtattttcttttgacggtcagtccctgtcgattcaggtgaaaacctcgactcgtgctattgtgcgcacggcgcctaatacaacacgctatgatatagcagatacattattctatgaagcgtatcgtatgcattttgaggatgtggtggtgaaatgaggcctatgatgaaagtactatatatagcaatggcgttggcgctgtcttgtgtggtgcccgcgcatagcatgtcaatgcaagaactacaaaacacgagccgttttgaaatgcttcatggctttggtgaaagtggcaatggtgatggcacctttatagataaggagtccatcaaggtctctaacggaccgaatggaaccaagcaaatcaccctcacacagtatgtgcttatgcctgctggtgatatgattcaggaaaagcaggttctttacacctttgatacaaagcagtcctttgccaatttaattaagaaattggatgcccatcaattagcatcgtataaagatctatggttgtctaaacaaaagaattcaggaatttcatctactattattgattttaaagtgttccatgtagatggaaaccgatatgatgcacaaagcgaagcgagagatagacggatggcaacggcccctgtagactttggctttgcaggatacctcttggcaaaccgcttgtatgaacgtgtatatggcgtacaatttgacgatgtagctggaaagtaggaggcgtttagcatggcaagtacagttatcgatagcaaggtgtttggtgctttgtttagcactgatgaaatgagacatgtatttagtgatctaaatctcgtacaaaaatggttagataccgaggccgctctagcaaaggcacaaggcgagatcggtgtgattcctaagactcaggccgacgatatcgttaagtatgccgatgcgaaggctcttaatattgacgagattggcgagttttataaatcctctattacgattgttccattgttgaaagctttcaaagaaatcctgccagacaatgcgggcgaatatgttcactggggcgctaccagccaagatatcgttgataccggtcttattttgcaggaaaaagaagcatatcacattattttgcgagatatgaaggtatgccaacaacatgtgctcaatcttgtaaagaaatataaagatacaatcatgtgtggtcgtactcatgttatccatgcgttgccaatcacgttgggctataaagttgctgtgtgggctgatgaactgggccgagatattcaacgattggaagaaattgcaaaacgcgtatttgtcggccaaatgtctggcgccgtaggtacgttggcatcacaacccgaaaaggggttagaaacacaaaggcggatgatggaaattcttgggttagagcaaccaacaatttcttggcatgttgctcgtgatagccaagcagaatttgccagcacattagcgatttgtgccggtacattaggtcgtattgctcatgaaattttaagtctacaacgtacagaaatccttgagttagaagaaccgttcttcatggggaaagtgggctcctctacgatgcctcacaaacggaaccctcaagtattagaaaacatcatcgccgtttgtcgcagtgttcgtactattgctcctggcattgcagaagcgatgatttgtgaaaacgaacgcgactggggctgtctattaacagaatgggaatccattccaagagcgtgtgaactattggctgctgctttggaaaaatctaaagacgtactagaacatcttattgtctatccaaaacatatggaacaaaatctatataaactacgaggtcttatgatgagtgaatgtatcatgatgcatttggcacctcgtttgggccgtatgactgcgcattccatcgtttaccgtacatgcatgaaagcctatgaagaagaagcccaaatgaaagatgctttgatggctgagccagaagttacagaagctttcacagaagcagaaatcgactatatgctagatcctcataactaccttggactagccgttcaatttgcggaccgggtactacaaaaatataaataaatcactattctatgaatactaaaaagcccgtcttaagacgggcttttcttatatatttatccatatatttctattattacttctttattctaccgtatattagttcgttctataatagacttaggatagttggacgaggttgggcctctcttcgtcatcgaaggaagggataagcctatgagtggttatgaaataatcatgctcttattacaggtaataactgtcgttattgccttttgggcattaatagctcttatttgtctcacaaaagacaaatagccctttatttctactatacacaaaacttatacatactaaaatataaaattattaataataggcaaagtcttgtttgcatagtatacttatgctaacaaggttgtgcttattttgttgtaatgggagagaaaaagagaggggtttatgttacgtaaaagtataattatgatgttactagcaactgctttcaccataaatgtaagtgctgtacagatcgaagtaccagccggacagccgcctatgccaggggcagatgcgagcattcctgctaatgcgtatgagaattatcgggccgatagcttgagtaatgtaggggctagtgatgttataaagttacattctgaatctaagaagcgtatggaaatgtatataactgaccggggactaacacgagatgaagtcaatcagatagcaagcgattctgaaaagctgatggacttaattgttaatgagactgcagttgtgttgttgcatgatgatcgtaataacatccgagcatctgtccctggactactattagcaagtaaatattacccaaaacgcagtgatggtgaacgtttatctattgtaagagagaattccatattttttgcgatcggtacgaaaccaaattatgatgatgcattaggtaaactaaaatcagagcgaaaaggggagttcatatatcctggcatttcacatggtaaatgggctattgatacagaatcttttggtgagaatacgcctgctatggttgctgtagttggtttagataatcaaccaaatcaagaatatatgataggccttagctacaaaaatcagcctgttaccaataagctcgagcgcgttatgagtaattatgtaattccatcgattcgttctttagatgacttggatcattatagtgaaagtatcagctgggataatctcatgtatcgcattcctaaagggcttaaactaacagcacagaaatcattaaaggattctgccgaaataagagactatagtggcttagggatgcgacttgttgtggccaagaaacctgtaaaagtagatgataaatatatttactcttttattaatgaaatttcggaggtaaagccggaaagccaaattataggtgatgcacctattcaagcagcatctgtttggaataatggtgtgcctagtcttttggtagataactatcaaccaggtaaaaaatctttaatgtatcgattcttacgcgatgacaagaatatatacattatgagtttagtttataccgacggggctgtgccatattctcatattcagctgcgtaatacagtagaatattctgactttgcaaatattgaaacattgaggaataaagtaatccgcatgcaaagtcgagaaaagatgtaatacagttgtgtgtatatagtttgtaaattttaagagggttttagtgtaaaattgaaagtaagttatatactattgtgtccgcatgagaggagaccattatgtctaaaaagaagattattattgctgcattagtagccattgtggccattgctctaggttggtatttcttgtatttcacaaaaacacctgtctattctttgaatcttgctcgtgaagccgtagaaaagcacgatgtgaatgctttcaaaaaacatgtcgatgtagattctattatcggttctggctatgatgatgttgtggctatgcaattggaagatcctgaaattaaggataacccacttaaaggccttgctgaggtgatgttccaaggtttgaaacctaagattgtgcctattttgagtaatgaaatttacagtgccattgcaaagcaacctgaaagttcagaccaaaatgctcgcgaaaaacaagccgctgatgacatgaaagaaaaaacaggtattaaagatcttgagttcaaaagcattggttctgccactgttgatggtaatagcgccgttgtgcctgttacatttaactctaaagaacttaaccaagacgtaacgtttaaccttgctatgaaaaaacttgatgatggcacatggcaagccgttaaaatcaacaactttaaagaattccttgcccttgtagaacaacatgaaaaacaaggtaaggcaaaataagaatacgcgttatattaggtaatttgaaatagctacataaaactaaatagaatacaaacagccagtactgcgattgcggtactggctgtttgtgtatcttaagatagcagattagttgtatttagttttctagttagcgattctctggaaacacaacatgttgctgtagtttaaactccggattattcgtagaatcaaagaattcaatcatattccgtaatttttgaacttcatcagcacttaaaaagttcggataaaagatggtatagataaaaccataggtgccatcataggattcaaagtttaggatttgaatatcactatatggttcataactgtgtatggatagtccaggtatattattattccatacaacagcgtaattaatatactctggtgttgggtggtaccggtatatattccagaatgaatgtaaattcctactgaaattgtaatgcccatcaatgataagattacgagtatacggattattagtaagattgatagtagaaataaaaaaggttatggatccttttttgtaatatctaatatcttgataatcttctttactttcaccttcgaatagggcatctttaggtacacgatactgtatgccgtttaggttttctatgcgtgaatactgattcaactcattgagatttttcaccgatggaagcacgtaattggcgagtagattgtcagtaggcaccttattcaacactggtttattatcgaaatagacgacacctgcgtgatataaagggtaccgtatggcaaagcccatatatttaaagttgatggtatcgacggtcatcgtcgttttttgaccgtttttgaggtaaggcattttcatgctgtcccaagtactataggtaacggtagggtatgaaaatacagttgcctttatatcagaaatatgcttcgatggattgtggttggccttattttgcaagaattggcggacatccttatctgttaacttttcataattgatcttggtatcgcgccagctatggttaggataataaccgtagtcgacctctagattgaggctgccgttatcagttataacgcgataatcctctatggtgcgatctggatttttataccggccaatattatattcgctctttatgcctgctacggggaatgaaagccggatttggctgtatcgattgtgaacggaaataaccgtattgtggtaatgctcgccacgatatatggaggcctctttagcataggctagttcgtttctactaataccgttggctttatcggtgctctttaacgtttctacataattcgttacatcccgctcaatggcttggtttgtggcttgataatttatatacgaatcctttggaattttcgcatccgcaccaggaatgttgacgtcgatggcctctgctggtgacagtacagtgctcatgatgacagcacccactatgagtggtaattttagcataatagcttctcctgcttacatgctcctttttataggagctataacaatacatagattctctttattaagtataattatataactttctcatagtttaagcagtaatgagttcttatgtcataatgcgcaaaattttacgcatacttccgtttatactaaaggtgtaaatagcgttagctttcatcaagattagtaagataaaagggggatgtcctatgaatcaaggtttagtgcgccaaattaatgatatcgttagaccctatcgcaaagcgcggatgggtatgctcatcgtgattagtgatcctgttggtcaacgtggtccgacgccgccgttgacatggcactatatgatcggtcgaaattggtataagcatacgattcatggcacgacgtctgtgaatggcgtacatggacagcagcctgtggagatgaccttgtttgcatggcctgaggataggattgtagattggcacagtgtgggtggttggcacacgcagcaatatgggtattcttgcgtgctctgtgtatcgcctacggggcacaccaagatgcttcggtatgatcatggtaagatgcggtatggcgatgatttaggactttgggaccctcagcagattgagacctatggcagcactgttttaggtgaaagctatgcttgtacgggcattgacgctgattatcggcgtatgcaattccctgagtttaatcgtcaagatggcactcattttggtgctttatctgattatattggcagtgaatatattttactattcccaaaaacgcgtattgagttagtacgtagaggaatatggcgccattcaattgaagacctcgccaatatatgcaatgtaccagttgatatagtggaacaaacctatctcgatacgcctgatgatccaacggaatatagggaaaccttttatgctctgtatgtgcgaaaatcaagattacaagaagtatttggcgtttttaaacggatccttatgactagagcaattccttggatgctttgcatcacaccaagagggtatatgtatcatatttctccatgtactaatagtgatacggggctaacaacaagcacctcacctaacattgcatatgacccacatgccgatgaatttttggcccttctcgctaaagatagatgggaactatgtggtaactatggactattttcactcgatacatataaatcatttatggaaacacaagattgttacatcaaaacgattgtgccagacccagaatttacctattgtcctccatcagttttgaccgtcatagcagggcacaatatgattcagaacttgctgaaaacaccgtgcgtatgggcataaaaagagcatatatatcgtcaaatacgaataaaccataaaacaataggcacagtgcttcttagcatagtatacttatactaagaagtattgtgcttattttatgttgagagaagaggataaagtatgatgcggcgtagtttatttatgatggcgatggcagtagctttcactacgaatgttaatgccgtagagatagcggtaccagtaggacaacctcctgtacctggtgcagacaggaaaatttctgcaaatgcctatgaaaattattcacatatcaatgagccggctgttaaggaggtagacgcatatgtggcgtatgttaagtctcatccgagagcctcagattcattgatagcaaaaattaatcaagagaaacctggatatgataaagctgttagattagcagagttttcacaatctactgttgttttggtgcatgacaaagccaatgcgattcgtttctctgtgcctgatgttagtattcgaggtgatgtaattacgtcgaatacagaaaaaggaccattatatgctgttcggagtcttactggatttttgcttgtaggtcctcctcatagtaagcaaataaagggttatgagcatggaaagtatatatatgacaatttaaaacagacctcttggaaattcgtgtcggatgctaaagaacatgtgatgtatactgaattcactccgtctaattccaaccatacgtatggcattacatatggtcgttctgtgacgaagaatgatccgtttcaaaatcgacctgctgaagtagttatgagtaattatattattccgtctattgaatcgctagtgggattggattcttattctaaggctgaaagctggggtaattttacgtatcgtattcccaaaaccgctaaattgattagtcaaactatagaagaaggtcggtatgaggtgcgaacctatgaagataagggaatcacgattcgtgttatacgtcatgtatttaagaaagataatatagatcgttctagcgccagacctcaaatactgtggtttttggataaatatggcgaccttgatatgcctacacaatatgctactgtatggaataatggcttgccaggattcttgattgatcgtcaaataaccaaaggtaactcgtacttgagacactatacaaaagattcagtatatgcttatagttatcgaattctttatgatgaaagtatgtccttatataatcataaacagttgagagatatgattgaatatgtagactttgataatacaagaacacttcaaaaggaaccgcaatggagagtagacgagacctataagaagcagttagaagcaaattcggtttatattccttggtatatgaagaaaatagcactttataatcaattaagattatattaatttatagttttgagagactaggagagaatgatgagaacaaaatttatagtatttagtttgggtattgctgtattactgactggcaatatgagttctgttgctgatgccagttggttgagtaaagccatggatcgtttagaaacaagtaatgctaaactttcaccaagttggccaaaggcagagcaatatcgtcattatagacctggtcaggtcataggggcctatttgcctgctgaagatatgaaaattgcaggtgtgtcccttggtacatcttttgatgcagtaaaggctagtcttggtcagccgactagtgaaaaacgtgatgagcttacctatggaggcattaaattcggacattccttgatgcaagatagcagacctatcgtatggtatataaccgtaagcaatcgcgatgctgtaactgctcgaggcattgccgttggcgataccttgaaaaaggttatggatgtctatggacgccctgattttattgactttaataatcggtggttctatggatatcttagatataatagcgataacattcgcggtatattctttgaacataatggtagcagggtgacgaagattatcataagcgataattgagtgattttttataagaggtggtgactattagtgtcataggcaggtgttgaaattatccgtgtagaaaatctttatagaataaatcatcgtagtttagttttatatttttacctgtaaaatatgcagtgatattgaattatacctgtataacaggtataatgaaggagaaatattctatgattattagttttaaggataaggacactatatcattagcggagttacacttatgaaaaattatattcctactccaacaattagtgagatgttaaaagaagaatttatggaaccacttggcttgacggcgtatcgactcgccaaagatattaaagtacctgtgtctagaattcaagaaattttacatgataaacggagaattactgctgatactgatttacggctttgtaaatattttggtatgtctaatggctttttcttgagagttcaaatggatcttgatttgcgtgaagctcaaacaaatagtcgtttacttgaaacgttacagtcaatagaacggtgtagcgctattccaacagatgatatataaaacaataaattgaaattaatcgatatatctgctacactatacatatgaataatgattcctaatgttatatgtagataaaggagttcctatgttatttgtagaatatccaaaatgcacaacttgcaaaaaagcaaagaagttcttagacgatcatcacattgaatatacggaccgtgatattaaatctgaaaatcctacagctgaggaaattgctgcatggtatcctcaatctggtaaggatttgaaagcgttctttaacacgtctggcttgatttatcgtgagcaacaattaaaggataagttgccaggtcttagcgaagaggaaaaattggctttgttggcatccaacggtatgctcgtaaagcgtccaattttggtattagaagataaggtcttggtaggctttaaagaaaaagaatggatggaagcactaaatttgtaattagctgaatgacatcgtaccctatattctgattactattataaacggctgtaacagtatgcacagtgaacgcatgttgttacagtcgtttttttgacagcatatacagtttttcggtatactaatagatatttcattagtttttcattaatgaatcgtgaatgtaagatatgagagagtgtatatgcgatttttagtgtatgtgttgtgtggggtattactggctcctactgtgtgggccagtgatacggcgctatctacgaaaaatggacaagtgaatactgaggaatttcatatttcgccggcctatttgccggaccatcagattggtgaaagcggaccattggtaatggatacaacagagcgtaaaacgacgcgatattctaatgttgatgcggtgaattccgctatcaatgcagtggctgtgtccaatatcaacaatgatatgcataccaatggtaaagcatggatgaaacgaaccaccgtggcgcttagctttcagaaggattggaagcccctctacagcgcagaaacggtgcagcctataggccattgtgacgaccaatcccgccaagtttggtttactcaaggttccgtggcacgcgctgcggacgttggtacgacccttaacagcggttttggttatcgccgcatcagcagtgatgaccatcatttgcatggcgcgaacctgttttatgaccaccgtttcaagggccaacatagacgcatgagtgccggtcttgagtatctttctggtgaaagcgagttccgtttcaactattatcgcggtatgagtgatgaccatatggtcaatggtgcattggaacggattaccgatggttataccgtgtcctatggaaaaacctttaaaaatgcgcgctgggctcgcatctatggagaagcctatcattggactctggaccgtagcgctgataagaatggattgcgacttggcactgaactgcaactgacaccgcgcgtgtccattgatatgggattcaataaaccagaacactcttccggtagtgcctatggcaaaatcatgttccgccttgctggtaccgatatggcgtggtacggtggaaaacacaaactcgatacagaatctacagtgcgatctaaaatgcttgaaacagtgagaagagataatacgatcgttgtggaataatagaatggggctgtaattaacagcctcatttttagactcatcggaaaatatccgtgaatgttattaaaaaagatataagtgcatagaagtacacaatttaaaacgttaaaaatatgctataattaatatactatttataatttagagagagtgtttattatgcatattacaaagcctctactatggctgttagaaccgtatatcgtatacaaagcctatttgtgggggcttcgtttttattcgcatcctgtgacttgggaaggggaacccgattggttttctttgacactaaccacattgcttgccattgatgccattgtattgccgttattactgctatacctgcctgcgtgcaatccagataagaacgttccacgatggattataaaaatcgtcaatcctctagatcgttttgtagcttgggttgaaagtaaacaacttggcgtcgtatggatgaaaattatcggtgccttatgggcattttttatataccttgtccctgtctatattggtggacaattagctatggccgttgttgtagctcttatttatgatgtactcacctgggcaaccatgcaggtataatcgactcatatatggaatatggtattccttgcaaaactataaaaatagaaaagtcgcgactagttaattagtttctaatcaactagtcgcgattttttatttattaaacactattaggtccttcttagaaatagaacaggcctgttttaatttgcggaaccatatatatggctcattagaaatagaacaggcctgttctattttgcagaaccacatatagtgctcgttagaattactacaggcctgttctaatttgcagaaccatatataggactcattggaattactacaggcctgttctaatttgcagaaccatatatagggctcattggaattagtacaggcctgttctattttgtaggacacatatatatgtctattggctcttatctctaagtgtgagaattaagaatacgatggatcggatatatgaataaccgctcatgtatttgtgtaataaacacatgcaaaattagaatacagttaataaaatcagtaattatctagctttatccaaacacatgatgcgcactattaaaattaacctaagctttgcccttattctgaatggtattgccattatcttagccatgattggtacgctttcaccagtatggggcgccctcgtacacaatgggggaagcttgctcgtagtacttaactcggcattattattgtcttggaaatataaaactaattctgacgaagacagaaatccatatgtaggcaaacttgtaagtaatcaataatctatatgtagtaaaacttgtaagcaatcaataattcatagtagaatactctcaaaaggaggtttatcatgaatacattagaatgcataaaaacacgtcatagtacacgtaaattcaaacctgaaccgattgcacaagaattgctcgacaccgttatcgatgcaggtcgtcacgcgccaacaggtggcaatttacaacctacacattttatggtcattaccaatccggatgtgttgaaagaactagtaacccttgtccaagaagagtatggcaagacggaagtaacggaacaaacgccaccatacatggtgaacatcattaaaatgtccaaagagggcaaatttgtattccactacaatgcaccggtgctcatcgtattggctcataaacctgtgctagccaataatttctctgatacagcttgtgctatggaaaacatgatgcttgcctgcaacgaactagacttgggatcctgctgggtgaaccaattacgtcacctacaagacaacgaacgcataatcaaacgccttcgcgaacttggcatgggcgatgatgaaaaagtatatgccagcctttccgttggctatccagacttgccaaatggactaaaccgcagagaacttgacatcaaaggaaatccggtaacctatattgactaaaaattatatatgaacgggtcgcgtaagcggccctttttgtttttagaataaaaataaaaatacacttgcaaatatacctatatgggtatatagtatatataatagtaaatacctatggaggtatagatataaattagtaatactattactaatgatacagtttatttggaggcaactatggcaacgcgaagcacaataaaagattggtttgtcaatcatacgaaaccaatacgaatggtaatgaacacattagattctgcagacgtagtatctatgcctgttatgcccatccattggaatagcgtatcgcaagaagctttaacctggactatgctcgttgatatggctgctgtagatgataaaataactcataccaatacataccataattaaggataaatatatttttaatatcaaagggtgcatgggattgtatatcgaaaataagtttttgatgtgcaatcctatgcacccttttccttataatctttataaattcctaatagattctaatataaaatgctatattgcgattagctaaatatagattagcgtgtcattttgccccccttatctatgaaaccgtaagttgctgaagaatttacaaagatgtattgaccgcttaatggaaaattgtgtacaattattttagaaatattaatgtgtgtgtaatggagggctagttaatggcaaaaataggtacattggcaggttataatcgcgtttcagaggttccagaagatgattatttaatgttggaaaatcaattgggatttcctttgtatgtagtagctaaggaactcgtaaatgcttatcgtccgcatttggaacctttgaatttgacatatacgcaatacattgtcatgatggcattgtgggaatatggtgaattatccgtcaaggaattagggcaagtgttgcgcctcgattctggtacattgacgccgttgcttaagaaattagaactaaaagggttcttaaagcgtaaacgtagtcgtaatgatgaacgagtggtaatggttactctttcagaagaaggccatgcacttcgcaaggacgctatcgaagtacctaagaaactagtagctagcacgcaagaagtttttactgttcatgaagctgctgaattgagaaagttgcttaataaattattagataccattgatgcagcgcatggtgttatcaatcctgaagatattaaacgataaatatgatataatttaattagatattgtattattgggtcattgggagtagacctagtgttacccgtttagggtggaggcgaacattatgaataagaaattagttactacatttgctcttgcagcaacattattggttggttccgtagctagcgctgctaactggaacggtttggaaaattacccagaagtgccaaacagtgctaacggtacagaaacttactactttgacaaagcatctcaatttaatttgatcgatggtagccgcaactatgtattcggtattaatgtagtaaatatgcataacaaccaatacggcgaagctacattgttcaaatatattgtgcatcctagcttgcacactgtatatcgctttgctccagatggtcaattgtaccaaatcaatcctggcacaaatgaatttaacatgttcaaagctgcttggaaagaagtatatggcacagagtttgcattccctgatgtaaatgctgttcctgcaactgtaaacgttcatgcataataattaaatacttataatgatacgtataatggtgaaagttctttataaggggctttcaccattgttgtatatatatgaatgtatagatattatataattatgatgttgatagattgtatgttaggtgaaagtctattaattgtatgttaggtgaaagcttaataattattttaggaggtaaggatggcaaaatctgaatttgcgcaggcctatacggaacgcatgttccccgatattgcatcgccagcaggatatatagaccctgagtttgaagatctatttgaaaactttgcctttcacgaggttattatagaggatggctgtaatgtagcagcgcatagtcgtttcttggccattttagctaccttggttggggcaggtgccacagatgaatactcgttgatgatgccagctgcattaaattttggtgtcattcccgatgaaatcgtggaacttatttatcaagcggtaccgtatcttggcatcgggaaggtgcgtccgttctttaagattactaataagatactcgattaccgagatgaagaaattcaaaatcctcatcgcagcacgattaccagtgaaaatcgccttgaaaagggcatcgaaaagcaagtggaaatctggggtgaaggaatgcgtaacttttaccaatcgggacctgaagatacgcgtcatatcaataaatggttagcgaacatgttcggtgattactatactcgtaaggggcttagcactaaacaacgcgagctcattaccttttgttttctcatggcgcaaggcggttgtgaagcgcagcttaaggcgcatgtcattggtaatttgaacgtaggaaatgataagagatttctgattagcattgcctcccaatgtgtgccgtatattggctttcctcgtgtgttgaatgcattgtcttgcattaatgcgggctttgccgaatgggaagcaaatcaataagtgaaacacaaatcaataaatgagaagccaattaatgaattggaaataaatcaatacatgatgtagtagccaagtgctattagataacaaggagtagtatgattctttctggattaagtttaattatgattatcgcgtccattccggcgctaatcattgctgctgcagggcacgagtatgctcatgctaaggcagcagatttactgggtgaccctacaccgcgtatgatggggcgccttacgatgaacccttttgtacaccttgatctcattggatctttggccttgattataggtggatttggctgggccaaaccagttgttgtaaatcccaccaattttaaggacccgcggaccgatgatatgattgtatccatcgcagggcctatggcgaatcttgtgatggcctttatcggctacgttgttatgcgatgcttggaagcagcgaacctattgggcaatgactccttgtacctcgtattgtttctcatcgtcgtgtacaacattaactttgccatcttaaatttgatgcctgtaccaccactcgatggcagccatattttgatgaacttcttgcctattaaatggcaaattcatgtagcacgatttagcatggtttccttgctcatcttgatcgttatattaaattcaccgattgcttcgcacatctttgtgcccttgcaaaaatcgattctcggtggttttgaaagtatcgttaacttggtgctataacccaacaaaacagccctttaaacttaaaaaagctattagttgattgtatataatcaactaatagcttttgtgttttaggtgaaagggtcctatatgtggtcctgcaaaatagaacaggcctgtactaattctaaagagccctgtatgaggtcctaaaaaatagaacaggcctgttctaattctaaagagacctatatatggttctgtaaaatagaacaggcctgcactaattctaaaaagccctatatgaggttctgtaaaatagaacaggtctgttctattttaaaacaagggataatgttaaatgcgtccttgttcttttagttctgctagtaattttacgatgcgcggaccacagcctttgccaccacaggcaccagtgcctgctctagtcgcttctttgacagctgaaaatgtatgagccccattaaaaatggcctctttaatcgttttgcgtgtaatgctacggcatgtacacacctttgttaatttgtccagaattgcctctggtacttggttattttcaaattccatatattcctctttgactcacaggagtcattatatactaaattacatcgaaactttacgatatagtttagtatagcatagaaaaggttgttttgttaagtacatataacatggtcgaagatgatatactataagcattataaattatacttggaggttaatatgttacgacgtattgtagcagcgactatgattggtgctttggcactcacatcaggttgcgcatttcataatccctttgtcaagaaggcagagcctgtaacctatgaagcggtggtgcagagtgagctttcaccagaagaaaaggtagataagcttgtggctaatatgtccgatgcagacaaggtaggccagctgttgatgattggtattcatggcacaaccttgaatgatgatgcgaaatttatgctcaatgaatatcgagtgggtggcattatcctgttcgaccgcaacatggagagtaaggagcaggtgaaaacgctcattaccgatattaataaggccggtaaaagtgcgggacttacgccattgttcatcggtatcgaccaagagggcggcgccgtggcgcgtatggaggacaagttgactaaggtgccccctgcagaagagctgggtcaaggttctgttgaccatgcagcaaatctagccaaacaagtagggactgaacttaaggaccttggatttaatattaattttgcgcctgatgcggacttgggattaacctatggtcgctcatatagtacgaatcccgaccaagtcgtgaagtttgcaggtgcggtaggcaaagcttatgacgaatctggcttatggtattcgtacaagcatttccctggcattggtaaaaccgatgtagatttacatgcagacactagcgtggtgcctgtgtctaaagatgcgttactcgctgaggatacaaaggtatttgtagaccttattaaacagtcgaaaccgaatacgtatatgattatggtatcccatgcgatgtatccacaaatcgaccctgatcatccgtctagcttatccaagaaaatcatcactgattggcttcgtaaagatatgggctataacggtgtcgtcgttaccgatgatatggacatgggagcccttgccaaacactataccttcggcgatatggctgttcaatccatccaagctggcagtgacattttactcgtatgccatgagtatgaacatatgcaagaggcctataatgggcttatgaaagccgtcaaagacggaaccatctccaaggaacgccttgatgcatcggtgaaacggatattgcttatgaagatgagccatggtttataaatactaggttaatccatagtatatagtgtattcataacaacgtatttataccctcatacaggactttttgataccgatagagaattactaagtatagttattctctatcggtttattttttattcgttaggagtgaagtatatgtctcggagaattatgttgaacggcacgtcgtattttgggaaaggtgcggttcaggagattgtaaacgaaattaagaatcgccattttaaaaaggttctcgttacatctacgcctgatttatttgagtttaaggttgctacgaaggttacggatttgcttgatgcggcaggcattgcttacgatgtatatgacaatattaagccgaatccaaccattgaaaatgtaacatctggtgtggctgcttgtaaggcggctggtgctgatgtgatcgttgctgtaggcggtggcagtgctatcgacacgagtaaggctattgctacgattatgacaaatcctgaatttagcgatgtgcgtagtcttgaaggcttggcgcctacaaaacatccttgcttgccgattatcgctgtgtctactacatccggtacggcagcagaggttaccatcaactatgttatcactgacgtggaaaagaaccgcaaatttgtttgcgtagacccgcatgacattccaattatcgctataatcgatcctgatatgtctgcgtccatgccaaccggcctttgcgcatctactggtatggatgccctcgttcatgccgtagaagggtatattacgaaaggtgcttgggaattaacggatatgcttcatttgaaagctatcgaaatcatcggccgttccttgcgcagcgcagtggctggcgaatatgcaggtcgcgaagcgatgtccgtaggccaatatattgcgggcatgggcttctctaacgtaggacttggcattgttcactctatggcccatccattgagtgctgtgtacgatatccctcatggtaaggcttgtgccatgctattaacagccgtattgaaattcaacgcccctgaaacaggtgctaaataccgtgaaattgcgcgcgttatgggcgtgcctaatgtggatgctatggatgaaagcgcctaccgtcaggctgccatcgacgttatccaaaaactagccgacgacgtaggtattcctaaatccctcagcgaagctggcgtgaaacgggaagacattccattccttgcagagtctgctttcaacgacgcatgcacacctggtaatccacgagatgtgaccgttgatgaaatcattggtatttatgaatctatattctaaatcaatttaattaataacaatcttgtacagcatctgtatggtaaatcattgctcatatagatgctgttctttatcttatgaaattcttctacaagaagggaattcttgaaaaagtaggaaacggcaagtatactagttataaatatactgatattcgatatgctttccacgaggaggagaatgcatgaaactttggaaaatgaataaacgcagctctaccttagcggatatgtcgatgaaccgtatactactatctgaactcattgctaagggggccttagtaggaattatcgcaggattctttggggcagcctatcgatatttaatccttgagtctgaacatatccgatggcatttaatgggcgatatttcattggaatgggccattggttggcttatcgctatggtcgtatttgcctttattgtcgatcgattgttaacgtgggcgccattatctggcggttccggtatccctcaaattgaaggggaaatgctcggtttattcgacatgaagccgtaccgcacgctcatttctaagatgattggcggcgtactcacgggctttgcaggattttctgtgggccgtgaagggccagccgtacaaatagggggctctgccggtaaaattgtgtcctattggatgaattcaggcctacgtgaacaacgcatccttacatcggctggtgccggtgcaggcttaactgctgcctttagtgcgcctgtgtcgggggctatgttcgtctttgaagaggtgcacaaaagcttttatccgtaccttgtcattcctaccttcgtggctacgctcatatcgaactacattacggtaactatctttggccttacgccggccctcggattttccgtaacttcagggatgccgcttgattattttccggttttgctcggtgtaggtattttaatggggctctgcggtgtattgttttgccgcatgatatttgcctttaagcgtttcttcgagtggctcaagtgttctcgctttctaaagcttgtgcttacctttgtaaccgtcgccgttatcggctttgattcccagcttttattgggcggtggcaatgatttagtagggcagctagcctttcaatctcatggtgtattgcttctcggtggtattgtgctgggtaaaatcttgctcactaccttttgttatggcagtggcgctcaaggcggcatctttctaccgatgctcgtcattggtgcgtcggccggtgccttttgtgaaagcctgctttcatctatgggattaatagctccagattttgtacctcaatttgttctttgtgccatgggcggcatgctagcggccgctatgcgtaccccaattttggcgattttactcgttcttgaaatgacggatagcttttccaatatctatgctattggtatcgttactatcgtggcctacttggtggcagaactcttaaaagaaccacctatttacgattccttattacaagctatgacaggtcaaagcaacctagaaaatgttcaaacctttttccaaaccaaggtgcctgtagtggcatcctatgttgatacacaattgcaagacctcaacttgccagaggggactttaatcgttagcattcgccggaatggaacatacatcgtgcctctaaacgatgtaaaactacaaccgggcgatgaactacaagtatcgtgcgaacgaggacgattaaaagcagcgaaatcgtatttccaatctaattagtttaaaagatgtattgggctgaggccctactaaaaaactccaccggccgggtctgacttcggcctacggccttcgcagggccaaagtcgttttttagtaggacctcagtcctttgccatttataactattaagattagaaatatgattttgctgcattattacagacagcaaaggaagggatccgaagtcgtttttttagtaggacctcagtcttttgtcatttagaactattaagattagaaatatgattttgctgcattattatagacagtagaggaagggacccgaagtcgttttttcgaggtagcaccccttactcttatctccctttagtttttttgttatacttactatataacaggaggtgccgatatgaagacgtattcttttccgtatgattataaaagtgtagatgtgtctattgatgagaggtttgtgcaaggggttcttgtgtctaatgcggcggcgtataaggctgagaagagtcccgctgagcttgtagaggaggctcttgatcatccgattaacagtccgtctcttgaagcattggttaagggaaaacgcaatatggttatcattacgagtgaccatacgcgtcctatgcctagtaaggtgacgttgccaattttgctccgtcgtattcgcgcggtgaatccgacaattgatattacgattctgattgctactggctttcaccgggccatgacgcacgatgagatggtgcatcggttcggcgaggatatcgtgaataacgaaaaactgattaatcatgactctgaggatgctgagaatatggtggaaatcggcacgttgccatctggcggcaagtgtgtcatcaatcgtttggcggtagaaacggaattgctcatctccgaagggctaattaatcctcatttctttgcgggcttctcgggcggccgtaaatccgtgttgcctggcgttgcctccaaggtgacggtgttggctaatcattgtgctgaatttattgaaagcgagcattcccgaactggtaaaatcgatgaaaatccaatccataaggatatgttgtacaccgcacgaagagcgaatttgcagttcatcctgaatgttatcatcgatagcaaaaaggaaatcatcaaggctgtagcgggtgattgtgtagatgcccataaggaaggatatgagtttattcgttccttgtcctctgtgaaagctattcctgcagatatcgttattacaagtaatggtggctatccatctgaccaaaatttatatcaatccgtaaaggggatgacggctggcgaagcatcttgtaaggatggcggtgttatcatcatcgctgcttcctgtaaagaaggacatggaggacaagctttatatgaggctttcaaaaacatggaaagtcctcaacaaatcttgaatgatattcacggcgtacctcgcaatgaaactaaaccataccaatggaaaattcaaattttagcgcgtattttgaatcactataaggttatcgttgtgactcaagattgcgaccatcaagtcattcgcgatatgcacatgacgcctgcgtccacattagatgaagcattgtgcatcgcccgtggcattatgggcgaggatgcatcgattaccatcattcctaatggctctaccgtgattgttgaataaatttatcatgtttgaataactaggtgttgtttgtgtggtagcgtaggggtgtcagtatggttgataatatagttttattctatctgttttttatcgtagtcggattttttaccgctatgttaggtactattattggtgccggcggtggtatcgtatttgtacctttgtttatgtactggttcccagagtggtctccatccatgattgttggcacatcgctgttttctgttatgtgtaatgccatctctgggtcattagcatatttacggcagaaaaaggtgtatgttagcgctgcacttatatttagtatttctacattcccaggtgctattttaggtgctcgtatgtctggatggttcactggtaatggatttatgtttgcctttggctgttttatgctatgtgcttcattcttgattggttttaagaactttggtaaaaaaggagagcgtaaagaagaatctttgactaaagatcaggtgacatacaataaaccagtcggtattgccattagtgttatcgttggtttcatctctagtattttcggtatcggcggtgggctagtacacgtgcctgctctgatttatatcatgggatttcccacacatttagcaacggctactagtcatgctattttggcggtgtcgactgccgttggtgttattacacatcttatagagaatcatattgtatttagcattgctattccggctagcattggtgccatatttggggcccaagcaggcgctcaaatagcaaaacgcctcagagctaaggctatcttggcacttatgagcatcggcgtatttgcattggcgattaaattgattattagctctgggatattgttttaagtaggatagatatttatatacattgctttttaaaattagtacaggcctgttctaatttatatggaggcctatatgtgaggcttttagaattagaacacgcctgttctaatttataagagcacttaaatatgatgcttttacaaatagaacacgcctgttctaatttacaagagtacctatatagtctaaacataagaaaaatatataaaagggctgtaacaaaaatagttttaccacatttttgttacagcctttttgctgtttttcatagccatatatgttgtttaaaataaatctgcatgtgttccagttcggaatagaaataattcaagtacatctgtatcttttcgataaattaatagccaatctggttctatatggcattctcgaaaatctttatagtttcctgtaagtgcgtgatcacgatgcttttgttctaagggaatctcagcagcgagtttatctacaatagtttgtaatttgtcgagttttaaacctcgttttttagcagattttaaatcttttttgaaagtatttgatgcaacaatcttaagtttcattttcaacatccttaagtaattctgcaaaactactataccgtttgtatttttccggatgagctttcatagatttatattctgctaaggcttgtattgtttctgtatttggttttgcacgttttacttcgaatgggataccatcatgatttaatgcagattttaagaacatagtgatagcagatgacatgctgaggcctaagtcattaaacaatgcttcggcatctttttttaacaattcgtcaactcgtatattgatattagttgtagccataattatcacctctttttacaaatattatatcaatttgtaaaacaaaatcaagcaaaagtctttatatgttttacaaatattgaggcgtgataataatagattactattaaaaatcgagcaaacagtggatctattcctaaaacgcataactaatttatattgataattcctaatgtgtaatatacaggatactaggaaaatccacataaatattcacatattggtgtagatctgtattcatgctacatacctcttaatccttatgaatacacatattgataggggatacccttatgggctttcataagtggttatcatatatttttattgatgtgtgttcctaggaaatgcacttgtttttctggtaaatgaaatcaactttcaactaaggtgcattttatattatgtatctatagaatttatatttcatatacaatttatgcataatggtagcgaccgaaatgagaacggcgtatactagttataaaagaaattttcctaaggataggattggaggcttttcaagtgagtatattagttaaagattatgatcgttttgccaaagaggcgcaagcgatttgtaaggatcgtgtttatacagaccgtctgcgccgttatgcgtatggtgtagatgcatcttgttacagttatttaccaaaagtagtggtaaaagcagaaaacgaatccgaagtacgtcgtcttattcgtttgtgtcaacaatgtggcacaccatttacattccgtgcggctggctcttctttgtctggtcaatgttccagtgaagacgtgcttatcgtttgtaatgatggattcaaaaaaatggaagttatcgacgatggtaaagcattgcgttgtgaatgtggtgttatcggttccgatgcgaatgatttgttgaaaccatataatcgtaaaatcggtccagaccctgcaacgcttgcaacagcattggtaggcggtattttgaacaataactcctccggtatgtgttgtggtactgcacaaaactcttataaaacaattcgctctattcgcgttgttttattagatggttccattttggatacatccgataaaaagagcatcgatcaattcctcaaagaaaaaccacaaatggttgaagatattttgcaattgcgcaaagaaatcttggctgatgaagagttgactcatttgattcatcacaaatataaaatcaaaaatactacaggttacggtttgaactcccttgtagattttgaagatatcatcgatattatcaatcacttgttcatcggttccgaaggtacattgggctttgtatctgaaatcgtgtacaacactgttgaagatgtacctcacaaaggctgcggtctcatgttcttcagcacattgaacgacgcatctcttgccgttgtagccttggctaatatgggccgtgaaaaggttgtggctgctgaaatgatggactatcaatccttaaaagcagttcaaactctagataatgtacctgatttcgttcgtgaagttccagaaggtacaagtgctatcttgttccaaactgaaagctattccaaagaaactgttgataaaaacttggcttttattaaagaacaattgaaagatattccaacagctattccaagtctttattctcaagatcctaaagaatacgattcctggtgggccatccgtaaaggtatcttgccaatcgttggtggtcaacgtagaaaaggtactactgttatcacagaagacgtttgcttccaaatcgaagacttcactaagggcatcgaaatgcttactgaattattccacaaatacgatttcgttgatggtggcgtaatcttcggtcatgcgttgtccggtaacgttcactttaacattactcctgatttcagtgaccctaaagatactaagaacttcggtgatttggtaaaagaaatgtcagaacgcgtatctggttttggtggttctttgaaagccgaacatggtacaggccgtatggtggcacctttcatcgaaatggaatggggccgcaaagcgtacgaaatcaaccgtcgtatcaaagctatctttgaccctactcgcatcttgaaccctgatgttatgattactgacgatccagatgtatacaagaaaaatcttaaagcacaatgtgttatcgatgatgctttcactatctgtatggaatgcggtttctgtgaaaagaactgccctagccgtaatttgacattgacaccacgccaacgtatcgcattgttgcgcgaaactaaacgccttgaaaatgaaggtaatttcgctgttgcaaacgaacttaaaaaaggttacgaatatttcggtgttgaaacttgtgctgcatgctctatgtgtaaaggtctttgcccacttagcatcgatactgcacaaatcgcattatccatgcgtcgcatcgatcctccagcacctggtttggctaagaaaatttatgacaacttctccagtactcttgaaatgtgccgtgccggcgtaagccttgaaggtattgctggtgctattatcacacaaaaagcaatttccaaaatcactgaaggtttacatggcgtaactggcgtaacaccttatgtacctaaaacaacacctaaggctaatcgctataaattgaaaaaccgcattaaacctactaactttgaaaaggttgtatacttcagtacttgtgcgaaccgtgcgttccgtcaaaaccaaggttatgatgatcaacgcagcttgcaacaagttgttgaaagcctctgcaataaggctcaaatcgatattatctatcctgaacatatcgaaaacctctgctgcggattgagctttgaaaactacgatgacgtacatgaacgggctgtaaaagatttacacgatgcgttgatgaaagcatctcaaaatggtaaatacccaatcgttatcgaccatagtgcatgtttcaaccatgcatttaaacatatgccagatttagaaattaatgatatttctgaattcttatgcaaattcgtagtacctcgccttgatattacaaaatgcgatgaacgcgttcttgttcataaacaatgtaaaatcaaagtattgggcaaatctcaatacatcgaagacttggcacgtctatgctctgaccatgtatttaatattaaatccttcgcatgcgatggctttgccggtcaaaaaggtttcttcacaccagaacttaataaatgtgctacaaaagaccttgctagtgaagtttccgaatacggtgctacacttggcgtaagttccagttctacatgtgaaattggtcttggtgaaagcggcggcatcccattcgtaagcgttgcgtacttgttggatcgttgctctaaggctaaaaaataattgaactagaaaatctaatagactaaattaaaacaaagtgctaacattttattatgatgttagcactttgttttggtggcgtgtttgtatttattgttagatgtttatttttctaataaatatggtatactatatgtaggtagtagagtgtatgaaattacctacaatataacaaaaaaaggacgagtggcagctcgtcctttttcttgcttattttttattcttattgttgagccaatagctgtaggtagttactgctagggcaacaataagaggggcaagcaaggtaccccagagtgtatgaaacaactcctccaatataacacctcctttctggaggtatttttattatatcattatattatgtacatcgtagataatttaagaatggaacatatattatgaagaaaattttatccatacttgccctaattataattattagtggctgtgggctaaatcaggatgcaaataatagtaataccgaaagcaatactaagagttctagtgaatccactcaagacagtagcaaaatgactaatctagatagtcacttaactgtcgctaaacaggctttatctgctggtgattatgcacaagccatcgaggaggcaacagcttctattaaggataatccaaataatgcagacgcttattcggttcgtggttttgctatggctttaaatggagatactactaaaggcatagcagatactaaaaaggcttatgatttagatcctaataatgtggctaattactacaatatggccatggtctataagttacaaggtcaattacccgagtctaaacgatggttcgaaaaggtattagaaaaggaccctagtaatacttggtctgtgtatggtattgctaccatttatgcagaccaaggggatgatactaaggcccttgattggcttgaaaaagcaattaacattgatgcctctgtaaaggctgttgctgctgaacaagatcattttgaacgctttcacaataatgagagatttaaaacattagtaggattatagtcttataaaactcgaaaagactagattattgatagtaatgggattgtcacaatggatagtaaacagatgattcgccttattttaaaagtggtaggatttatatattggtttgtttttctataccttggtggtctaatggtcatggactggtccgggtttatgtcccaacataatatagaaacaccgctattccttacatacttagtgtttgtaggttgttttgtaacgccgtatattatgctgtactggaagaagctgaatcctaatgctaaagctccatttttggtgcgccatctctccgaatatatggcgcgattagaggatcgtcatagtatatggtttgatgtattatatgtgctaaaattaatgctctatttcgtaataattctgtggatgctttgtatcatattactcaccttagcagttattgcgtggacagtactcctaattttgctgagcaattaatgatgtgaatttacattgttttctttactaacgcttcttgtaaaagctgggagaaattgatacctttcgctagggctctatcgttaagccacgcaggaatggtcaaggttttctttatagatttgctgtttttagcaaggtcaatatccgtttgcactaatgtaggataggttgtatccgtacaaggtaagttacgtatagatgtaggtgtaggtaagctttcgccatcttctaaggcacctaaaatatacagttccatcgcctcttgtgcattagttacgagttctgttaatgttgagcccgtactacttgtatattctaaatctggaaactcagcccagaaaccatcggcatcgtcatggattatggcagggtatataaatttcatatttcctccttattttagtcctgttctcttcaaaatggcatttaataaacctataggtatatctttgccatgtactgcaatcacttcaacttgatcatcttttttcaaacgatggtggctaccgcgctgccgtacatccttccaaccacttttcaacagtagttttaatagatctttatctttcatattctctccttttcataataacacgtgtacacgtataaaacaattattaggagttatttcttattatctgtagtttaacagtatataaataaaaataggggtgactattggtcacccctgactctattggtcaattgacaagtaataataaatgacttttatatatttatactattcttattatttataataggtatataattagaatatataaactaagctgtatattgatgaaaggagagaattcatcatgaaaccacttggcaaaaggatggcaatggctgtgttgtgtgcactaacgctgacatcacctttgtttttgagcggttgtagtatgtcagagctatggcagggcactgagcagagccgtaaggaaattgcacagcggtcggaacaggataaggtgcagttgtttaatcagtatgtgaaagctataagtcgatataatcgcatggctgttatgtttgattatgcgaatacaccgacgattaatgatttaaaagcaggtaagcatttaactgtatttaatacaccgaactttaaacagttacaaaaagaattagaagaagctaagcaagccggcattccttatgatgaaatgaaggagcccctagataagttgctttcaaaattgaatgaaatcacaccggtagccgaagaactggatgcatactataaatctaaaggatacaccacagataactatgctaaggaacagcaattaggtccaaaatatgtacagttgtatgagcaatttgtgcctatctatgcagattttgataatctgatgcataaaatcaacctcgatcgattgcaacaacagttacaacaattgcgcgatgcaggtaagaaaaacgcagccgcagcacaagaggttcatttgagacttaccgctgttcttgaaaagttagatagtgaaaaacaaccggatgtgaatgccatgaatcaagagttacaagctattggtgatttgtctaatggcattactagctctaactatgacactgttaagacctctgtaaacactacaatcggtgctattcgcacttatatgggttcaaaacaagataaggactatactcgtatgattgaggcttataaccattatatttctaatatgaatacgacaaatatgaatgaattagattaataagatctgagtttatattacgttagacacgtgtaaaacgaacacataaaaagctgtattaaatgagaatttcatttgctacagcttttttgtaatgtattctatttttttatcttaatacgtgtcgtcatttgattagatagggtgaacaatacgagtgccacccagatacagccaaaagctatgagttgcgctgtaccaaagctttcaccaaagtagaagatggccaagaagaagcccatggtaggagacaggtattgtaaaaatccgagaatgtttagtggtaatagacgggcaccgtacgaaaagaggatgagcggaatcgatgtggtaaggccggcaccgatgaggaggaggccggtcagcgttaggttttcgataaaggtccacgaggtggtgtctatagccgctaaataccataatgctatcggtgtgacgagccatgcctcgaaggcgatactcgagaatggatggatggtgagtcgtttcttaacggcgccgtagaggctaaaggatacggctaggacgatagagacaatgggtaatgtacctagttgaacagtcatgatagccacgcccaagattgcaatggcgatacttagtttttgtggccacagcaaggattctttgtaaattaaaataccgagcaatacgttgagtaagggattgatgtaataccccaaactcgtgtcgagtacgtgctgatttgttacggcccaaatgtaggtgaaccagtttatactgatgagcacagcggccagtaataatagaccaaactgtgagagatgggcacgtaggtgttgtatgtcgatgcgtagttgttgacggcccgtgacgatgatgaggacgagcatccaaaatcctgaccatatgatgcggtgcgataatacggaaaaggatgatacttggtttaaaagcgcccaatagaggggcagcaaaccccaaattaaacagcacaacaatgtggtgctgagaccttttttgtttatttcgttcataatacgacctcccactagtagaattattataacatggtggtagtatagcagtagcgaattatagaggtgatttctctaaattgcacctatgcatttttatcattctatatatgcgttagttataacttgaaatttgctacttatgattaactgttatgttcattgactttgtgcatatttttacactatattggacttagaacaacgaatatagagaataggtgtcgcaagacttaatagagaaatcggtacaagccgatgcggtcccgccactgtaaggacgagcctgctttcatacatgtcactggagcaatctgggaaggcgaaagcaaggtgttgagcccgagccaggagaactgcctatttgataatcaccgttatgtacctacgagcgataggaaggggattgaggtatactttttacaatagttttagtgtaccattcaatatgtaacctaacgtgtcactctcgggtggcacgtttttttatttgccacgctagagggtcgttcatatatggcataggcttaatagtttgactggagatccatcatcatgatggatatatatttggcacctatggaactcatatacgaagcaactcactggtacggtgcgctgttcccctgtatggtttcaagttgaaaaggaggcacatatatgtctgacaaaaagacttcaaaggacgctgaacgcgatttactggcgcctgtatcctttgatgaatttgagaaacctacgtatgaacgatggcaggctgaggttgaaaaggcgttaaaaggtggcgatttcaataaaaaaatgttcaccaaaacctatgaaggtattacgttacaacctatctatacacctgcattgcatcaggaaaagattccaaagggcgtttatcctggcgctggcgagttcctacgtggcacgaaagcaagcggctatataaaagattcttggggtgtatctcaatatgttgatgaatccttaccaaaggatgctaatcatgcaagtttatacgaaattgtgaaaggcggaaccattcacaacattcgtcttgatgaagcgacacgccatgatcaagatgtgcaagtaggcgcatctgttggtgtaggcggcacatccttgtatacgatggccgattgcagtcaattaattgaacgatttaatcttaaggaaaatcctttatacattgaaactggcgcatctgcagcgattttgctcggtatgttgtcggctactgtgaaagcttctaaaaagcaaacatccgatttgaaaggtctcgttggtgcagatcctatcggcgtgtgggctaaagacggtgcattgcatatgtctttagatactgcttttgatgaaatggcacatactgttgtatgggccaaggatcaagcacctgagcttaaaaccgtgcttgtatccggtgatgtatacgctaatggcggtgccaacgatgtgcaagaggttgcctatgcattggcaacagctgtttgctacgtgcggcaattggcacaacgcaacatcgatattcataccattgctaagagcatgatgtttacattctccttgggtgcaaacttcttcatggaaattgctaaattgcgtgcgttgcgcgtgctttgggctcgcattatggaggccttcggcgctggtgaaagcgaccgtgccgttcatgtacacggtagaacatctgcttttacaaaaaccgtatacgacccatatgtaaacttgttgcgtaatacaacacaagcattctctggtgttgtaggtggtctcaatagtcttgaagtttctccatttgatcaaccaattcgcaaatccgatgaattctctcgtcgtattgcccgtaacattcaagtcatgttgcaaactgaattcgaattgcgtcaaccagttgaccctgtaggtggttcttggtatgtagaaacattggcagctgaactatgcgaaaaaatttgggatgaattccaaactatcgagtctaaaggtggcattatcgctgccttgaaggaaggttatcctcaagcgcaagttaaaacaattcttaatgaacgttttaaaaaccttgcattccgtaaggatgtagcggttggtaataacatgtacgctaacatgacggaagaattgttggatccaaaacctgaaaatcaagaaacattacgtcaaaaacgtgtagctcatcttgaagaatacttggctggtgcagatcaagatgctcttgtaaaagcacaagctacgttagaagcaagcacaacagaaccaggtgcgttgattggccttatcgaattgggtgcattacacaaaatgacaattcgccaaattcgcagtgctttagaggcgggcgatatttcctctgaaactatcgaaccaattactgcacatcgctggacggaacaatttgaagcccttcgtatgcgtacggaaaattataaacaacgcacaaaagataatgtgaaggtattcttggctaatatgggccctattcctcaacataaacctcgtgcggacttctccacaggcttctttgaagtagcggcattcgaagtaatcaaaaatgatggtcatgaaacaacggctgatgcggctaaagcggctcgtgaaagtggcgccgatgtggtagttatctgttctacagatgatacgtatcctgaattggttccaccacttgcgaaagaattgaaagaaactatgccgaatgtaacggttattttggcaggggcaccttctaaggacctagagcctgtatatcgtgaagccggtgttgatgatttcatctctgttcgcgcaaactgctacgctattttaaatacgttacaagataagaaagggatgtgagctcatgtttaaaaatccagacttctcctctcttggcttgggatctcagtctgccacatcgcgcgatgcatggcttgctgaacttaaaaaagaaacaggaaaaagctttgaagacttatataacacgacaatggagcaaatccaattaaaacctctctatacagagatggattatgaagggatgacacaccttgactatatggctggtgtacctccattcttgcgtggaccttattccacaatgtacgtaactcgtccttggacagttcgtcagtacgctggtttctctacagccgaagaatccaatgcgttctatcgtcgtaacttggcagcaggccaaaaaggtttgtctattgcctttgaccttgctactcaccgtggttatgactccgaccatcctcgcgtagtgggcgacgttggtaaagcgggcgttgcagttgactccatcctcgatatggaaattctattctccggtatccctcttgaccaaatgtccgtatccatgacaatgaacggcgccgtattgcctgttatggcattctacatcctagctggtgaagaacaaggtgttgataagaaggttatggccggtacaatccaaaatgatatcttgaaagagttcatggtacgtaatacctatatttaccctccagctacgtccatgcgcatcatcggtgatatctttgcgtatacatcccagaacatgcctaaattcaacagtatctctatttctggctaccatatgcaagaagcgggtgcaacggcggatatcgaattaggttatacattggccgatggtcttgaatacatccgtaccggtgtaaatgcaggccttcatgttgaccaattcgcacctcgcttgtccttcttctgggctatcggcaaaaactactttatggaagtggctaaaatgcgtgcggctcgtatgttgtgggctaagattattaagagcttcggttctgaaaatcctaaatctatggctcttcgtacacatagccaaacatctggttggtctcttacagaacaagatccgttcaacaacgtggctcgtacatgtatggaagcgatgggcgccgcattgggccatacgcaatccctacatacgaatgcgcttgacgaagctatcgcattgcctacagacttctctgcacgtattgcgcgtaatactcagctttacatccaagacgaaactaaggtatgtaaggttatcgacccatggggcggttcctactatgtagaagcattgactgacgaattgattcgtcgtgcttggggccatattcaagaaatcgaatcccttggtggtatggcgaaagcgattgacacaggtcttcctaagatgcgtatcgaagaggcggcagctcgtcgccaagctcgtatcgactctggtcgtgaagccattgttggtatcaacaaatatcgtctagataaagaagatccattagatatcctcgatgtagataacacagctgtacgggaagcgcaaatccgtcgtctcgaacaattgcgtgctaaccgtgacgaagataaggttcaatcctgtctcgaagcgattaccaatgctaccgaatctggtgaaggcaacttgcttgctcttgcacttgaagctgctcgtgctcgtgcatccttgggtgaaatttcctttgctgttgaaaaagtttgtggccgtcataaagcggttatccgctctatttccggtgtatactccagcgaatatgaagatgacgatgtaatcaaagaagtacgtcaaatggcagatgactttgaagaactcgaaggtcgtcgccctcgtatcatgattgctaagatgggccaagacggtcatgaccgcggtgccaaagttattgctacatccttcgcggatatgggctttgacgtggatatcggacctttgttccaaactccagaagaaacagcacaagatgcggtggataatgacgttcacatcgtcggatttagttctcttgcggcaggtcacaaaacattgttacctcaacttgtagaagaactcaacaagcgaggtcgtggagatattttagttgccatcggcggcgtaatccctgctcaggactatgagttcctacgcgaacatggcgcagtggctatctttggccctggtacagttttgccagtagcggcgaaaaaattactagaaacattgactagccacgttcaagacgaaggcaatgactgataataaacggtctactccggatgaattgcgcaatgcacaggacgctacttttaccactggtgaaggtaaggcgccagaattaggtgtaaaaaacgcaagcgccgagggtagtacctaccgtcccgactgggtgccagaagatgcgaaaaaagatgatacctttgcgtgtcacgtgatgaaaggcgtcaaggaaatgcacgacggcctcttgtctagctccactcatctggctccgtcggtacgtcccgtacagcggcgaaagaagttaactgtcgctgattatgtacgcggtatcgagcagggggaccgcgttatactttcacgggctattacattagtagaaagtaataataaggaccatttcaaactagctcaacaagtattgcaagccgtattgcctcgtacgggcaaggcgttgcgcatcggtattactggtgtgcctggggccggtaaaagtacatttattgaagcctttggtaatatgctcattgaagctggttacaaggttgccgtacttgctgtagaccctacaagccaagtcacaaaaggcagtattttgggcgataaaacgcggatggaaacgttgacgaaacatcctgaggcgtatatccgtccatcgccggctggtggtacactaggcggtgtagctcgtaaaagtagagaaacgatgctactttgcgaggctgctggatatgatattattctcgtagaaaccgttggggttgggcaaagcgaagttactgtgcgctccatggtagacttctttatgctcatcgtcttaactggtgcaggcgatgaattgcaaggcatcaaaaaaggcgttatggagctggctgatgctattgtggtcaataaggctgatggggacaacctcaagcgtgctctcatcgctcgtagcgattatgatcggatgctacattacatccgtccagctacggaaaaatggaaaacccaagcctacacttgttccgcagtgactaaggatggtctcgacgaattgtgggatgttatccaagagtttactgaacaaggtaaagaaaatggcgtattcttaaaacgccgtcaagaacaatcccttcgttgggtacgcgatatgattgacgaacacttgcacaacctattctttaacaatgtagtcattcaaggtcgtatgggcgaagttgaagcggctgtcttagacggacaaatgagcgaatcgcaagccgtcgaagaattaataggcgtctttgacaagtccttaacataatctctatacatacaggcatagtatctatactgctatcggtttgtaatcgataggaaatgacaggtactatgccttttttatttcatgaaatgcataagtatgacttttgtaaaaatcatatttagtatataatttagttatagatgtatactttatgggttattttaaaaggagagatttattttgaatccattagcaaaaaaactgacaacagcagtattgtgtgtaactgctcttacatccccattattcatgagtggctgtagtttttctaagattgccaatggggtgcaacaaggcgctcaaaaggcatcgcaacaggacattaaagtgttcaataactatatcgaagcgattggcgattttaatagttggtccgtacgctttggatatgctatcaatccgtccgttcaaaaactaaaagaggggcaacatttaacaagcttcatggcaccacactttgataccttacaacaaaagttgcaagctgctaaagacgctggcgtaccatatgatgatatgaaggaacctttagacaacgtattggctgtattaaaggatattgtaccagtagccagtgaattggatacgtactatcaaactaattcatatcaagcagataattatgctaaggaacaacaattaggacctaaatacgttcaactatatgatcaattctatgcagcatataatcagttagacgcagtagttcacaaacacaacacagaaaatcaacaagaacagttgaaagaacttaaagattctggcaagaaaaacgcagccgctgttcaagaagttcatttacgcttaacggctttattagatggctttgaagaaggcaaacaaatcgatgtaaatgcagctaaccaagagttacaaggcattatggatgtagctggcaccgttacgagtccagaatataacactgctaagtctcaattaaatacaacgattggtagagttcgtacattcttaggtgaccaatcagctgatcattacaatgatatgattgaatcttacaatcgcttcattggcagcatgaatcgcttggatattaataaacttgataaataatatctagctatgtacgaatcgattctgtgccatttatgaaagcctgcgcttcatagcgtgcacaatataaatagtacatataaaaaattcatacaaaggtacataaaattgcactaataagggctacatcaattagcatgtctattgatgtagccctttttctgtattttcttatactagttaagatcattgtcagattgtatgcatcaactagtatatttttactcatctatcgtaagcctcatatgttttgatgtgtaaaaacgtggtataattattagataagagcctaaaagagtgtgggttttggaggttagtatgagtagcattgcacatttatttgtagctggtggtttcgttatgtacccactcgttatctttctagttgttaccctaatgattggtattgagcgattttttctataccgtaaattccgtaaggacatgcgccaattcacggctgtcctaaataatcatccaggctggattatgttgccaaccgtattagaacgagatacacaaaatctaggtactctctttgcaaaggctttgcgcagtgcaaaaaattacaatggtttagaaaaccgtttacaagacttggtaggctataccgatgaacgcttaaaacgtggccttgggtggcttagcatgatcgttaccatggcgccgttgcttggcttgctcggtaccgttcttggcatgatccgcgcttttgccgttgtaggtggtgacattggggctccaaccatcatcacaggtggtgtatccgaagccttggtagctactgctacaggccttacggtggccatcattgctcttgcctttcacagctattgtgcagcaaaggtgaatgattttatcgtagccttagaacatgaatgtggcagcattctcgatgcgtacaacgaggaacatgacctatgagacgtcgtacattaggagtgaaaaaagaaccgaccatcatgatcatccctatgattgatatcgtattttttttattggtattcttcatggtcggcactttatacatgaatacggagcaacaaatcccgttaaatttaccatccacatcgacttcgacggctaaatccattgaaccgattatcattactctcaccacatcgcataaactctatatcgataaccgcgaaatttctgcggataatctatcccaagaggtacaggatatcgtgcggaccacgccacgacaggcctttgttattcgcgcgtctaaggacgtgtattataacgaggtcatcgcccttctcgatatgctgaaagtaaatggcgctaagtacattagtgtcgctacggatcggaagtgattctatgtttgaatcgcattattttcgaccgtttttgatatccctgtgcatcagtattctcatgataacgggcatggggctttcactaaagggcatgagtggcactggtgcaggccaagaggcagctgagattagctttgatttggccgatgctggtgaaagcgaacacgctgaggatcatccgacggtaacgccgccaccagaggaggcaaaaccacctacagatgcacctgcgtcggtagctcagaaacaagaaacgaaaccgactgtaaataccgtagaaccacagaaaactatagatacagaacaaccagcatcggctacaaaacgtgaatgggctgttccaaaggccatagaatctgaggctactggcggtgagacgggcgttgtgacacatcaaaaacaggaacaacaaaagaaattagtaggcaatgacgtatcgacggatcccaatgcagaaggtaatggtctcgataatacagataaagacctatcgttttttgcggatgcactcaatttgctgacgccgggtcaacgggcgtggctcgaacaattggatattaatcctacagaatatttgcgccaagtgaaagaacaaggccaagcatcatctgtacgcggtgaagccgttgtgcgcgttaactttgacgctagcggcaatgtaatcgtcggcgttaataccccgcgtatcgtagaggactctgttcctcctgatgtacgagacgaagcgatacgtatcatcaagacgagcggtagcattgttaacaaacgtggacaagtcgtgtccttagccatccctgtcgtactaggacaataaagaggcatacctcacatacatggttgtatgtaagatatgcctcttttgttatgcctatgatttgctaggtgagtaatcttctgttcgactacgtgctattgtttgcgttcgttgctcaactacgtgctattgtttgtgtccgttgttcaattacttacgttttaatgccgttttcgtgctgttgaacaccgcatagtaaatgatgatgccaccgatgaataatgtcacttgcatttgtgttgtgtattggtccacgcgccataatgcaaaggcataaaagaacatagtaatgagcataattaagaaagctaggatgcgacgcacattcgtatgaaccacattggatgtagcgatgcgacctttattgatgactacatatataagagatactaaaatatccactgcgtatacgcctaaaatccagttgataggcatatcgttaaacacgaagacgccgaggacgataaaactgatgagaaaaaataattttatcaacgtgcttgctatttgagattccttcggttgttgtatccgttctttatattgtttctttgccatgatctactcctatatgtgtattattagtatgttgatacgatatatcacttatttatacattactattataataataaattacaaaacaatctatacaaaataaaataccgaacattaagaaaaactaatatatatattattcggaaaattgcggaagatttattgaaccaagcttttacatatggtacaattattatataaaaaatctagctttcaccatgcaaaggagatatcatgataccacgttatacacgagaagaaatgggccatatttggagcgaacgcaacgagttcgacacaatgttattggttgaaacattggcatctgaagcgcaagctgagcttggcgtgattccgaaggaagcggcaaaaatcattcgggaaaagggcaattttgatgttgaaagaattcacgaaatcgaacgtgaaacaaatcatgacatcatttcctttgtgactgctgtgggcgaatatgtaggccctgaagcggctaaatacattcatcttggcttgacatccacagacgttaaggatactgcacttggctatatgatgaaacaatcttgcgatattttgattgaagatttgaaacaattacacgctgtattgcgccgtcgcgctgcagaattcaaacatacgcctatgattggtcgtactcacggtattcacggcgaacctactacattcggtttaaaactttgcctttggatggcagaggtagaacgcgatatcgaacgcatggaacatgctcgtaaaagcgttgctgttggtaaattgtccggtgctgttggtacatactccaacatcgacccattcgtagaacaatacgtatgtgaaaaactaggccttgaacctgttaaaatcgccactcaagtcgtacaacgtgatcgtcacgctgaactattgtccaccattgctgttgtaggcggtacattggataaaatcgctttggaaatccgtcacttgcaacgcaccgaagtgcgcgaagctgaagaatactttagccctaaacaaaaaggttcctccgcgatgcctcataaacgtaatcctatcacttgtgaaagaatttgtggtatggctcgtttattgcgtggttatgcacaatctgcgtacgaagaccaagctttgtggcatgaacgcgacatctcccatagctctgtagaacgcgttatcttaccagatgcaaccatcgcgttgaactacatgcttcacctaacaatccgtaccatcgataaattgttggtataccctgaaacaatgcttaaaaaccttaaccttacaggtggccttgtattcagccaaacaattttgacacacctcgtagacaaaggtgccgtacgtgacgaagcataccgttgggtacaaaaatacgctatggaacgctggctcgaaggcaaagacttcgctacaggtctaaaatccgatgaaaacatcaaaaaatacatgaccgacgaagaaatcgatgcatgcttcgatccatataaactattgaaacacgtagatacaataatggctcgtttcggcctataattctaccggtacaggacgggcaccctcctcaaagcctccaccgccttaatctgtccccttcggggacagggcaaagtcgttttgagaagggtacccgtccttttttgctataagttctatgccgaaatgagccattgggagaaggacagagtcgttttctgaacggaccatcctttttgcattaaaccttctatgccgaaaacgagccatagaggcagacagggcaaagtcgttttgagaagggtacccgtcctttttctctatagattctataccgaaatgagccattggaacgagaaaaagccgacacgctatcgcgctaaagcgggacccgaagtcgttttgaggaaggtatccgtccttttttgtttatcgcaagtgccgtattttcttacggtgcttcataattattagtagttagaaaggggataggctaagtaaaaaacgactttgtgtttcgccctagtgtgtattttgttatgggatttttgtttagcatgcttggtatggggataagggcgaaaacgttttgaatgatggatgatgagggttcaaaaaacgactttggtcctgcgaagcccgaagggcgaagtcaaatccggccggtggaggctcttattttatttacagcaagtgccgtattttcttacggtgcttcataattattagtagttagaaaggggataggctaagtaaaaaaacgactttggccctgcgaagcccaaagggcgaagcagacccggccggtggaggcttttttacttagcctattccctacttacggaggatatatgaaaagcaccataagaaaatacgcaccgcctatctttcattgcattaacgatttcggtcaaggttctcttgctgcattgataccgttttttattgctaattttaatctcaattattatcaatcggcttccattattttctgtaataccgtggtagcgtctattgctcagcccattttggggtatgtagcggatcgatggcgcgtgccttggtttattccggtaggctttacggtgactcttgtgtccattagtgctatggcgctggctacgaactatgaaatgattcttgctttgtctcttttagccggcgtaggggctgcgctatttcatcctgaggcggctcttcttgtaaatcgtacacaatctcacgagattggaaatgccatggggcgctttgcagtgggtggcagcgctggttttgccttagggccactcattgctggtggcgtttatgtctttggcggccaattcctttgggtgtttacggctattaccgcgctcggcgtgttgctatatctatatgctttcacaggtcatactactgaggccgaagatgcgcgtgaatgtgaaagccaaattaagggcacaaatacaggcataaatgattgggtgagttttacaaagctatttttcgtcattgcctctcgatcaattttgttctccgtattatcgatttttataccgattttatacattactgttatcaatggcgaagccggtgcatcgagcttggcacttactatgtactttgccatgggggctgtcctcacctatatgggtggtgcattatcagataagctaggctttctaaaaacagtgcgcttaggtaatattatatttttaccatctgtattagtgtttatcttcgtaccgaatgcatggggattctttggcgccatgataccaatggcctttggcgtattctcacaatatggacctattaccgttttaggtcaaaaataccttgctaaaaatgcaggctttgcatcaggtattacattgggcctcggcattacattaggtggcctcgtagcaccatatattggacatttagcagatatttacgacgtacaaacagcgttaatgaccttgatacctgttggtgcgatagggttactaatgagcttctggttgaaagaaccaaaataaaataattgttatacagtacaggcttgtgctaattcttagggatgcataatatacgtctttaaaattagaacaggcctgttctaatttgtaggggtccctatatctctatctttagaattactacaggattgtactaattcgtaagagcacatatataggtgtgtttagatcaaactctttatttagtcattccgtgctttgccattatgttgtataataactatggattaatttgactttcacaattggaggacatagatatggcaacaagtatggtaatcggcactcaatggggtgacgagggtaaaggtaaaatcgttgactggattgcggaacgtgcagacgttgtagtgcgcagtcaaggcggtaataatgcaggtcacactgttgtagtagatgacaaggcattcgcgcttcgtttattgccaagtggtattttgtacgatgataaacaaaatatcgttggtacaggcgttgttattgatcctaaggtgttgttacaagaaattgaaggtcttgaaaaacaaggtaaatctgctaaatcccttcacatttctgaccgtgctcatgtcatcatgccttaccatattgctcttgatatggccgaagaagcatccaaaggtgatgctaaaattggtactactaaaaacggtatcggcccttgctatgctgataaggtaaaccgtatcggcatccgtatttgcgacttgtacgacatggaaactttcaaacaaaaattggcgtacaatgttgagtttaaaaacaaaatgcttacaaaggtatacgatgctgaacctgttaattatgatgaaatcttagcagattacattaaatatgcagaggctttgaaaccttatgtaactgatacaaataatgctgtgttgaaagcgattaaagaggacaaaaaggtattattcgaaggcgcgcaagcaactatgctagatcttgatcatggtacttacccattcgtaacatcctcccatccaatcgctggtggtgcttccacaggcgcgggtgtaggtcctaactatttgaaaaatattttcggcgttgtgaaagcttacgctacacgtgttggtgcaggcccattccctacagaacaacttaatgaaattggtgaagaacttcgtacgcttggtcatgagttcggtactgtaacaggtcgtcctcgccgtactggttggttagatcttatggttgtaaaatacgcagcaggtcttagcagccttgattatttagctattacacgtttggatattcttgattctttcaaagaattgaaaatctgtgtaggttataaattaaacggcaaaaacgttgaaggcttccctgctagcttgacaaatcttgaagcatgcgaacctgtatatgaaacattgccaggttgggaaacagatatttccggcatccgttcttatgatgaattgcctgaaaatgcgcgtaaatacgtagaacgtatcgcagaagtaacaggcgtgcctttgggaatcgtatctgttggtcctaatcgtaaccaaacaatcgatcttgttaacgtattttaatctgctgtagccaattattataaaaaataataagcggagattcttattagagaatctccgcttttatgcgtattttctatctcataaatgattttaattagtcaattaaaatattttaatgagaataaaaagaaaaaaatagatttagttataaaaatagtatataatagtataaaagtagattgataatttttgatgtatattgaggagtttttcttatggttgaagtttcttatgaacgtttagcgacgatttttaaagcgctcagtgatgaaacaagattacatattatagatatgttgtcctgtaatgaattgtgtgcagcagatattttggcaagctttaatttgtctcaatccacattaagctaccacatgaaaatcttaattgatgctggcgttgtaaattctcaacgtaatggtctttggactcgctattccatcaatgaagatacatttggtgacattttggagattattccacaattgtacaaaactaaagacgaatgcatttgcgcacaaatcaaatactgccgtcttgatgaacacgaaaaagacgcgtaatcatgagacgctggattatgcatgttgatatggatgctttctttgcatccgtagaacaactggatcatcctgaatacaaaggccaccccgttattgtgggtggtctttcttcgcgtggcgtagtggctactgcatcctatgaggctcgaaaatttggcgttcattcggccatgcctatttcgcgggcgaagaaactttgtccgcacggcatctacgtgtatccgaatatggctcgctacaaggagatttctcagatcattcacaaggtgatggaggaatttacacctatcattgagcccttatctcttgacgaagccttcttggatgttacgggtattacccataaattcacaggccctaaggcattgggccgtgccattaaggaccgcgtgtttgaggaaacggggctcatcatttcggcgggcttggctccgaataaattccttgctaaactggcgtctgacctagataagcctgatgggcttgtggtcattccttatggtaaggaatgtgaaagcctcgcaaatttgcccattaaacgcatatggggtgtaggccctagcacggaacgtcgccttaaggacggtggatttgccttgataaaggatgtgcaaactttgccggatgagaaaccgttagtgccttatgtgggcaatcaggcacggcgtatttgggaattggcacgaggcatcgacgaacggcccgtagaaccggaccgtcaaatccaatccgttggtaatgaggaaacctatgaaagcgatgtcgcggatccggctgttatcgacttggaacttcattattttgccaatcgcgtagccaaacgattgcgtaaatatggtttgatgggtcataccgtgtcgattaaggtgcgatacaatgattttaaaactgtatctcgtcagaaacgactagattctgctacggaccaagaacgtatcatttacgatacatccgtactattgtggaataagcttatgcgtgaacggagcaatactagacaacgggaggctcgcaatactagccaatcgaatcgccgtgatgctaagactttcaccgataacgctaaggatagaccgattacggagaatcgcgagatgatgggcgccgcaccattacctcaatttgatacatccgttctcgatatgccgctaaaaccaattcggcttttgggtgtgacggttagtgggctttcaacagaagggattgtacaggacgatttattctccattgaaacggacgagaaagatgagaagctttcaaccgtgctagactcgttggcctctaaatttggcgaaggggccatcatgagtggggccctttggcgtcgtgctcacggcgatggtggagaacggcgaaaacggtcggaattaaaggccgaaattgatttagataatgaagaataaaattctttcaagaatagaaacattcatgatacaatgtacatgtatagaaatgtgtatacgtatgaaactatctgcaagagaggtataaatatgagtatatttcgtgtggccattcattatggcgtaaatagcaacggggttttatcttatgatacagatacaaaaaccgtaacggtggatctacctgaacaagaatggattgacaaggtacgtgcatacttaaatgaagatcatgctatcgagcatgctacaggtcttgatacgtatgaacggttgactgtaaaaccattagaatctttggataactttaaattagctcttacacgcatgtgggaagccatcgacgtacaagttgattggagccgcccggcgtaatgtaaatgataccccttcgtagactggatagtgctatgaaggggtttcttattgtggctatagtttttttaccaaagattggaggtggaaaattaactttgtcatgaagcgtgtatttaagtattgctaatcaaattttttatttgttaggtcttgatacataagcttagcgatttcatactgtgggtcgccagcttgcaattggtgtgaaggtagtttaaatacagcctcagctctttcgtctttcttgatatcgatgccttttacatcgtcagaacggcttatggaaatggtatgtgttgttggatttatgaagtacgcatttacatcgatgctgaaagctttgttttcgtcttttctcatgattgttcgtaaaatcatagctgaaatagcggtagtaccatccttttcgcctaatagttgcttagatgtgtagtctacataatctgcatagacgtaaatatcgccaggtttggccttatcataatcttgcgtataggcctctactaaacgcaaatcaagttgtctaccaaatggtcgagagaacatttcgctttgtaattcgcgtgtttcactaacaggtggatagaatggtataggcgttaaaccttttagcatatctgttcgtgtttcgttttttcgtttagcgcgccgttccgcagtgaccttgtctaaacgttgacgctcttttaacatggccttttcttgttcttctttagacttataagtttttacggatacaacacggttaccagacatagtgactgtcgaataaattggtttaccgttagtaggttttccctcagaagcatcaagcgtagattgtactatggctggtgttgcgctttcaatagatttttttaactctggaatattggcataatccatatcaaccacagcagtatctgtgctttcacttggctgcgcaggtgtagccccgtacgcggatgatatagctaagacagctaatagtgaactggtaataatcgatcgtttacatagtttcattatacatacctctttttataaaaactctctaatactatcaacagctgtattatagcatagttcttgcgtagatagatttaaaaacgctataataaagtatacatgcgtctatagctcagtaggatagagcagcagtttcctaaactgcgtgtcactggttcgattccggttaggcgcaccagtataatagaagcggtataaagtgtatatacaccttataccgttttttatttgccacaaacatccattgagcaggatttctatatgctgatatggaatttattaatatagtttgattatatgtatttctattcaagggctagttacgtcaaatataagggttatagtagagggggtgaaaatatggttctagaaaataaaaactctttctatttaaatggtgccttatttctttctacgatgggcagtaccgcgacaacgcttggttttataacgtatatttttaatacgactcacagtgcttttaatacaggagccattactatagctacattattagttggtatggtattaggtccgtttttagggattttagtaaaagaaaagggcctcatgtggtctatggtagttcctgaaattctttccgggatgatattatcgatttttattcttatcgataatatttatttagtctatatcatagcgtttcttataggatttaataataagattttagggattgctcgactttcgtttgtacctaatattactaatgatttagtcaagttcaatgctttactacgagctattaatcgttgtgcaatgataagtggatctttattatttagtattattattaattactccttgaccatggtatttgtcattgatgctattacatacattctatcagcatatttactttaccgattaaataaaagtgtagtagtaccaattattgttgaggttcaaaagactgttaaagagcgcatatatgataaagctaaacttttagtaaaggggtataagttattatttttaaataaaaagataaattttattgtgtacttaggcatactaactagattattttatatgtgtattcctattatgttattgatttttattaaggatacattacatttatctgacagtgagtatggttatacacaaactatatctagattcgcttcctttatggtttttggattgttagctaaataccttgctataaacttgactaaatcttttaaacccttgttattctctcttttcgccctatatggaattagtatttgggggataggttatgtaacaagcattgagaacctttatatcgtttatagcttatcagaagtattgctctttacagctgttgttttagttcatgcatatatacagtccgtattttctcaggatgaattaacattagcaagtggttctgttagcacaggattttctattggatccatcctatcgattactatatttacaaacttagctaatataataccaatacatgatatattttatatatgtggtttaggtatagtagtaagtacagtttttataatgagcataaataaagtttcttgtcaaaatcaatatacataatggagagtctatatgagtttttacaattggattcaagaaaaattattcgacaattacgaagagtggcgtttgaagagccctgattataatcggaacggttttaacatagtaggaatagataataccttacaggctatgcatgatggattttttatgtatatagaattatacccaccttgtgccatcgatggctgtactgcgatgaaagcacgtgtaggaaaaacaccggatgcagtagatatattcttagatattaatgataaaacctatcgtatggcagatgtaagttatcctgatgcggtacagatgatgcgggcttttgtgaagaaacgtcggttgcctgaccgtagcctgtttgtagaaacagtaaaaatagatgttaaacaaattaagtcaacttttgcagagttagcagcgttattacttggcgatacgaaacaagctaaatctttcatgtccaaggtaaagctaacatctatggatgatatagaagatgattggtggaacctctatgagaaactacagtctaaaggtcgcgctgtagagatatctttaaaaattgaattagaggattttctttatcatgtgcagaagttaatacgtaacaagtctttagatactagcgaaaatctaactattgatacagccgcatttgatgacagtcaatgtattggggactggtgcgcacattttaattccacgtggaaaaaccataagttagtaggtatggacatcggtacagatagtttagtgctcatggtactttcaaatgaggaatttaaaagagcccaagaactagcgaaagaattattacatagaatcgatgtagctgaacgtttgtgatgtaacgaaaattataatgtagtggcacgattataatgtggccgtatttataaaaaggttgtaattcttaactgtaaacaatttgcactgtataaatgtgatgaataggagagaatcatatgagtgttgtacgtctaccagaatatgaagcagagtttgagccggaagtatttgaaatttatgcattgccgcgtagtgatgcgaatggggcgagtccttatttagagaagtaccatagaccattagtgtccactgatgctatcctagatactcgaactggcgagcttgaccgtagtgaaggcattttgacatggattatagagggccttgatgatagatggggttattcttttgagccccatggtgtctataaattattagttaagaaagctaagcccttagaggatttaggctatatgcgtccctcttggaataatcgctattatgtgctcgaggtgttagaggaacatgctaaacatagcgagttagaggcgttgtcagcttatttgaaaacccctaaataccttcataccgacaggggtgacttcctgttaaatcgcgagtatcaatattacacagcgagaattgatgattatgctttcacccttgatgtagacgagggttctgatgaaagctgcactgtggcattggcggctttcaatacaatcgataatttcaaagaatttgaacaacgaattagtacctatattagtgagaccttattagatctcgctaatgattggctcgacaatgatgaccaagatccgattacggcagaaatatttgccaagcgtattactatgggcgaattggcgttccgcaatgatggtaccatagaggtctattatgacgatgacgatattttctggggacactgcatcatagccaatattgatgcggaggggaatcctgtacatgcggatattgcaggataatcaattaatggagagtcctaatgagaaaatcggaattaatgatattatggaatgttgaaagctggactgtagaaccgcatggcgtttactttgtagcccgtcaattagtggccgatgaagtagcaaatcacgaagatcatacaatagagactcaagtagaaaatgtagaacaagccttcaaaagcttcaatattagctgctctggttatacagaagacgagatgctttcactaacattttggccacagttatatgctaaattagatgaattagaccgagtggcacagaaaatcatccaaaaggagatgcctccagatgatcctgtggtgctaaaactaacagatattatgctagatacatctggctgctatggcgcatttgcactaggttatgatatgggcgaatcgaccgcgggacaactatatgtattagtatcttttgataaaaattttacggctcgacaagatgttatatatgaaacgctctagagtacttgttagcaatggagctgtttgtatagctgagctaagctgagagtctattggatgttagtatggcaaggcttaactatcaatataaataataaacaggagagagacgatggaaaatctgtataaagaattaagaagcttttttgccaatgatatggatctaaatgatttatttgattccgaagctatcatctggattgactggcgcgaggatgacgaagatgtggtgaactattttaatgatatgatggatgagcctatcgatattcaaacagttagtaatggcaagccttatggtgacgatattgtgctacaaaagggcgataaagaactcttaattccttatggtgatgagaaagatcgggatgtgaccatcaaatacttcaacgaatttgttaaacctgattatgaggttcgttggtttactgaaagccttggaaacgatacgcttgggtttactgtgctttcaggggcagaatgggctaaattaaacgatgaatttggggcagatacggttcgttactattttgaacctatcaagcttgaaagtaacatgtttaatctcgatatggacgaagtatttgcactactggctttaagagaaaatagtgacggtgtaaatactgactttagtgtgcagttagattggattaaaatcataaacaaagaaaaagccttaactgaacaaaaagagagtggacaaattgacttgaaacagtacatggttgctaaaaaagaactacaacagattaaggatgactttgtagcaacccatggcgagatggaataagagctgttgttctagaggagattcatatggctattgacggtgtgaaaatcatagatagtgatgatggccatgatatttataatgccattgttgaacggtacaaggatggtgtcagtgtcgataccataatttctgaaatcttaagtgagaaacaaaatttttgtactgatgagttttatacagagatttattggactgcggtggcctattcgctgtggaagatagggcgcctaccagataacgttaaagagaaagccttagatataatcgctcagggtcctcatgagttttggctagaaatcgatggtaaggcccctgaacagcgtcaaaaggtattagataagttagcagtacagctacaaagtgaaaatccaaagccgattaaggttcgtaaatctaaaacgaagagagaacctcattttaaggtgggcgacgtattagctgttaagtttgaaaccgagtatggcgccgtctttgtgtctgaagtagatcaatcaccgcggaaaatcgaatatcatttagcctgtacgcggcttttacaagaagaaaaaccaacaatggagcagattttaaatagtaaaatcgcatgccggaaagataatacaaatttcggtatcgatacagactgttggttcaatcataaagacttaggtatgttgctagatgatttggaagtcatcggaaccgttgaactctatccgtgtaaactatggaaactagcaccagcaggtacgttggaggatatctatgaggagattacagataatcctagggttggaaaactgcgtctcgtagatacttatgaactggtaaaagaggttattgagaaattataaagatagatatatgaaaatgtaattataaaggtataactaaaatggatacagcaattcaaacatatatagaaactgtacaagtcaacgatataccgtggcatcggttaacgaccacctacggacgtgccacagatttccctgaggcgcttgatgtgttgtggaacatggaaagcattgaaactgttgatgcggctggtgaggcgttagaactcaatattgagcaccaatcaacgttgtggcatgcgacaccattcgcgatgattttcttgcttcgtatttttaagaaagctcaagaagcgagcgctcataatgcggtagcgcagtatttagcagaacaattggttgagttgtttactgtgattgctgagtgcattcgagatggtcttatgctagagcatgcagatccattgccgaactttgaggatatgctcaacgaagaatacctttggtctgaagaatatgatgaagacgaagacgttcttagatttgaggaagatgacgtattccctgatgatttattctttagcttttattattactccctgcaaatacttttgttagctattccgctattagatacatctgatgaaggagaggctaaattgctaggattaatttctgctaatgggagcgtgtaagatggactatttagatatattgcgaaatgatgccaagttagctgaagattttgatacgctgttcgattttcgcttgttagatgcgctagaggaacgcgatacggctgaaggtcgctgcacgttctctgtgccggggatggcatttgctgtagatggtgctggcggtgaatatcatctgttggaggacggctccataggatattggagtagcgagggtgctgctggccgtttagctgaaagtatggatgagttatttcatttaatagtttttagtatttgttggcatgattattgtgactctcgtaagtattctgatgtggtaacattagatacctatgctcagaataagcagttagatattatgtcctattcaccaatggaactttgggaacccattgcgaatgcttttaacatgtccatggagataaaattgactcctattttacagaaattctatgatgcggcgcatcgtgaaccggtatatacctgctatttccatgaagatgatggaagcgttacagaatcggaaaatttatttttctaatggttagaagaatttatgaaaggattaaattatgggactaattgctaattatagttgtttaagcgatgcgaatttaaaagagcttaaagctatggggtcagaagaagaggaaattcttgaaagcgttgaagagtggaatgacgatgatgaattattgctcgatatcgacaagatgtgggatgtacttcactttgtgctaactggcgtaggaacggaccataaggatgataataaccctcttagtcaagctgtgcttggtataacagctgttgaagaactatcggattacttagcgtataccgaacacgataagttagcagatatcgtggcggctctagaacagtttgacatggaagaggctcttgaatcttttgatatggcagcctgcaaagaggcagagttatatccagatatttgggattacgatgaggaagtggaagaaatcaaagacgagcttcttcatgatttcgaacaaatgaaacgcttctataaacaagtgctagacgctaatgggaacgtacttgtatcgatttgctaaggtcgttaaaatttgttggctatggatctagttatagccaaactgattatgtaactgttaaagatgaggaatccaagatggcagtgttaacggaaaagcaaattaaatatggctttgactactatcataaggatgacgcacggcctaaatctgtggtagaggtctctgaatatgatggtgaagacaagctgataatcaactgcacacagctcgatggagattattctgctaaagataagaagcgaatttggatggagtggtgtagttttttactagagaatccagatacttttacagagctaatgttttgcacaagaatgccacaggatttatttgatgcggtatgtactcaacggaaactcaaaaaattacatataaaatggggcgtctatccagatatttcaaaattagagaacttacaagaactagaatatttacacattggatccggtagaagtgtatcgagtttagagcccatatcaaaattagaaaaattagtggctctgtcgattgagaactttcaacagattgatgattatacgccattagcgtatctgaagcaccttgaaagtcttgctctagaaggtgattttgcggctcctaaaattcttcaggtgcaatcattgagatttctacgtcatatgaaacagctgcgattctttagcttcttgacagctaaagtgatggatacagactattctccaattttagaactccataatctagaacatcttacattaagatcttgtaaagaggttaaacagctgtatcctcaattagttaagttgccaaaactaaaatatggcacacttttagaacgaccagaattatatgagaaataaggcttgagatataagtcatgagctataacttataagacataaaagggaataatcataatggataaagctcgtaaaaaggaattgttaaaagcatatgcagataagcaaaagcaatcttttaaagatagtttacctatggacgaagaattattttggaatctctttgattatgtagacgagaaattagaggcaaatgatggttgcgaccatagtttgacttacaccagagaattcttggaaaaacaagaggtagatgtggaaagcgtactagagtggatcgtcaacgaaggtggcggctgtgactgcgaggttctctacaatgtagaggaacgttttgaagagtaccgttaatagtattttctatagttaattccttttatttacaagtgttaccataaaggtttatagtataggcatgtgatgtaattattcacatgcctattttctttataaggaggacgctatgcaacacgttcaaacccgcagtactacatccgcgttagtactcacagccgtattgattgccctcgctacattgcttacaatgtatacgaaaattccagtacctggcatacgcggctatttcaatgttggagatgtcgttatcatgacatccgctctactattaggtcgaaaatacggcgcctatattggtgctatcggcccagcgctagctgatttgttcctcggctacgcagtctttgtaccaatcacctttgtggtgaaaggcattgaaggctatcttgtcggtactgtctataacaataagacaactacctctgcattggtagcaactattgtaggtggtattgttatcgtagcaggctactttatcgccgaatacttcgtatttgatccaggcgtagctattgctggtgttttgactaatactattcaagccgttatgagtgtcattattagcatgattctctacgcaatcttgcgtaaacgattgggataggattactgattcataattcatatacaaattatgatataatttgtatatgaggaggtacttttatgggattattacgtgaaagtatccgaccatcgtcggatttaagaaataaatataatgaaatctctacagttttgaaaacaggagatgaagcttgtattatgacggtaaatggtcgtggtgatacggtatgtatgggatatgaaacctataataaattgaaagcacagatagaattattagaggctattgccttggcagaggaagatgaacgaaaaggtagaatggggcctattgaggatacttttgtcagcatagaacagttgttagctgaggcggaatagttatggaagacactgcttatcgtatcattattatggcgcaggccgatcaggcattgcatcatattgttctgcatgtaaagcaatctttttccaatgaaactgccaagtctgtttatcaagagattaaggatagaattcttttattagcggataatccttatatgggcatgattccaagacatactgttttacgtaataaaaactatcgtatgttgattattaataaaaatattattctatatcgtgtctttgatgatgaaaaagaagtgcgcatatataatatatttagtcaacggcaagattatttacaacttctgcaaggattgtagatgtttagttgatttggtatagatgaataaagggagactccgttgtgagtctccctttgttagttataaatagactaatatttagtaatagattttttgttgcggtcgttccttaattacagtatgtttcgttcttcaaagaccgctttcaccgtaaacagtgcgttcagcacgcgtggaaatcccgcataggggatgcagtgggtacagacctctacgatttgctcagacgcgataccgacgttgagagctgcatttgtgtgtactttcagctgcgcctcgcaaccgcccagtgttaacagggatgcgagcgtaattagttcccgttccttgaaatccaggttggggcgtgtgtagatgtcgccgaatagttcgaccaataaatcggctatggccggtgaaatctcatgaattgtgttatatacctcctcgccgtgtagcccatcaatctgttttaatgtgttcatgccgatgttaaaacgtgtttctttcataattattacctccgtctagatgtatgatatatgctcaagtatacttgaggtcaaggtggtgaaagtatgaaaatcggtgaattttcaaaattggtaggattgtccatttctacattgcgatattacgaggatcaagggttccttcatatcgagcgacagaacggcattcgcaattatcatgcggaggatgtggggtttgtacagtttattaaacgcctgaaagatatgggaatgccacttgcgaatatcaagcggtatgcggatttaaggtatgccggatctcatacggtccatgaaagagtgaccctgttgcaagaacattatcggtttattgaggccgaaattaaacgattggaaggctataagaataatctagaagataagttagagttgtatgaaaatcttttgaatcaagattacaaataattgacatacgtataaatacgtattaatatatatataaatcaaaaatataaaaggacggtgattaaagtttgaccacaccaaaagagttaatgaaggttttaacaaaggatggttggtatattgatagagttagaggttcacatcatatattaaaacatccaacaaaaaatgggcgagtgactatagcactacataaagaagatttaaaacctaaaacattacaaacaatcttgaagcaagcggggcttaaatagccccctatcaagataaaatggtggagttaagataatcacaagctgaatgtttagataggaggaaataatgagaaaggaaatgtacccagctgtatttagtacagacggtgaaaatggatatacggtaagttttccagatttattaggctgcgtaactgaaggtgatactttatgtgaagcggtagaaatggctgaagatgcactaggtatttatttatattcattgagtgaggatggcgaggaatttccaaaagcaagtaatccaatcgatattaaatgtaatgaaggggagtttatagatttagtaaaatgggacgaagaagagtatttaaaaagaacagataacaaggctgtaaaaaagactctcacaatcccaagctggttaaatcataaagcagaagagaaacaacttaatttttcacaaattttacaacgagctttaaagcaagaactagaactaatatagtataaatatttatggatgatgtgcttagattaattaaatctaaatttacgagcgtttcaaagaagggataaatgtataatactttcattatgtagtgaaaaaggggatctaaatggcaaatttacctaactgccctaagtgcggcgatgagtacacatacgaagacggtcatatgtttatctgccctatgtgtggcaatgaatggacagcggctgacgcacaagctgcagctgaagcaggtatcattcgcgatgctaacggcaacgagctagctgatggcgataccgttgttgttgtaaaagacctcaaagtaaaaggcgctggcgtattgaaacaaggtacgcgtgttaaaaacattcgccttatttctgatgcgagcgacggacacgatatcgattgcaaaatcgatggttttggtgcgatggcattgaaatctgaaatggttaagaaaatctaatcatggaatccctaccgatagaacgtcggtagggattttttcgtggtataatcaaggtataatgtgttacgtaaatttgtataattttgaggagcaattatgatatctcaggaggaattaaaggcgtgtacgtataatttattaaaggaacgaggcgttaccgttcaggacattgcagatattgtgatgatgattcaacaaccatatattcctgatttgacgatggacgagtgcgtagagagtgtacaggccgtacttgaaaaacgagaaacacaaaatgccattattacgggcatagaattggatagattggcggagcagaagaaattatctgagccactacaaagtatcatgactcgtgatgaagcgttgtttggtattgatgaaatcctcgctttatccattgtgaatttatacggatctattggatttacgaactatggttatattgataaggtaaaaccgggcattgttaaaaatctagatagtcaagttgatagtcactgcaatacgtttcttgatgatttagttggtgccgtggcggccgctgcagcaggtcgcattgcccataatacgccgaatcgggtgcaccatgtcgttgtggagggatagaacatgaacgttttagtcgtaattgatatgcaacatgattttgtggatggctctcttggttctccagaggctcaggccatcgtggataatgtacgtcaaaaaattgcatcctttgatggaccagttatttttacacgagatactcacgatactaattatcttgaaagccaagaaggtcagcatttgccagttgtgcattgtgtgaaagatacaattggttggcaaattatggagagcctcattacggctgcagaaaaacgcaataccatccatccgtactttatcattgataaacctaattttggatcctctgaattggttacgcgcttgcaaggtatgaatgcagcagagtctattgaaagcataaccttggtcggtgtttgtacagatgtgtgcgttgtgtcgaatgccatattgttgaaagctggcttgccagaggttcctattcatgtagattcaaagtgctgtgccggggttacaccagagtctcatgaagcagcattggctacgatgaaaatgtgtcagtgtgttattgattaataaaaaatttcctttccattgccattaaagggtatcgatcatattttatcgataccctttttcttgtatacaaagcaaactagttttattcaataggcggggatatattgacgattctctatatagatagtacaatatataaagaatgataatttatatcaattaaaaccataatatgaatatgttgcttgttgatgaacatgtatttggatgtaattaattgattgattctataataccgatgcaggtgcatcgaaacgctttcaccagaacgatacgtactgatacatatcgttccatgccctaaatttaaggaggactattatgaaacctttcgaactcgcaccattaccgtatgcttacgattatcttgaacctgttatcgacgcagagacaatgaaattgcatcatgataagcatcatcaagcgtatgttaataatttgaatgctgctatcgcgaaataccctgatctagcttatggctgtgtagactgtatcctcggcgatattgccaatgtgccagaagacatccgccaagcggttatcaacaacggtggcggtcacaagaaccacactatgttctgggaaatcatgacaaaaccagatacgtctaaattggaaggtcctttgaaggacgctatcgatgctgatttaggtggctatgatgcctttgttgaaagcttctcccaagcggcggctacacgttttggttccggttgggcttggctagtagttaataaggacggcaaactagaagtaacatctacggccaaccaagataaccctcttttggacggtaaaactgctattctttgcttagacgtttgggaacatgcatactacttgcactaccaaaaccgtcgcccagactatatcaaggaattcttccgcgttattaactggaacaaagtatctgaaaactatgaaaaagcattgaaacctcatcatcaataagatagctttaaattctctcaaaactagatatattttaatagataacggatagttgatatattctcctccatacttgactggggatgtattatctatccgttatttatatataaaaattttgatatttttagaaagaactttcaaaagtatagccatggatacagattttctaatcgatatcgtttatcataggggcataggttatgttagataaacctttcacagtatatattaccttgtatacacagtggtacgtatagagggctactcacataagtaatacacaatatttttgacacgaggtgatcaaaatggaaaagaaattagatttgtccaaatccgtatatgatttggtaaaagaatatcctgaagtaatagatattatgaagggcttagggttcagcgagatcactaataaagtgatgttgaactctgttggtaaaattatgaccatcccaaaaggggctaaaatgaagggcgtatccatgatcgatatcgtaggcgctttcatgaaagctggttttaccttggaaggtgaaatgccgaatctacaaggtgatgaagcagcatctgctaaggatgctcctgtagagactgctgctactcaagtagaggagcctaaagctagccaaaatacagaaactaatgaagaggatactgttacagatagcgaacgtgtagaacaattgaaaggtttcttaaaacgcttaggcacaggcgaagagcttggtgctgttcgtgaagactttgcgagccaattcaaacatgttgaggctagtgaaatcatgaaagctgaacaaggtcttatgcgtgaagggacacctctagaagaggtacaacaattatgtgaccttcactctgcgttgttccatggttccaccattcatgaacaaatggatgcagaacatgctaaggtagaagcggttctagaagctcaagaaaagagcaagagcgttgtggctttggtagaaactgtaggtcatccgttaaaccgattaacagaagaaaataaagcgctcgacgagttgattgaggctattcgtccaaaagtagcagacaaaactgccacttatgatgatgtgaatacagtgcgtcaactatctgttcactatgctaaaaaaggcgatttattatatccaaaattgaaagtggattatgcaatcggtggtccatccatggttatgtggactgttgatggcgatattcgcgaccaattaggtgatttagcaaaatctagccaaagtgtagatgattggtatagacgttttgacgagcttcttacacgtgctcaagaaatgatctacaaagaacaaaatatcttgttcccaatctgtgcagaaaacttcagcaaagaagattggtatcaaatttacaaagatacagcgcagtatgaagacatctttggtgtaacacgcattgcatggccagaggctgatgctgcattagctgcgcaaactacaaaaccaagtggtgataataatgctatcggtttaattggtggtacgttaactgtagaccaactagatgctatgctcaatacgatgccaatggaggtaaccttcgttgaccacgaagacatcaaccgttacttcaacgatggtgaaaaggtattcaaacgtcctactacagcaattggccgggacgtgtattcctgccatccaccaaaggtagaaccgattgtacgtggtattatcgactccttccgtaaaggtgaccgcgataatgtagccgtatggcttgaaaaacaaggtcgtccattctatgtaaactacatggctgtacgcgatcaaaacaataactatattggtacattagaactcgtacaagacatgcaatttgcaaaggaacatttcggtagatctaaataagaatatgtgacataacaaagactgccctagtattgaatgatgctaaggcagtctctttttatgggtgtatatattggatgatagtattggtagctattttgatattagctaggctcgtagccaagtttaagcgtacaaatgtggcgtagctttctcctccaaaccattcgccaaagcttggtgcgatgcggcatttattttcgaataagtcgtgcatatcttcagccttaacataggcaccaaaatcaatccatgctaaataggtgccatccatagggctgatacggagctcaggcaagacagatagcagttcgttacataaataatcgtagttttcacgaatgacagccagtacatctgtgagccatgcttccgcctctgggtgggtatatgccgcagcgatagccgtttctgcgataacatctgcatccgtgtggtacacttgcgccttataggcgttatattgatgtcgtaacgtctcgtttggaatcatcacttccgcctggtgcaggctagccatgttaaacgactttgatacagaggatagggtgattatgtgttctatatagccaccgttagatacggatagtgcggatgtaaacggtgtggaacctgtaataaggtcttgatggatttcatcgcttataatgagcacattgtactgcttacagatactaaatagtcggtttatttcttcttcggtccatacgtggcccacagggttatgcggattgcagtggatgaacagtttaacatcatgcttggtaatcgctgtttcaaaggcctcgtaatctacggtgtagcgattatcgtcactgcgtttcataggaatagcgatgatctggcgctgtgcatcgctagcgctcgtatcaaaggcgccgtacacaggacttagaacggcaatggcattatttggttttgtgaaagccccaatacaccacataatgcctgtaatgacatttggagcgctggtgagccagtctttagaaagtatacagttgtggcgccgcttataccaatctatgactgcttcaagatacttgggatttgtcatggtatagcctaaaggttgggctttcacatagttacaaatagcctcttgaatgcactgaggtgtcataaaatccatatcggccacccatagtggtaatagatcggtgcggctaaattttaagtgctcgccgtcccatttgcgagaatgggaaccgcggcgatcgatatagtatgttttagtaaagtctattgtgttcatagtgaacctctataagtgtatgttaatgtggtgggaattaattactctatctattatcagtatacatgcatagatatatatgtaaatatacctttaagaattgctgttacagtatcttttgtttctatgcaatccttgcatgaataggggctatattcgtatacaaaaggtgttagatttgcttgactgttgggacttttacaatttagaatatactatagaatagtgtgtgtctcaccagtgaccacactcgtatcgaatggttacaaatgataaattcttggccgtatatagtgggcgatgtttatatgtgagtttgcttcatcgaactatgccgctatatgggaaggctaatataagtatagtactggatcctgttaaggaggcatgtgccatgagtaatgaattaaaaccccttcattttgatgcggattacacgatggaggaggcgctcgctgaggcgaaacgctgtctaaactgtccaaaacctttgtgccgtatgggttgtcctattgaaaacgaaattcctcgttttatccaagccatcgcgcacggtaactttggtttagccaacgatatcttggcggaacgtacaaacttgccagctatctgtggtcgcgtgtgccctcgtgaaaatcaatgcgaaggtaactgtatcatgaataaggctaagaaaccgcctatcaacatcggcaaattggaacgttttgctgccgattttgaaagcatcaatgaattgcgcaaacctaagaaaattaaacaagatcttggcaaagtagccgttgttggttctggccctgcgggcttatccgttgcaggtgacgtagcgaaactaggttatgatgtaaccgtatttgaaggtcaatccgaaccaggtggcgtattattattcggtatcccagaattccgtttgtccaaatccgttgtacgccgtgaaatcgctcgtcttgaaggtttaggcgttaaattcgtatgtaatacatttatcggtcaagacaaatccctagatgatttattcgccgaaggatttgatactatcttcatcggtactggtacgcatattcctcaagaagtacgcatggaaaatgatgaagtacatggcgtattccaagcgatgtacctattaacaaatgtacaactcgtagaaaatggtgagcttgaagaaaaagcgattcctgtgaaaaaaggagaccgcgttgttatcatcggcggtggtaacgtagcgatggatgcggctcgtacatgtgtacgtttaggctgtgaatctgtcactgtagcataccgtcgtagccaagagcaaatgcctgcattattatccgaatacgaagaagcgcgtgctgaaggtgttcaattccaatggttcgcatctccagtgggcgtagaaggtacagataaggtagaaggctttaaatacgaagtgatggcacttaatgaagatggtgctggtatccatggtacaggtaaataccaagttatgcctgtagataaaatcatcatcgctgctggtcataaacctaatgcacgcctcgttggtgaaggcaataacctccgtgttgatgaaaaaggttatattcttacatccgaagaaccatacggcatgacaagccgtgaaggtgtattcgccggtggtgacgtagtacataaaccagccactgtagtactcgctatgcgcgaagctaaaaaagccgttgatggcatggttaaatacatggaaatcaaacgtgctatggctattgcagaagagaataaataagacttttatgtacaagaatatacatgtatgtatgtttaatcataattttataacataatatgaataaaaatcccttgcgatatgaatgtatcgcaagggattttctattatatgtcatcataattcaagttgctatggcccctcttaattggttgccgtattgtggaggcaaagagttgttattaaggatagtatagaaagtgaggtttctatgacgtatgatatcgtatgtagtgaaacacagtcagaaaaggctatccaacacttaggcgttctcattctcttatggcgccgccactatcatataactcaacaagagttagctaagcgaacgggattgttacagtcctatattagcggactggaaaaggggaatatagaccctcgtatatctactctgtgtaggatagtcaatggctttgataatatgcccttagatacattttttggaggccctgacttgggctttatcgactttcacggcatagaacatcgacatatagaatttcattaaaatcctaaatcctcgttgatgataataacctccatggtttgcatgttgcgcattttcttgtaataaatcgttaaggcattacaaatcctgtcaggcgaaccacagtcgtagcatttttcttctagcttggcacaaggattgagggaactttttttattttttttgctattcagtggtgccgccacattgcgcgcccgatagatggcagaggccaagtccggtgtaattttattgcgacctagcacaaagaatacctcttgtgatccgaatagagaggccgctacacggttgccagtgccgtcgatattcaccatctctcctgtttgtgaaagggcgtttaccgaggtgagaaatacatcgcgtcccatggtgcgtaacgcagtatcgcgaaaactttcaccaggaagaggtcgctgaatatctgttatgtcatcgttgacctgggataaagcatcatgaaccttgagttccaataaggtgcgtgaatcaccgatagccactcgtttatgttgaatgcgagactgtaaataggccactgcgtcagcgcctgtttcaaaataatggaccacgaagttgttgcgttctaaggctttgatggttttctctatatcgatgggggcatcgttgatttgaggattgataactgcattgattgttgtgtctgtgttggccataagtcctccaatattacatataaactagtgaggtaaacagtattttcgaagtaatataagataaagattattttctaagtaatacagtatttctattactagtattgtactgttttatgtggtggttattcaacataaagagaccctgtttttaggtaaaagaatgatactgatagtatagaatgttctttgtataaaacattggaatagaatccgtatttgaacactaaatagtaaaactttggaatgaaatccaattttatgataaaattaatataaagtcggaatggaatccaaagttattaggtagtcgatatgatatttgacaatactaataagagggttccatctatgagaacgtacatagatgaggaggcccttatgaaattaattcagcgccaaggatatctagattttttacgacgtaatcggaatcggtctattgttaaggttgtctctgggatacgtcgttgtgggaaatctacgttatttaggctatttaaggatgagctgttatcggaaggcattaaacctgaacagataatatccattaattttgaagaactagaatatgagcatttacgagagtatcatgtgctgtatcaatatattttagaacgtatgcagcctgatgaaatgaattatattttccttgatgaaattcagcacgttgatcagtttcatcgcgtcgtagatagcttgtttgtaaaagaaaatacagatttatatattacggggtccaatgcatactttatgtcatccgatatcgctacattactgactgggcgatatgtggaaattcagatgttaccactgtcctttagtgagttttaccatagcaaatacgatggtaatcagtactctttaattcctgcctatgagtcctatcttcgtgaaagctcattcccttatacgcaacaattagggggcgaagattttgatatacaagaatatctacgaggcctatacaataccttgttattacatgatgttgtagctcgactgaagattagtgatgttacaatcttacaagatattgtgagatatattatgtctaacataggtagtttgctttcacccaataagattgcaaattcgctcgttagcgccggtagaaaaatagataataaaacggtagaacgatatttacaaggcttgcaagatagcttgttgctatataaggtcaatcgttatgatgtgcgcggtaaagaattattgcgtataaatgcaaagtactactgtgtggatgcaacattacgtaatctattagttggcaacgcgagtcgtgatacaggacatattttagagaatatcgtttttctagaactcatacgtcgtggatatactgtatatgtaggccaattagctaagggtgaaattgactttgttgcacaaaaagcgggtgttacagaatactatcaggtaagcgaaactgtgttagattctaatacgctaaatcgtgagctcgcacctcttaaggccgtacaagaccaatatccaaagtttttacttacattggatgaattaaataaaaatgcaaattatgacggaattcaacaacgaaatgttttagaatggttgttagagagctattaaattgctataataatagtattgatatggcataagccaatgttaaggaggcaaaaatcgtggatttaattcaaaaattaaaagaccaagtaaaaccattaggtaaaaaaatcgtgttgccagaatacaaagatgaacgcgtattgaaagcaactgaaatcattttgaaagaaggtttcgtaacacctgtattagtaggtaacccagctgaaatcgcagaagctgctaaagctgttggcgtatctgtagaaggtgctgaaatcatcgatccagctaactacgatcgttaccaagaaatggttgatacattcgtagaattgcgcgctaaaaaaggtatgactcctgaaaaagctgacgcaactatgaaaggtgactgcttattcttcggtgctatgcttgttcgtcttggcgcagtagatggcatggttgctggttccggttgcccaactgcaaacgtattgcgtgctgcattacaagttgtaggtactaaaccaggtcttaaaactgtatcttcttccatgttcatgttcacaagcaaaaaagaatatggcgacgacggtatgctcgtattctccgactgcggcgtattgcctaacccaactagcgaacaattggctgatatcgcagaatccactgtagaaaaagctcgcaaagttgttggcatggctgaccctcgcgtatccatgttatccttctccacaaaaggttccgcttccactccagaagtagacaaagtggttgaagctgttaacatcttgaaagaacgcaacgttgacttcaaattcgacggcgaattacaattggacgcttccatcgttccttccgtagcagaaaagaaagctcctggctccaacgtagctggtaaagctaacatcttaattttccctgatcttcaagctgctaacattggttacaaattggtacaacgcttctccggcgctgacgctcttggcccattgattcaaggcttggctaaaccagttcatgacctttctcgtggctgctccgctcaagacgttgtagacgttgctgctatcgctgctgttgaaagcatctaatagctgcataatttcatatataaacatatgtcgtatatgttttgatatgctgaaagctggctctatgagccagcttttttgtgtgttaataggtttgtatattctctatcccgtagcttttatattagttgatgagtattctcaaatttgtagccactgcgacagacagaatctataatttagcttatagtttagttacaaagtaaattcgtttgggttacatcattggaggtatatcttatgagtgtaaatactatcaataaatctatgactgttgctgatgcagttaaagtcaatccagagttaatggacgtgttggcgaaggatggtatcgatttttgctgtggtggtggacatcccttggcagaagctatcgaggctaaaggtaaagatgtagatgaatacatcgctatgttgaatactgttcagcgagcacagaagtcctcacgcgcagaggtacttagctattccaaagagcaattaattgattacatcgttcacaactatcatcgagaacaattggatatgattgatgaaattgatcaaggcttggaaaagctcctcaatgtacactatgaccatcatggagcagagttgacagaaatctatcaaaccttcctttaattgaaatcagccctcgtgcctcattttcgtcatgaagaacatgtagattttccagaatttaaagcaggtaaacctgtagattttgatgaactccgtgctgaacacgaagccgcaggtgtgctcctagaatccttaagtgcattgactaatcattacactgcaccagcagatggctgtgctacctatgtgtatgtgtttaaaataatgaaagctttagaagaaggccttcatgagcatatattcttagagaactctgttttgtttgagatgccgtaagatgtaaatatggaatttgtataaatagataggaaaggtgtattattacattaagaacatttgatttaatcaacatacaaatgtagttatattcgagaccataaaaaggagagaattatgatttcagtatttgatacacatcctgttacttttgaagacaaaaatcgtaccttaacaattagttataatggtgtactctgcaaagatgcgaatggacaagtagtaactgacattgatttcgatgacgtaaatgagctatatcttacaagctatttgaactcaaatagtaattatacaattacgttcagagaccataattggaaaaatattaaagaccaagatttagatactgaccgtacagattataatactggccacaatattcgtgaaacaaaagcgattattgccgcctttgctcgtcataaattgacggcggaatttccagcaaatttagacactcttcaattgccattggattactcctacatgggtaaacgagaaattaccattaaaaacggtgttatctcgaatggtaaggtagatattcctattaatgaaattcgtcgtgtaatatgtgcctctaatggtacaattagtaaactattagtatataaagaagaaaaacctagttccttctttaaaaagatttttgacaaatgtgatatgaaaattacgttgaatgcgattacgttgccactattagaagctatcgtaacacgcaataccggccatggcatcgatttcactcgtggtaacggttttgatcaaaaggattccaactatatcattattcgctacctcgactctggattcttccttgataaggatggtacagcacctacagaatggcaaaagactgctgctgaaacaacagctaaatttaattacgatgtaaatcaacttatttaggtataaacttaatatataaataatagcctctatggattccttactggtgaaggcatgcccatagaggctgttttataactttaaatctactgcagagagagttgcgctagttttgcactgcggtgaagcgttgacgaccaaacttgtggttgttaatttcatctactaggatttgtgcaaatgtagcataggaaagataaggtttaccttctttgtttaagataacattttcattacctaatatataatcattagattctggaccttctgcatctaagattggtggtggggtaaacattgtccagtctacattgctgaatttacgcaagatatcgtcagatttagcatgagttttggaacgaactaggaattctggaggaaactctggtgtatcatttagttgaactgtgtgatcttcgtctacatagaggctacctgcaccacctatagcgatgaggcgtgtatttgtgttcgctaatgcttttacaattaataatgtcaaatctgctggtaaatgatacatatctggtgtgaaagcacttgtagcatttacgactacatcaaattgagttagttcttgttttgttaattgcaatgcgtcttttacgatagttggaatacctttaatcgcatctttgcggcgaacaacgcctgttacttgatgacctactttgagggctttttctacaatgcgatgacctgctttaccatttgcaccgatcactaaaatgttcatgttgtttctcctttttatataaagtgccaaacaatcaattctaagcctccaccgccttgacggcctatggcctaggcaaagtcgtttagaattaattgtttgtcacttctctaacatatgattagtgaatacgtgttcagctgatgacctcattatataggtgtgcatatattttgaatagtagaattattttagataggtactatcaaaagtaatagaattatgatatttactggataaaaatttttcaaaaagttttgtaccctaaaaaaagatactataaaatacttgcaatacaataaatttgtgatatgatttgaacaacgttatacacatagaaaaggagaactataatggcagagcaactcgtaaatgttcatgacttagttggcagatgtccctttgctacgagtcaaaagttattagctggtaaatggtctttattgatcatgcacgaattatctgaaggtcctgtgcgtttccgtgagttagagcgccgtttatatccaattacgcaagccacactcaccagagcacttcgccaaatggaggatgacggtttagttcatcgtgaagtatatggtactattccgcctaaggtagaatatagccttaccgaagtaggtgcgggatttaaaaccgttttagcatccctcgaacaatggggcaaccaatacattgactacatgaaagccgctggccgcatctaagaaatgccagcggcatttcttatcccttctccctaaactcaattcgtattctttattatacctaaattcggatagagttttatgtagacgaacctatgccctaaaaatcgactttggccctgtcccaaagggacagacccggccggtggagatttttagggcgtaggttcgtcatcttaaacggactaagccgaaatatggtataataaagaatatgaatgatataaattctcaatagtgtagaggtattgataacgatgttagatgtaacatttctcgcacacagtggcttcctcgtagatgatggcaagcgctgctatgtgtttgattattataaggatccaaacaatattgtttggcagttggcaaagcgtggccgtgagttgtggttttttattagtcacagtcatgcagatcattttaatccgtctattacggaatttgatggtcctcaaacgcgttatatttgccatcaagatgtacccttagagggtaaggtaagaaaatgtattaccatgagacctggccaagatgccaatcttgatgatgtaggtattcatatgtatggtagcaccgatgaaggcggttccttctatgtgaaaacagatgttgcgaatatcgattctgattccatttttcatgcgggtgaccttaattggtggcattggcttggcgatacgccggagaataatgcggacgcaaagcgcatggcttggcgtgaatttaaggaattagaaggcttatccgcagatgtggcgatgttccctgtagataatcgcttggaagatgctatggaatggggtgctattgaattcttacgtcgcgtacaggtgaaaaaggcgtttattcctatgcatctaaatggtccactatggacgccatccgtgtattttaaagctctttttggcgatgtccctgtgtgggaacctcaaaaagaaggcgatgaatgcatattttaagtgcccccacgcggtcactacgttatatggggagagtctatatacgtaattgagtaagttaggatcaagtgatgatgaaaactaaaccagtggcaaccacactgttgattgtcatggctatcatatttttaatttcataccctcataggcacgatgcactttgggcgtttatcatgcacgtttcgggggccgcgatgattggcggtttggcggattggtatgcagtgacagcgctctttacaaagcctttaggtattcctttcaaaacggctatcttgccgcgtagcaaagaacggttaatacagattggccggaccatgctcagcgaagaattacttcgggtgccacaaatgtactatgccatcaaacgagaacgcgttatggtgcgtatcatcgaatatggcatgagtgatgtagggcaaaaacagatgagagaactcttatacggcgttggcaatcaggtattatcccatatggatattgagccgatgcgtaaggagattaataaggctgtttataaaggggtatccaattggaaggccacacctctcgttattctattcggtcgttgcatgctggaacgccatacggctagcgtgttttggctttattttaatcgaacttgtcagcgtgttatcgcgtcaaatcaggtgtatccatatttgtatcgcgtcatgctagacattatgaaaacctatactaaggattcatttatgcgtgaactagccattgcctttggtggtgatgggctttcacctgaacgattagttgatacggtacagaaaaaagcagttcagtttttacaagacaacgaagatatcgattcgccattgggacgctatatatgggggcaggccatcagatttttcaataatttggaaactaatgaggaatggcaggctttcatcgaagaacataaggaccaatgggtgaaaatggtcctcgaagaatgggaaggcaagctcatcgatggggatacgctcgattgggtgcgcctcatggatattgtgctcgaacgatttaacgtgctcggcagtgaaatacttctaaatcctgagaaacaagcgccgtttgaacgattcttcttgttgcgtagcattccatggctacaaaaattgaaccctctcatcgatcgtgtagtgggcgaagaactatctcgttattcaccggacgagattacgcacattatacgcggtaaaatgtattatgatttacaaatggttcgtatcaatggctcacttgtgggggccgtcctcggcgggctgttctacggcgttaccctcctcattaagggggtgatcggatgatacgatatattaaatcgcttaccttgaaacagcgagccaatgggatctttggcttgatgttcgtgctctactgttttgtttttgtaggccagtttttctttggtgatgaaagctggtaccagccgctctattgggcagtacagtctgctcttatcggtagtgtagcggactggtttgccgtgaccgcattattccgtaaacctttaggatttccgtatcatacggctttgattcctcgcaataaggaacgcctgatcaatggtgtaattaagctggtggaaacgaagatgctaacgcgagatcgttgccaagtgctattaggcaaggtacaattcgtacctttatttgaaaaattcctactatctccagagggacagcgggccgcacgccttgtcattcatcaggggttacatttgttatggaaatctcaaacaactgaggaatgggcacagtggggggctaagcgcattcgtgcattgttagaaaaacattccctcgtacctgtgttaaagcatgtcttgctcgatttatgtgaacacaatcgctatgaaggcatggttgtacaggtcttgaatgtgattcaagagcgtattaaccatcctgctatggtcacctggcttacggccgtagttgcagaggaagcgcataagaaaaaacgaaagggcttcctttctgatttcttgatttccttgtccgaggccactgatgttgttaattatcgtgagatggcagaagccattgtaacagaggcgtatgctatgttggaaaactggaaacgccctaatagccctgagcggacagcatggcttcgtcagtgggtagagccgattcgccacatagaggaaaatcatgtggtctgcgatgctctcgatgaggcctgggaacgttggatacgagaacaagattgggaatctatcatcgagaaccatttatgtccatacgttgaggagttacttgttgaaggcgatgaaaatggcgaaacgccagctcaagttcttgtaaatatcgcccttgaactttggaatgtatatggtcaatctgaagatctttgcaatcgcattgaaactaccctccacgatattgcacggtacgtgctagaacaagggtatgatctcatcgaaaccatcatacgccaagtattaggcggacttagcaccgataaatttatctactttatcgagtctaaggtagaggatgacctcagctggattcgtattaatggtgccattgtaggtgccgtagctggccttgtggtatggagttttcttgagtacgtctatgtaccattattagctttactcggttaaacaccttgtctagtttacaagtaaattacagtatttacatatacgaaaataaaacacccttctatatgacgagtgcttctcgtagttgagacttgtcatatagaggggtgtttttatgtacaacgtattacattattctattaatgcttccgatagaggaagggtaatggagaaggtagtaaatacacctagctcactctttgccgtgattgtaccgtgatgtaaatgaacaaccttgtctacgaaatagaggcctaagcctataccgtgattagattttttgtttcgtgattgctctgtttgatacatacggttgaagatttgtgatagattatctgcctcgatgccaatcccgttatcggtaacctcaataatcaaatatagattattgcgcttggccgtgatattgatggtcgactttgtgaatttaatagcattgtcgataagattcgttacggcacgacgcaaggatacttcgtggcccgtaatgattaaatcactatcaatatcagcattgatgatgatatgcttttctgcacaaagtcgagtgtaatcatgtatcatgtttcttaacatggtacttacatccacaggggctacattcatttcatagttattttctaaccgtgctacatccaataattgcgatacgagggatgacatgaattttgcttgctctaaaatatgggtcaagccttcttgcatttcctctggtgttcgcgcatatttgatggcgtactcactttcagcttggataacggcaatcggtgtacgcaattcatgagatacgtcagaactgaattgcttttcccgattggatgaatcttcgaggccggataacatgcggttgaatgtggtcgtcaactcatagacctcatccttcgcgatttccggcaattcaatacgacgactcaagtcgttgtttttgccgataacctttgctgtgtgagtcagtttacgcaacggttttaggccttgttttatgaatagataaccaccgatagaagagatgagcaacgccaccaaattgacaagcaataaggcgtataggatatcgccgtttttatccgtaatcttttggctcgtaatagcccgtaagaaacctcggtaattcggtgcgttaataggaacatcgtaatagtaaaatgtcatgccattggcttcgatttcaccaacctgtccaagcgataaattcgattgatttgggaaaccatcaggtaaatagcctttcgtaattaatccatcttgtgtgtaaacgagatagaatgtgccatcttcataaggcttaaacttacgaatgtccgtagacatgatgagcgtttgttgttgtaatcgatctctgatttccgtgctgcgtgccgtgcccatatagttatagtagaaaatggacatggaaattagaagggtaatcagaaacaacgtataccacaacatgattttaaaggttagtggtatgcgattccacaggtgcttaaatgcaccggacatagaattaaggtcgtgaccttgttccttagttttctgttttgaggacatatcctactccacgaacggtttgaatcaatttcacattttcatccgtgtcaatctttttacgtaaatccttaatatatacatcaattagattagagtagctttcataatcgtattcccaaacatgatctagaatttgttgacgggacaaaacgatattttcgttgcttgctaaataatacaataaatcaaattctttagctgtcaatgtaatcgcttcgccatcgcgctttaccgtacgttgcggaacgttgattgtcaaaggaccaaccttgatatcattttgtgcatgacgtgcgttacgacgtgctaacgcatagatacgagctgttaattcttcaagatcaaaaggtttcacaaggtaatcatcggcccctgtattgagacctgtaaccttatcttgtaaggaatccttcgccgttaataataaaacaggtgttgtattaccttcgttacgcatttgagccaatgcgctaatgccatccaatacaggcatcatgatatccataacgatgacatcataactagatgtatttacataatcgatagcttgttgaccgttgaaacatgtatcgacagtcatattttcagcacgcaaatatttggccgtaataccattcagcatttcttcgtcttctacaagtaaaatcttcatatgtttgttctccttatgtatgattaaattatataactctctcttaatacaacttaattactaatcagatcccattttgtgaaagctgcaacacattagtaattaaattaatattaacatatttaagttatattatataactaatttatctattatcataccttatacaaacggaatgagtgaaaaatgaatgtaataaatggtaaaaccttatatattcatatatatatagcatgtaagcacccctatataagttttgcctagtgtaattagatttcgtaaaatgaagtatatcgaagattgctatttatgcatagataagagcgattttactgattttgaaagatgtacggaaaatcacaacaaaaacttatgataatagttatcaaaagtgaaaagtatactaaaatcgagaggttttaatatatataagccgtttaaattccgtgtgtttttagtaggaatttaaaaattttgataacaataaatgatcttattggggtggtatagtcggtaaaacatagtatttattggcctcatatggttatctataaagtaaaaaattcggaaccgaatcaatataaatgatatacataaaaataaatagaatttccatttaatataatcagaatgttcaagattcatctacaaaaatatgaaatgatatagagtatcaattaaaatcatcgaaattaattatgcataataaggtttagacatacggggcaatgctctctataattataagtaaagctataagaaaaatcgcacaagtgtgaggcttttctttaaggaaaaatgattaggttatcaaaaatttttataaggtttttgaatctagatagtctaagaaattttctttttataggtagttatgaggaggtcattatggaacagtttgatgttctagtagtaggtagcggtggcgctggtatgcgtgcggctcttgaagttggtcgtcgcaaaggcttaaatgtagcacttattactaaaattttcccaacccgttcagcaacagcaatggcgcaaggcggtgtcaatgcatgtttgaacaacgtagcagctgaagatacagttgaaacacatactttcgatacagtaaaaggttctgactatcttggtgaccaagatgcaatcgaattcttctgctctcgttgtccagaaggcgtacttgaaatggaccacatgggtgctcctttctctcgtactcaagaaaataaaattgcgcaacgtaacttcggcggtcaatcctatccacgtacttgctactctgcggataaaactggtcacgttattttgcacacaacttacgaacaatgcttgaaagaaggcgtacacttcttacaagaatggtaccttttagatcttgttaaatctgcagacggtcatgttggtggcgctgtagtttggaacatgaaagaaggtcgcgtagaacaaattaaagcgaaagctattatcttgtccactggtggtgcaggtcgtattttctggactcgtactacaaacccattcctttccacaggcgatggcatggcagcagctttccgtgctggtaacggcttgaaagatatggaaatgatccaattccatccaactggtcttggtcgtactggtatcttgatgtctgaagcggttcgtggtgaaggtggttaccttcttaactctgaaggcgaacgtttcatgaaaaaatatgcgccaaataaaatggaattggcatcccgtgacgttgtagcgaaagcaatcgaagatgaaatcgctgcaggtcgtggtttcggttctggtcttaatgcatacgtagtagctgaccttcgtcacttaggacctgaagttatcatcgaaaaacttcatggtatccgtgacttggcaatgtgcttcgaacactgcgatccattgactcaaccagtacctattcgtcctacatgtcactatacaatgggcggtatcgacgtagtagactacaaaacttgtgcatgtgaattgcctggtttgttcgcttccggcgaagcttcttgtatttccatccatggtgctaaccgcttaggtggtaactccttggcagacggcgtagtattcggtaaagtatccggtgctggtgcagctgactatgctgaaacacatgaacaacctaacgtagatgcagaattagctgcagctgcaaaagcttgggaagctaaattcactgaagtaacaactcgtgaaggcggtcgcccagttgtagaaatccgcgatgcattggctgatgcaatgtggaacaaagtaggtatcttccgtaatgaagatggtattactgaagcattaaaagaaatcgatcaattgatcgaagattacaaaacttgttatgtaggtgaccctgaacgtacttacaacatggcattcgtaaactattgtgaaatcggttctatgttaacagtagcaaaagctattgcaatgggcgctttacaccgtcgtgaatcccgtggcgctcatattcgtgaagatcatccaaaacgtaatgatgaaagatatttaaaacattctttgatcaaattaggcgcagacggtcaatacgaattaactgaacgcgacgtagtgttcactaaatacgaaccacaagaaaggaagtactaagatgagacaaatcacctatcatatccaccgttaccaacaaggtcgcgcgtttgtacaaactttcaaattcgattacgaacctgaccgtacaattctttggggccttcaaaaaattaaagatactcaagatccaacattaacattcttggcagcttgtcgttccgcagtttgtggcgcttgctccattcgtgtaaatggcgaagcaatgcttggttgtgaatctaaaattgatgaattgacagaacgttatggtacagatgaattaactatcgctcctatcggtaacttccgtgtaatccgcgacttagttgttgattgggaatctaaagttgatcgtttgaaaacagttgctccttggattttccttaaagcagaattcaacgaaggcgacaaaatcgttcgtcaaactccagctgatttcaaaaaattcgttgctggtacagaatgtattctttgcggttgctgcgcatctgaatgtaacaaattgactgcacgtcaagacgatttcttggaaccatatgtattcactaaagctaaccgtttcgtattggatagccgtgatgatgcacctatggctcacattcaacctgcttatgacaatggtctttggaaatgcgttcactgcatgaactgtatctcccgttgtcctaaacacttaaaacctgctcaagatatttccaacatgcgtaaagaagctacaaaagctggccttacaaacaacaaaggcgttcgccatgcagttgctttcaaagaagacctttacaaaactggtcgcttgaaagaagtttctatgagcttgaaatctgacggtgttgtagattccgctaaacaagcattctatgcattacgtttgtggaaacacagcaaaattaatcctttcgaacttgtagtacctcaaaaaccagttaatggtattgatggtgttcgcagacttatgaaagcagctgaggaggtaagcaaataatgaaatacgcatttttcccaggttgcgttcttgaaagcgctgccaaagaagattacatggcaactgttgcagtagctaaaaaactcggcatcgaactagaagaacttgacggttggacttgctgcggcgcatcccacgttcaagatatcgctccagaaattacattagctacaaacgcacgtaacattgcattggcagaagaaaaaggtttgaaccttttaactgtatgtaacacttgtactttgatgcttcgtgaagctaaaaatgaattagacaataacgaaaaagaaaaagaagaagtgaacaaaaaattagctcaaatcggtaaacaataccgcggtacaactgatatcactcatttcttatgggtattgatccgcgattacggtttggataaattgaaagaaaaagttgttaaacctttaacaggtttacgtgtagctgaatactatggttgccatattcttcgtcctcaaactgaaatgggcttcgaagattatcaaatgcctacatccttagcagatttaatctccgctatcggcgctacaccaatcgacttctcccgtaaacttgattgctgcggtttccatgctgtataccctgcacatgattccgtaatgcaaatgactggctccatcaacaaagatgcagctacagaaggcgcagattgcgtagtaactccttgcccactttgccaaatgcaacttgatatgttccaaaaagaagcaaaagaagttgttggcggtggcaaagatatgccaatcttgcacatgtcccaattagtaggtcttgctcttggcatcactcctgaagaaatgggcatgcctaaacgtcacttaactgatactgcagcagtgacaaaatttgtaggttaattcgttttaatttagattgcctcagttggcttataaaaacctaaattaaacctattatcataattaccgtaaagaccccctggccttggctagggggtctttatttgatacttatatggtgtttattatataataaaaaggtaagcattgacgacataaggaggtctcatgaacgaagccttattagaatatatagaccataaattgaatgatgaagaattgggacgcgtattcccaatcacctttcaaggcgatgagtatttcgtaaaacgcgccgtaggtaataatcgctcatcctggatcaaaccatcgcctcgcgcatcctttgaccatgaattttatatgatgaactttgtgcgtacacaattaccattagctccagaaattgtaggctttcgagaaaattacttcgtgacaccgaattatggcaaaaacctgacctattatggacatttgccacaggaacatccagaagatgcatccctagaggatatggctgttcatattttttatgcctttggtaaagcgctcggtacactccacgattacggcatcgctcacggtcgccctgcgctgcgagatatcgtatacaatccagatacggatagcgtaatgctcctcgattgggaaaacgcacgtcgctggcctgaattcacgcctgctggatgggacttacttatcttcatccacagctatatccgtgaaggtgacttgcctaatacctatctatatgcggctatgaatggctatagctctgcccgttgtgcacgggaaaccgtccttcatgtgaaagaagttttacgcaaacgagactatctatttaaattctgccgtttattggaaccattccactttgtagatacagaagcagccgtaaaatcctatgattttatacaaggacttaaaactgaataactgtgtatgactagttgataattgcgaaagcagaatactaaggatactgtaaatggccctctcgtatggtgagggtcattttattatggtaaaatagattgtatacacggtgatactttcaccagcatctgttagcattagaaaatcataagtccggtaaaggggagttatgacgaggtataacaattggaatatattatttcgtttatggaaacatatggctatgcagccatgtttatggcgatggttctggagaatgcaaatgtaccaattcctagtgaaattgtgcttggatttgcaggttatttgattgctcaagggatatttgatttgcatacgacaatggtcgttggtacattagctggtatcgttggatctattttatcgtattggatgggagaatatggcggtcgtccattgttattaaaatacggtaaatatgtattctttaatgaacataaatttgaactcgctgaaaagatgtttaataaatacggtggtgcagctatattctttggccgcttattaccgggtgttcgtacatttatttccttcccggctggtatggcgcgctatccattgtggcactttatcgtttggactgtgctcggtactattccttggacgattttactcgtatatttaggaaaagtgcttggggaaaactggaaagatcttattcagtataatcatgaatttttgctagttgtgattgttgtctttgccgttgtggctgccgtgcttggatttaaatactataagaatcgccgtaaatcataaggaggtcacaatgaaattgtctcgtttgacgcctgtgttgtttgttgtttggctggtattctttatggtagctaataatatactacctgtaaccgatccagtagaatcgaattatgcgttaactgctaaggaaatggtgttgtctggcaattggttatcgccacagatttatgggacatattggtatgacaaaccgattatgatttattggctgattgcattagcttttaaaatctttggcattgccgactgggtagttcgtttaccaagcgctatatttggtgccttgtcagtggcggccatgttccaatctttgcggaccttcagtcgacggtggctcgttggtttggtaggctcttctatccttggtacatctctcatgttctgggctgttgctcatggtgttatcaccgacatggtattgttgtatacaaccttgatggttatgatgtatgcgtacaaaggattgaatgaaaattccagtacggctatgatcgtagcttacgtattttccggattaggcgttttgacaaagggccctgtggcgctcgttttaccgggtttgattttgctcgtttacgttgcgctttgccgctcgaaacaaatgctgttccgtctctttgattggaaggggattttggccttttttgtcgtcgctatgccgtggtatgtttatatgtatagcgcccatggacaagcctttttggatggattcttaggccttaacaatgtaacacgtgcgactcagtctgaacatccggaagataatgtgtggtggtactatatcgctattttcctcggcgcttctttaccatggacgggcgctgttatttatggcatgataacgggctttaaacagcaccataagtggtacgtgtattgcatgtgttggggcgtgggtactgttctattctattccttgatggccactaagtatcctctatatacatttattagtcttgtacctttcagtattcttggtacattaggggctatgaaagctctgcgtccgggtcggcctcgttatgtcccatggattgtagtcggtcccacactattgttatggatcgcttatgtaggggcgtctttctttgcaccttggggctattatggattgctctatgttttggcaggcgtatccatattagggctgttatggttctggtggactcgccaacggtatcgtttgctgagcattgtcgtgattggaaccatgctcatttcatcgattgtagtactcgagggtttggtacctcttgttaaacaacgtagttctatcaatcttatccctgttgtagataagtataatggtgatgtgtattattacaatggatacagcacatctctcgtatattatactggacatgaggtggttcgtattaagggggacagcagtcgttgggatgataaggataaattaaaacatcgtagtgctgaatgggataagaaataccttatggaacaagtgacggaggacgagtttatcaagcgtttggctgaaggtaagcaaatcatggtcatcgttccaaaaggcgaaattaaccattttaaacagtctagtattgcaccatatgttggtgagtacagcgaggctggtagctctgagatttatattttgaataaacgacaagcttatattgaagaataatatattgttaatcgtgtttgtgaaagtagcatcaaccgctcaatgcggttgatgcttttttgcgtatataatcagaatatttaatgtatatattatgtcctaattactatttatattttttcagaaataaaacccattatagttatatgcattattgacatattaaaaacatattggtatagtaggttatataattttttaggacgaggtgttctgaaaccttatttcatctaggttttagaaaagtgcgaaaaaagacatgtgtcaaaaacgccccttgttatgaggtagaaagaggggaagttatgaagaagacatggtatctaatcatcggagtggttctcttggttattggctgcatagcctatggttatcatgaacactataaaccaaagacggcacaagaattaaagactgtacgcgtagcctatttaccaattacccatgcattaccagtatttgctacaaaagagctggaaacggcaaatggtcctgttcatgtagagcttgttaaatatgggtcttggccagagcttatggatgcgttaaatactggtaaggtagatgccgcagctgttcttgttgaacttggtgtaaaggctcgtgaacaaggcattgatgtccgtgctgctgcacttggtcatacagagggtaatattattatcgttaataaggatattaactccgttcaagacttaaaaggcaaatcctttgctatccctcataaacaatcaactcaaaaagttctcgtggattgcatgcttgaagaagcgggtctttctgaaaaagatgtacaaatcgtagaaatgagccctccagaaatgccatctgctctatcggtaggtcaaattgctgggtatagtgtagccgaaccatttggctctctagctcttgaaatgggaactgggaaggtcttcgaagatcctgaccatctctggcatgataatatttgctgtgccctcgtgtttaatggtcaattcgtcgatgaacatcatgacttggcaaaggctttcacaaaagcctatctcgatgcaggtacatatttagacgagcatccaaaggcacaagaggagatttcctcaaagtacatgaagtttaatgcctcagttattgaacgttccctcaaagtaattgggtttaaagatttagcccttacagaggaccgttataatgcacttgtgcatcacatgacacatattgatttaatcaaaaaagtgccgagttattcagagtttgtagatcaatcgttgttaccataggagggggaccatgaagaaatatacatatgtgctgggttcatttatcgcagcttggctaatttgggagttaatcgttcgcctcggcggttttaatgaagcgatattgccaacgccatataaggtattactcggatttggagaacttataggcgacggtgttctttttaaggatattgcagatagtttagtgcgtttctttatcggttatattatttccgttgtagccggcgtattcttcggccttatcttggggtggtacaagggaatttggaactacatcaatccaatcgttcaagtcattcgaccaatttctcctgtggcgtggttgccgtttatcgttctctttttcggtatcggtcaagcaccagctatcgttatcatctttatcgcagcattcttcccggtgctattgtccaccgtgtccgctattcaaaatattgaccctgtgtacatcaaagtagcgcgcaactttggtattaaacagccagaactgttatttaaaatcgtgttgcctgccgtattccctggtattgcatcgggtcttcacatcgcgcttggtacggcgtggatcttccttgtaacaggggaaatggtaggctcccaaacaggccttggcttcctcattatcgatatgagaaataacttgcgtaacgatctcttgatggtagccattttgaccatcggtttcgttgggcttttactcgattggggcgtgtccctcatcgaaaaatggatttacaaacgttggggtattgagaaataggaggtggcctcatgggttacatttcggtgcgcaatgcacacaaggaatttatgaaagatggggaaccactcaccattcttgaagatatcaacttagacattgaaaagggcgagtttatttgtctcttaggcccttctgggtccggtaaaagtacgctattaaacgctatagcgggctttgagctcgttacatctggttccattgctatcgacggtgaagaggtgaaagcgcctcaactcagatatgtaacggtatttcaaaactatggcttgttgccatggcgtacggtggaaagcaatattgagcttggtctcgaaagtaaaaaggtgcctaaagaagagcgtcctgctatcatcgacaaatacgttaaaatggtaggccttgaccatgcccgtaatcgctaccctgcagaactatctgggggcatgcaacaacgtgtatccatcgctcgtgcattagctgttgatcctgatattatcttcatggacgagccgttaggtgccctcgatgcattaacacgtatcaacttacaagacgaaatctctcgcatctgccgcgaagaaggcaaaactgttgtatttgttacccacgatattgaagaagccgtagtcctagcagaccgcgttgtggtactagcggcaaacccgggacgtgtacaaactatcatccctgtaaatatcatcgatagaaccgaccgcacatcggcatcctttgttaatattcgaaaccatatttttgaacaattccaattggcaaaagaagacaaaatcgagttctatatttagttgtatatacttgggtattttgtaatggacaaaattttaaaataaggtatactataagtagctaaagattgtaagtgctccactgagtgcacaaaagaaaccacctagggactacgacatacctaggtggtttttttatttatctgataacgttgataaaacgaggctcatcaccagttaaaataccaatcgagccatttgcaaatgagatagctaatcacacttgttagaattggtattagaaagattgtaaatactttatccactggtacacctcctttctgtacctgtttccccagaacggagtggtgacatcttgattgtagtacatataactatatatttcttatgcaattcgtgtaattatcatgtatagtagatatatatcggtaataacatataaattttaaattggaggctctatgtctttatttgagttagagaataccttgtcttttgatgaatatatagcaacctttgatacggagcgtgtggcgaaggtacacgattttgtagactggctcgctcagtatcaaggtggtttcgtccataatccttggggtgaggtaaatcctgatttagagattgttacagatggttttgatgcggctcaagtgcgtcgagataatttggtagcctatttattgccgcgattaggtcgagctaaggtctttgtagtggcagaggcagtaggatatcaaggcggacgttttagtggcattgctattacttgtgaaagaatgctattagataagcacaaaaccattcgtgcgaaggatgtaacgccgattcggttggaacgcactagttcgcctactagctctttattaaaaggaacacagcagaaggacggttttaacgaacctactgacactgtggtgtggagtgctatcgttgaaaaggggatagatccatatgatacgttgttgtggaatatattccccttccatcctcataaggatgataatccattgactaaccgtacacctacggatagagaacaacaactaggttgggagtatacaaaacgcttgttagatttacatatagaattaggcggcgtagaacctcttgtgctcgccgtaggccaaaaatctgcagatacaatgggaaaatttggattgtctgctattgggttgcgccaccctgcaaacggcggtgctaatctatatcgtcagggctttgcggaggctatagatacatacttaaaatagtaaacatttgagagtttttggagagatacttatgaaacgttattgtgatgcttgccatcaatattgtgatgaggcggctatgttttgtcctacatgtgggcagtatacggtggctacagaggtggagcgcattgcacctgaaggtgatgtaatttatcctttatcccattatcagcttagctataaggatacatatctctatgtgatgaataagttcatggatacggatggtcgcgcttcgcggagggaattcttacaatttctattgctgtggcatgtatgtatggttggtttgctcgcttttttctatgctataaccgctatatttcaaacgggaccgtatttaatcggtttaggtgggttcttaacggctatactatgtttagtatccttgcttccattagggtcgttatgtgtgcgccgacttcatgatacgggacgaggcagtatgagcttgttgctgttcctcctcccctttgtaggacctttgattttgttcgccttgttatgtcaaaaggggcagccacaggacaatcaatatggtagtgcattgcagcatatcgtcatagataaacggctagcttcaattatgaaagtatcccctacgagcagttcgttaacaacgagagttttaattgttgtgcttgtaagtatagtatgtatatttggattttctttacgaactatgggaccggaaaatgaagtattcccttcagggtggtttacaaatgccattgttggtgaaggcattgaagaggccgctcgtgcatcggtacaaggctattttgatgcggtaaataataagaattatgataaggctttcacgtatgtgatgaaccaagttaagacaaatccggtagaaaaacaaaaatggctcatagctatgcagcaaggtacaaaagtggatatggttaccttggatgtggcacggctgagtcgttcaggcagtttaaagcgtattgtatttgaagcagatttacaaactacaaaggctggcgaaggcatggtagaggctaaaccgatgaagcgatatatttctcttattgaagaaaatggtgcgtggcatattgaaggcttttacaaacatttgcctgatgatgataactaaatatgatgtataaacatggttagattttgtgcgattatcagctcaaattcgtacaggattaatggaatagcgttaacgtaagggttgtaagagtataatacatttgtgacaagtgaataaaaaatgagaaggaactctgttataatgaagttgcttaatccaaacattacaacaaaaggagttccttctcatgcattctattataactgaagaattaaggctctataataaatgttggggtgacaccactacggtgtcacttccaacattatttttttgcaaaaaataagcatataaggctcacatgctttacaataaaagtgtcaaagtcctaaagaaaggatgtgagcttatatgcctactactgattatactgaatttttacataatgtaaaacaagaatatattacaaatagctatgaattagacggaatatttatttttgacatagaattaccagcaacatcacatatttgcccaaagtgtggagaaaccacaaagcatattaaggattaccgcatacgtactgtaaagtttggaaaagtacaacgaggtccactaattggaaaatacagacagcgtcggtatatttgtccgcattgtggtcattcttttgctgaaagcaatccatttgtacgaaaacatatgcaactaagtgtaactaatattagaatgctatttgataaacttactgaaagtgtaacctatacagctattgctaacgagtgtgatacatctattactacagtattacgttattgctctatgatcactatacctaagcccaagaccttacccactgtgattggtattgatgagtttaaaggaaatgcagaaggctaccaataccaagttaatttaactaatccagatacacatgaaatattagatattttaccgaaacgtgatacgcaagcattaatccactattttgcatcatttaaacataaggatcgcctacaagttaagtttattgtaatggatatgtccatacaatttaagcgcatcatggaggcgctatttccacatgcgcatattatctgtgatcgataccatgtatgtcgacttgtagattgggcggtagagcgagttagaaagcgtgagcaacataaactggctgcttattcacgtatgttaaaacagaatcgacgtgtactaatgaagcatccagaccatttaacggaagccgaacatattaaactatgtgaaatactcagaatatctgatgatttacgaaaagcatatgctttaaaactttcttttagaaaaatcttttcaatctatggtaaacaaagaatagctgcacatttaacgcattggttggaattagtaaaagcatctggcttaaatgaatttaataacttctttacatcatttcctgcatggatgacgcaattaactaatgcattcttacttccatattctaatggatacacagaaggaactaacaacaaaattaaagtattaaaacggataagctatggacttcgccactttggtagatttagagtacgtattctacttttgagcaaaaagaatggcaccaaccataactatgattggtgccaaagaagactcgtagggtgaataccccaacatttgacagagagccagaattaagatttcgtaaacgagtatgtgaatatgctataaagtatggaaataatgctgaagctgcacgccgttatcatactagtagacaacaagtacaacgttgggtgaagcgtttcgacgggactatcgattcacttcgattgtatagtcgtaaaccacattctcatcctaatcaacacactgaggaagaactagcacttatcaagcgtatgcattctaagtttaaacatgaagggctgtctcaagtatatgttgaggcaaaaaagcgtggttataaacgctcatatggctctatgtgccgacaaataaggtgtcacattaaagagaaaaaggttgttaaatctgttccaaaaagcaagtggaaaccagatctagtaacatatccaggagaaaaggttcagattgatataaaatacgtacctcgcgagagtttagccttttcaacacaaggaaaatcttactatcaacttacagctattgatgagttttctagaaagagaattctaaaaattatagatgaaaaaagtgttactaatacaagtcggttcttattaaatttagaagccaaaatgggatttcctattcatacaatacaaacagataatggtcgtgaatttacaaactatagagtaaaagatcgagagtgtttatttgatattgtattaaaaagattagaaatagagcataaaacgacaagaccattttctccgtggcagaatggaaaggtagagcgcagtcatcgaattgatagtgagagattttattctcgtaagtttaatagtatggagagttttctaaaagcacatagtcgatatgctaatagatataataacattgcacaaaaagtcttaaactttaaatcaccaaaccaagttataacagagtactttatgaatcaaaaggcataggtatttgtcacaaatgtttgattactctagaaatggaatagcgttaacgtaagggtcctcttttgttaacgctatttttatgttacaataatagtaacgtatgaaagtgaggctttcatcagaacgatcggattataatgaacattaaacggtaacgaagagaacgtaacgtcgcggctgacgcgtttaatggtacactatactcatttgcacgaggcgaatggacaaaaggacttgaacggtaacaattgagttgcgctatttttgcgcccatttgaaagacgctgctggatagcgcctttttcgtttgtccgttcctctgtaaagatcaaattttaatgataggtgaaaatatatgttaaacaaattaatgaacaaaattttaggaggaactgtgaatacaacagataatcaacatactgcacaagtgactgcagtagagacggctccgtctgctcaaggtgagcaaaaaacaacgcgccgtcgtaccaacacacgtcgatctgtaggagaacaccgcaatacagacggtcgtcgcactggtgaacgccgtcatacaggcgaagctagtcaaaatggcgaaggccgtcaacgacgtacgacacatacaagaacaaatacacgtcgtcaacgtccagcagcagagcaaggtgaacaacaaggtacagaacgtaaacctcgccaacctcgtcaaacccgtacaactcgaagcggtgaaaatacacatcgtactgaacgaaatggcgagaatactcgtaatacaagaaatacacgtaatacgcgtacacgtaatacgaatgataataatcgtaatgaaaatactaacaaccgtcgtacgcgcactaacaaccgtccgatgactcgcaaccaagaggttcaatctgatttaattggtcgtcaaccagcgggctctaataagggtaaatttcaaattatccctcttggtggccttggtgaaatcggtaaaaatatgaccatcttccaatacgaggatgaaattatcgttcttgacgcaggtcttgcgttccctagtgaagatatgcttggcgtagatatcgttattcctgatatgagctatatcattgagaataaggaccgcgtgaaagcagttgttattacccatggtcatgaggaccatatcggttccttagcgtaccttatgaaggaaattaactgccctgtatatgctacaaatcttgtttgtggcttgattgaaggtaagtttaaagagcataaagtatctccaaaatgccttcgcacgattgcagcaggcgatgaagtgcaaatcggtcaagtgaaggttggttttatccaaactaatcattctattcctgactccgttgcggtgtacttcgatacacctatcggtactgtactccatacaggggactttaaaatcgaccaaacaccagttgatggcaaattgatggatattcataaatttgcagaacttggcaacaagggcgtactagcattgatgtccgattctacaaatgtagaaaaacctggttttactggttctgaaagctccgttggacctgctattaaacaagctgtaggtgctgcaaaaggccgcgttgtattggctacattcgcatctaacgtatctcgtatccaacaagcaatcgatgcggcggttatgttcaaccgtaaggttgtcgttatgggtcgcagcatggtaaatgttacagaaatcgcacaagaacgcggttatttgaatattccaccaaatacgattatcgatgtagatgtaatgcacaactatacagatgaccaaatcatgattttaacaactggttctcaaggtgaaccgatggcgggcttatcccgtatggctacaagcaatcaccgcactgtagaattggcaccaaatgatactgttattatctctgctacaccaattccaggcaatgaaggtgctgttggtagaactatcgataacttacttcgtctaggttgccatgttgtatatggcaaagatcgtggcatccacgtatctggtcatgcgagccaagaagagcttaaaaccatgctcaaccttgtgcgtccagaatacttcatcccggttcatggtgagtaccgtatgttacgtcgtcatggtgaacttggtgtggctatgggcgtagaccctaagaaggtcctcatcggcgataatggtcaaatctttgaatttgataaagacggtggccgtaaaggtggccgtgtacaagcgggtgctatcttcgttgatggccttggtgttggcgatgttggtaatatcgttattcgcgatcgtcaacaattggcacaagaaggtatggttatcgttgttatggccatggatactgcttccggtaccatcattacaggcccagatctcgtatctcgtggcttcgtatatgtacgtgatgcagaagaacttatgcttgaagcggaacgtcgcgttcatcaagtattagatgattgcgaagcacaacgtatcaaggactggactacaattaaacaaaacgttcgcgatgcattgggcaaattcttctatgacaaaacacgtcgtagacctatgattttaccaatcatccaagacgtacactaaataaaatatccctctcaagcagaatgccgtgattacatggcgaacagtcttgagagggatatctttattattttgagacaccataagtagcgtagttgctgtaattgtctactatatagggtatttgaagttacttctttaaactgctataattaaaagataactagtatccttttagtgttgaatggagtattatgaaacaaacaaatacaagagctatggtggaaacggcgtttttagcggccatcgtagttgtattaaccgttataggcgctagtcttcctgttttatccctgttagctactatcgtagctcctgcggcgattgctacagtagggatcaggtggggcgttcgttatagctgctctgcggctgtagtagcctttgtcattgtttccattttattgggaccattgacagctgtaggaacaatcttgatgtatgcagtaccaagcatttttattggactcggttttcgtaaacgttggtcccctttaaaattaatcttggtgcctacgctagcattagcggtgactactattattacgctcttagcatcaatgtctattatgtctgttgatttacagacatctattcaaaatattggtgatgaagtacaaaatgcatttatagacaccgtgaaacaacaatcgctgccaccagaacagacagagctttatatacaacaaatacaagcgagcttagtacagattaaaaggatgcttatcacttatgcgttttgtgcgtttgctgttacgtcttatatcttggcacggtttacagcatacattgcaaaacgtactaataatcctgtacaaccattgcctgctatttcaacctggcaaatacctgtttggacggctggtgtattggctgtaggtcttattattatttatggctcatcctttgttggtatcaataatgagctgcttacaactgttggtatgaacattgctttatttggcgcctttgcttgtggccttaacggtatcgcttctttgcttggcgttttagaaggttatggtgtatcaagggtattaaaatttgttattatagctcttttatatgtcatgatgccaatatctctagtaacgtttggtgttatggatatgtttttagatttacgatctcgtttcaatcaacgaggttattaatagaaaggaggttactatgaaatcctttcaacgaagatgggaagcaatggaatggaccattattggtgtcatcgttctattaatcttaatcatcgcttatttaaattggttattagccatattatcagtcatcgtggtggttgctgtatacttgattaattacaataccatccacaatcgtcgtcgcttagcacgcgaacaatttggtgctatgatgaagaatgtgacgcaggcggctaactttgcattacaaaacttaccgaccgctattgtacttgtcaataagcaaggtacattggtatggaataatagtgtatttgccgattgggttccggtggactggaataaattgcagaaaatgtccgctttgattcctggatttagaattgataagatttggggcaaatcggggttcttgaaagagcaatacggggagcgctatttccaagtggtatacaagttcatcgaccctcgcgatacaagacctgacgcggatcctaatgatgaattaacggaacatgcggttatggctttgtattttaaggatattacagccattgaaaaggaacgtattaaggcgcaagaagaacagcctgtatggggcatgattcaaatcgataatatcgaagaattgacgaagggtctcagcgatagagaatatacaaatctatgggcggaaatcaataatatcgtcgttgatgaaatcgataaacacgaagggttcattcgaaatttccaagatgatatgtacacatttgccatttctcggggcgctttgcaagacatggaaaacgatggttttcgtgtgcttgaacgtattcgtaaattaccgtctcctcgtcaagtacctgctacgattagtattgggattggtgaaaatactggttctgttaaggatgtatctgaacgtgctagagcagctcttgatattgcattaggacgcggtggcgatcaggtttgtattatggatggtgaaagcacccgcttcttcggaggcaatacagcaggtgttgaaaaaaatacgcgcgttcgtgctcgtgtggttagtcaagccattcatgaattgatgaatgattctgacaaaatccttgttatgggtcatcaacgtgaggactatgatgcattaggcggtgctattggcgtcgtatcaattgcacgtactcttggtaaagaggtgcgattagtactttcaaaagaaacaaatgctatcgataaaatggtacatgttcttgtggaagacgaattttggaagactcatattttaacgcctgcagaagctaaattatgggctgatgcgaatacattggctatcgtttgtgatacgcatagaaccccaatggtagcagctccagaggctctcgaggtatctgaacgacgcattgttatcgatcatcatcgtcgagctgcagattttgtcgaaaatccattgcttacgtatttagaacctgctgcctcatctacaagcgagctagttacagagctagttcaatatgcaggcgttcctgtgaagctttcaaaagcggaagccacaggtatctatgcaggtatcgtattagatacgaagaatttttatcagcaaactggagcacgtacttttgaagcggcagcattcttgcgccgtgcaggggcggatattgaacgggttaaacaattatttattgaaaccttcgattctatccaattgcgtgctaaaatggtatttgaagccagtcgtaccgaagggattgctatttctgtagcacctgaaggtttgaaggatatgatggcattggctgcacaaagtgcggatatgctcatcagtaatgaagatattgaagcggcctttgtgctttacccattgaacgacggcggtatcggcgtcagcgctcgatctaagggcaaggtaaatgtacaagttgtaatggaatccttgggtggtggcggtcacagaacagtggctggtgcccaactacaaggtatgacgatagaggaagcgaaggcagctattctagataaagcgctagaagcccttcattccgctgaaaaagaggaggaataataatgaaagtagtattgttagaagacgtaaaaaaagttggtaaaaaaggcgaaatcgttgaagtaagtgacgcatatggccgtaatgtattgattaaaaaaggccttggtcttgaaggtacagcaactaacgtaaataatgcgaaacaaaagcaagaatccattgcacataacaaagcggtagcaaatgatgaagcaaaaatcttggcagctcaattgactaaggttgaagttactgttaaggttcgcatgggtgaagaaggccgcgtattcggttctgttactgctaaagatatttccgatgcagcgaaagctcaatacaaggtagatatcgacaaaaagaaaatcgaaattaaagaaccgttgaaaacattaggtgttcatgatgtagtggttcgtgtacatccagaaattacgagcactatcaaggttaacgtagtcgctgaataattttcgaatcaccatgctcacagagtgtggtgattctttttgtgcatagaagaggcgtgacgcacgctttcatagggaagatactcatattctagttaaggggagaaggacatggacgtacgcataccaccgcataatgaggacgcggaaaaggccgtattaggggcgttgctaaccgatggctcatcatctggcgaagccgttgatttggtaacaagtatcgtagatcgtgatgatttttatcgtgatacgcatcggattatttatgatgctattttaaatcttgtaaaaagtaacaagacggtagatttcattacgttaagtgaagaactagaacgacgtaaaaaattggataccgtaggtggcattgcttatattacatctcttgcgaatgaagcgacaggctataatattgaagagcatgcgcgcattattgtagaaaaagcacaaatgcgccgtctcatagatgcaggtaataagattgtcggtatgacttatgctggcgaggatgaaccatccgtcattatgaataaggcggaacaactcgttcttgatgtagggggtcaaacacaatcagaatcgacgttttcacccattggtgatgtagttcttacgaatattgatagacttagtaaactgcaacagcataagggttctattacaggtgtaccaactgggtttagagatttagacttcaagttaaatggtttgcaacggtcggaccttattctcgtggcggctcgtcctgccatgggtaagaccgctttcaccttgaatatcgctcaaaatgtagcgatggggattaagaggaccgtagcattcttctctctagaaatgtccaaggaacagttggtaggacgtattttgtcctccgtggccggcattgaatcagataagttgcgcaaggctgacatggaccctaatgattggggtaaggtgatggccgcggcggatgagatgagtcaagccagcctgtttatcgatgatacgccaggacttacggtgcaggatatgcgcgctaagttacgccgcctcaaggtagaacatggtcttgatcttgttatcgtcgattatattcagcttatgcaaggccgtagctccggtaagggcagtgaaaatcgacaacaagaggtatctgaaatctctcgtaacctaaaactgattgctcgtgaatttaatgtgcctgttattgctttgtctcagttgtctcgtagtgttgaaagccgcccagataagcggccagtattatctgaccttcgtgaatctggttcccttgaacaagatgcggatatcgttatcttcttgtatcgcgataaatattacgatgaaaactctgaaatgggtgatgaggcggaggttcttatccgtaaacaccgtaatggtgcagtggggacggtaagcctcttatttaagggcgaattaacgcgattcctcgatacggtagataataacaaagttggtccagaacaataaatgaatgaactcggtgttgtatatacgtaacaccaaagaattttaaagcacataaggtatctatgattagaaactatatctaatgatagataccttttttatgtgcaaaatcatctacataatagcaaacatacgtttgaaaatactgcgtatttttgttatactaatgatagaaattatgaggatactaattttgtgaaagtcgatccattagcgttttaaggaggtgttggtatgggttcagctgatacaaatcggatgtatatatgtattgatttaaagagcttttacgcatctgtagaatgtgccgatttaggtgtggatccctttacaacaccgttagtggtggccgataattcgcgcggtaagggagcgattacattggccatctctccagcgcttaaaaagctaggcgttaaaaacaggtctcgcttatttcagattccttcacatattgaatacattacggtaaagcctcatatgaaacgatatatgcaggcgtcggcgcagatttatgggacgctactaagttacatatcccctgaggatattcatgtgtattctattgatgaatactttatagacatcacgccatatacgaatttgtacaagaaaacgcctcgtcagttggctcaactcctgcttgatgcggtgctcgacgctactcatatttacgctactgttggcattgggactaatttattcctcgctaaaattgcccttgatatactggcgaagcatgcgccggattttatcgggtatcttgatgaaaacctttttaaagagcaaatttggcatcatcagccgattacggatatttggcaagtcggcagcggtatcgccaatcgtttgcgtaaatttggtgcctttgatttgcatggcattacccaagtaccggaacataaactgtataaggaatttggtgtgaacgcggagctgttaatcgatcatgcgtggggtcgtgagagctgcactattgccgatattcacgcctatagaccgtctaaacattccctttcacaaagccaaattctattgcgcaattatacggctgatgaggcgcgattgcccatgcgtgaaatggtagagtccttagttcttgaactattacagattaaggcggttacaaaatgtattcatgttcacatcggctatgcagcagaggatgtaaagtccactggtggatccaggaccttagcgcattatacggactcatttcaagagttatgtccagctgtactagccttgttcgataaatataaacggcctcatgagttaatacgacgcattgccgttagctttgaagatttagttaataaggccactgtaccgactgaaatggacctatttagtaatgccttaacggatacagcagagcaagaggaacatatacagaaaaccatgctgaatattaaaggacgttttggtaaaaatgctatccttcgtgcatctagcttgcaagaagaagggaccatgcagtttagaaatacattggtaggcggtcataatggagagtagattttataataggaattgatgtattgcgtgagggaaggtatacattcatgaaacatcggatgtcgcgcttgcaacgggctaaacaatttatgccttttgcggcgttaaagggatttgaaacattgctggcagccgtagcacggcctaaggaggttcgtgtagagttatctgaggaccaactagaggaactaaatcgtacaatccaatcattgacagacgggaattttgtgcgagtcctatattacaacggtcattgttatacggaactagtgggtgctatagagctgataaacaagacggctcatactatgtctatagaggggattgtcattacctttaaagatataaaagaaatcaatctttatgaatgaaaatagtaaatactataatgtaagaatatagaattagcccatgcgtataggtgatacgtatgggctgttttacatcttattaattttgataatttttcttgacatatagtatagattctattaaaataatatatgaacgaacattcatatgttgctttaattcatataggatgaaagctttctgtgctttcaaatatagataaaggagatatcatggaagaaacattacttctaaagaatttaaactgtccgaactgtggagcgaaaatcgaagatcgtatccgtaaaatggatgtggtagaaacagctaactttacacttgctacccatcaattaaaattaactgggtcttgggaggaccgtgaggctcttaagcgtgacattcaagatatctgtgatgctatcgaagagggcgtaacagtagctgattacgaacgtaaatctaaagcggctgtggatgatggccgtgaaaacaatcaggacaatgactctgtaacaattgcagttatcgtagtaggtctattatttatgatctatgatgcattgacttcctttgttccatccatcggattgccagaatctattgaaactccgatttactacgttgcttatgtactccttgcatttcctgtattgcgtacagcagcgcgtaatatcttaaagggtgaaatatttgatgaaaacttcttgatgtccatcgctacattaggtgccatcgctatcgatgcattgcctgaagcggttggtgttattttattctaccgtatcggtgaattctttgaagaaaaagcaacagatcgtagccgtacagaaatcatgaatgctgtagatatgcgtcctcaagaggtgcgcgtcatagatacatgcggcggtggcgaaattgtagttatgtcccctgaaaaggttgaggtgggctggactattgaagttcgtcctggcgatttgattcctctagacggtacgattcttgaaggtgaaactcgcgtcaatacggctcctgtaaccggcgaaccagtacctgttcgcgcagaaccaggtacacaattgatgtctggctgcatcaatgaaactggacgtattacgatgcgcgtcgataaggttctagaagaatccatggttactaaaattcttgatgctgttgaaaatgcagctgcatcaaaacctaaaatcgataaattcattacgcgctttgctcgtgtatatactccaatcgtagtagcccttgcccttgctgttgcgattattccatccctcattactggcgaatggcatagatggatttatacagccttaacattccttgttatttcttgtccatgtgcattggtgctaagcgtgccacttgcattcttctccggtattggtaacgcatccaaacatggcatcttgcttaaaggtggtcgtgttatcgaagcattggctaatgtgaaagcagtagctcttgataaaacaggtactattacatctggtgagttcaaagttcacaacgtagaaactgtaggctcccatgtaagttctggtcaattattatccatggcggcagctatcgaagctgtatctacacatccaatagcaacaagcattgtttctgaagcaaaagatcaaggccttacagtggaaccttccgatttcgttcaggaattagctggcgaaggcatggtaggtatggcagatggtcaacaagtacttgttggtaaccgtcgccttatggaacgctatgatgtacaaggctatccaacagaacctgctgaatacggtacagaagttcttgtagccgaaggtaatacataccttggccgtattatcatcgccgatgaagctcgtccagattctgctgaagcgattgctgatcttaatcgtcaagatattaaaactgttatgcttactggtgatgctgaagcaagcgctaactatatcgccaaagaaacgggtgtaagcgcagtacgtgctcaactattgcctcaagataaattatccgttgttcaagatattcgctctgaatatggtcctaccatgttcgtaggcgatggcatcaatgatgcgccagttcttgctggtgctgacgtaggtggtgcgatgggtagcggcgctgatgcggctatcgaagcggccgacgttgtgttcatgcgtccatctttgaccgctattgcacatattcttgatttgtccaaatcaacattgcgcgtggcttggcaaaacgttgtattcgccattgctgttaaaatccttatcatgttgcttggcatcctaggctatgcatccatgtggtgggctgtatttggcgatacaggcgtatccatcctttgtatcttaaactctgtccgcatcttgagtagaaaataatactgatagataataaactgctcctacattgtattaggcaatgaggagcagtttttctatgtaaaactttcacaagagaattgaatagtacacctaaatagtatataattttaaagatgagatacagtattttcgctcggaaggagggataacatgatcacggtgtacaagcacatagaagaagaattagtagccgattacacggtatcagatgccacaaaaggttcatgggtaaatttggtgaacccagaccccgatgagttatcccttatcaatatcctgacggaaattcctacagacgtattaaagaccgctctcgatatggaagaacgttctcacgtggagttagaggacaattatatctttgttgttatcaacattcctgttgttcgcggcaatgatatgtacgatacggtgccacttggtatctttttgacgccagatttctttattaccatctgtttagaagaatctgaagtgctctatccgtttatttctaatcagatttctacgttctatacgtataaaaagacccgtttcttgttccaaattttgtatcgcacggcgaccatgttcttgcgttacttgcaacaaatcaaccgtcgtaccgacgatattgaagtccaattgcgtcatactacaaagaacaaggacttcttccaattgttggaattacagaaatccatgacatacttcacgtccgccttgcgtaccaatggtaccgttatggaacgtttattgcgcttgcgtggtcacagttcctataaacatcttctcaagatgtatgaggaagatgaggatctattagaggacgttatcatcgagaataaacaggccatagaaatggttgaaatgtattctaatatcttgatgaacatgatgaacgcctttacatccatcatttcaaacaaccttaatatggttatgaaaatgttggcagccttgacgattaccttggccgtaccgaccattatctttagcttgtgggggaccaacgtgccattgccgtttcaaaacgatgaaaatggtttcttcgaggttgtgggcatctccgtggcctgttccatcgtggccatcattggcatgtggaaaaaagatcttttctaagataataactataatagatatgctgaaagctggctttaggccagcttttttgtctctaatataagtagttctacatgagagatatctgaggttacctctattcaattgttgcacacttcaatacaaatctgctataatataccattatggagaggtgtccgagtggtttaaggagctggtcttgaaaaccagtgactccgcaaggggccgtgggttcgaatcccaccctctccgccattcaattttatacttatagtatcaaaagcagtactactagacgtatgattggccgcttggctattgccactctgtgccttaacgttagtagtactgcttttttgtatgctttattaatagataaccttaacttttgggttataggacaaaaagtgttgctcttaatgccgatggaactagttaaatactagctccatcggcattttatcttttgagtaacttttacatataggacaaaaagtgttgctaaaaagtctgaaaccccttgattttactgactcaaataaggttttatctttctaaagagatatattttttagaaggagtataattatgaaactagtcagatgccctaattgtggtttcgtttgtaagagaaatggtaaaacaaatgcgggttctcaacgttggtattgtaatcaatgttcttgctcattcacaaataaagtgaataaaactaacaataatttacagatatttttggattggttatttggtaaacacacacagttagatatggctggcgatggacgttcatttcgtagaaaaacatcacagttttgggagctttggccattaccaccaaaagttgaatcatcaagtagtgtggtatttgttgatggtatttatttagctagaaatgcttgtattttaatctgttgtaatgagacgcatgtcttaggctggtatgtttgtagatatgagcattctaaggcttgggaggctttattacgacgtatttcatcacctatagtagttatatccgatggtggtaccggctttcaaaaggcattaaaaaaagtttggccgaaagccaaactacaaaggtgcttatttcatgcatttcaacaagtaaaacgctatacaacaatacgtcctaaaacgattgctggttgtgagttatatggaattgcaagggatttattaacaatacacacgcaagatcatgctatgaagtgggtacaaaacgttatgtcatggaaagtacgacatagggtattcctatcagaaataacagttgatgaaaacggtacgatacgacctaaacatgaacgacttataaaagcagaaaattccttagttaaattgattaacaaaagatgtttatttacttacttagatgcatcgttaacatgtacctgcccagctactaataatcgtatagaaggtggtgtaaatgctcagttacgcactatgttacgtaatcatagaggaatgtctattgaaagacgaataaaagcggtgttctggtggtgctatatgcactcaccaaacccgctttctaatgcagaaatacttaaggttatgccgaccaacaagagtatttctgatatatatcataccatacatgaacaatctaggttagaagcttctattccgacttggggtgatgctattgtttggagtgatttgcataattatgatcgcctatttaccaatctttgggactaaaatagcaacactttttgtcctataaccctaacttttcttaaccgcttaatgcggtatgttttgatgtaacagtaatgtagcattgatgtaatttctttctgtgctatactatgagtgttacttccctagactggtaacagaaagggggttaggctgtgttagagttattcatatccttaattgtatctatcatagcaggtgtaacttgtcactacatttgcaagtggctagatagatacttcagcaagtaactagcacatataaaaaagacggtattcgcagtaccgtcttttttcttttgcgttaagcaatgttagttattcatttccttagtcaattattatagtacatcggatacttaattttgtaaagtattagatattcactcattatgtttgaaaaactctttctatttatagtatgatagctctatatgttatttttctatagaaaggagctcgtatgagtagaattggtttctcgcgaactcagattttaattctcgtcagtgtttggctaacgtttttgattagctttgttatgcgcctatcttgggcgtcattgatgccgattgtcaatgaagcattgaattttacaccacaaatggggacgacctatttatccgccttttacatgggctatgccatcatggtattaccaggtggtatcttagcggatagaatcggttatcgttatactatattggttagtttactcgccatggcggtcattaccgcattgatgagtaccattgataattatacctatggatgggtgttgcgtttcttattaggtatcgtatccggtcctgtacaggcctcttgcttgagtgccattggggattactttggtcctaatcaacgtggcgcagccgttggtattttcatgtcttgtacatcgcttggggtggcgactgtaaatttatatgccccttatgtagcaacgaattatggttggcaaaatgcattcctcttaactgctatgttgccagttcttatctttatacttagctactttacagttcgtaagccaagtgctgaaatcctagctcaacgtgaagcagaggctcatgtcgaagcggttcctgtaggggaaaagccatccataaaagaaaatttggttcacgtattaaaaaatcgcaatattcgttgccttgcgtttgccggctttttcgctaccggtgctacatgggcggtggctcaatggtcaaacttgtacatggtaaaacaactaggtgttaatgccatctatgcaggtcatgttatgtccgcttttggcttagctgcacttattgcaaagccaaccattggtattttatccgatattttgccgattaagaaaaatcatttaacagcactcgttatgttcttatttggaccagccttaatactctttgcgagcactacaaacccagatatgctttttattacaggtccaattcttggtattggcgcattcatgcacagtgcgttgacgaatgctctcgttgtacaatcagcagaacctcacttgcgaggtactacggctggttttgtaaacttattcaatcaaatcggcgttatgttagcgcctatgattttaggtagtatgctaactgcaactggtagctataaatctgcattgatgacccttgctattgcaccagttatcggtgccgttgccttgttttttgtaagactaaaaaaataaatttcccttgtgaaagccataaaacaaaccctcatcgataatgatgagggttttcgtatttctaaatgtttttgtaaataataattaatgaggaccttgaccaccgccatggctaccatctccgcgaccattgccattacgaccgccgttgtcacgattaccatcgttgcgatgattatcgcgattcttgttatctctaaaaccttgagggccaggaggtccttgtcgatctggaagagccatattttgattagatggttggaatttacccgtttgaagtgcatttaaatttggtgagaagcgcccacgatcacctaagctatctgggttaggtccgcctatatgacctggttgcaagctcggctgcatatgagttggaggtgctggaggtgctggtataacacgatccattggcgtagaaataacagtatctgtaggaggcatgagaccaaataatacggtccgtgtctgttgatcgactacaggagggaatacttgaggtggaatatatggattatcatatgtataggtaatcttttccatctctttagacgtattatagataaattccccaatgcgttgtgatgggctatttggcgccgccacatgttgaccataatcctttgctaaccgttgttgcggtaatgtatcgataggatacccattttccgcatagaatgttggtttcgatattttccacgcagtcatcgttaccggtgcattaggttgttgtctataaaatgtgaagtttgtatcatagtctgcaattacgttatttttagtgtataagctcaatagtcgagcttgtaccgttttataattagaagcagtctgttttgtatgaattgagctaaggtcgacatacatatgctcggtatcgctagaatacgctagctgatactgagtgggcttttgctctatttcgtattgtgatatggcaaatcccgattgcgaggtacacaatagggttcccacgagagctaataaatatttcattataattctcctctccatgtgaaaaaagtgtaccatggtgtacttaagaatacatgaaaatgagtaacatattgtactttatacatatatattttacaatgtagatgaattaatgtacagggaggaatttatgaatataatatgttttggagatagcatcacccgtggatatgatgtgagagaaggtctcggctgggttgaactatgtagtgccgcactacccgcatatcatatggaaaatcacggcatcgatggactatctgtgcaaggtttaatcaattatttagaatcctggtgtatcgacaagtcctatgaggaggatcgatatatatgcattatgtgcggtacaaatgatattttgcaaaatcgcgatagcgactacgtatataataagctcattaaagccgctaccatagccggtgaaaaggggcatgttatcctgggccttgaaacgcaaatcgatagtgaaatggatggacttaatcatgtggtagtggacgtaaaccgtcgtttacaagaatatgcaagagaacatggcttacaaactatcgatttttataccgttcttcatgaagccgatcaaatcggtcaaatcgtatttgccggagaggttcatccaaatgagcgaggctatcgcttgatggcctataaggcattggaaacatttacacgattatagtagaaaagagcacgttcctgtaggatgtgctcttttcgttatatgtagtgctcgacatacgtcgtacactggaggtcaattatttttgtttagatgttttgtcagctgcagcgtgtgcagaagctgcgatagcgtaagctgtgcctttcacaagttcataagtttcaccactgttaccggaaacagttacagctgctaccgtatcatcagtgatggcgaacatagctgttgcatatggatgttgtgcaccatttggtactgttaccgcgccggattttacaacgatgaaacgaccattattgttgtatacatcgtagttagccgcttgttttacgccatcatagctttcattataagcgaacaatgtggaaacttcgcccaatgttacttggccagattgttgcatagcgcgtaatttggatgcagctacggatgtaggttgtgtcatgttaacagtaacgcgtaaggatgtgttgtttacgatggcttctgtaataacatttgttgtaaatacattagcgatgccattaccagcacggttgtaagaacttgcagtttttacttggtacccatttgtataagctggtaaatcgaatgtataagaacgaccattcaacaatacatcaaatgcgttcaattggttatttctgtatgtggatacataaccgctaccgcttttgctgaaagtaagtgtagctggagcatctacagattgttgtagaggtgcattagggcttggaattggatccatgatttgcatgcctacagctgttgtttgtggagccacgaagattgggtcgcctaattctttggaaacaggcatttgttggctcatatcacctgctgtataaggaacagctggcaatggggaatagttaggacgcggaggcattgctacatagcttgcttgtgcaacaggtgcactgtttacaggtgtgtattcatattgagcttgttctgctgcagcgcgttcataagcgcgtgcatttgcatccatagatgcggcaaatgcagagaaagatactgttgttgctgccaatacggcaaataccgttgcaattcgttttgtattcataataaagactcctaatctcacatttttacaaataacacttcatctaggtttcattatacatgatgaatgctaatatgtaaataaaatataaacaaatttaacttttttaatttttgtaaacagaataaggtaaaaatgagaatttgtcaaatacaattttgatattccatggtgtacaatagtatatatatttatatgtcgtataaagtatccgtgctatatattttattttagggatgatgaaatataagcagaattactaaatataagcattgttgtgggaggtagtatgagtattaccatgtattatggtcgcgctggttccggtaagacccgtgccgtatatgaacgcattcggcaggttatcaccgaatgtccaggtgaccctattattttgctcgttccagagccagccacctatcgcgtggaatgggaacttgcggaatttatgcctcaaggaggctttacgacggtccgcgtcgttggctttggccgattggcctatcaggtatatcaatcgataggcaatgtaaaggctcagcaacagagtatatctcaattgggtagaaccatgttgctaagccttgtgatgaaacgaaaaggggctgaattaggcctgttgtcgcaagccgctaaacggccagagttttcatcggtattgcaaggtttattttccgagttccgctcatttcgcattggacctgatgaattagaatctggtgcacagcgcgtatcaaatggtgtattacagaaaaagctacaggaattggcactatgcatgtcggcctacgaagaggaattgcagcttcatgggcgaattgatggggaccctatcatggaccttgttcatgcattgccacagtctccattgatggaaaactgtcatgtctttgtcgatggattccactggtttacaccggttcactttgagctgttatatatgctctttgatcttgctgtagaatctgtaatcaccgtcgatttaccagctgaccctaaacgaatattagccaataagggacatcatggcatctttaatcgttccgttgaaatcttggaaaatctccataaggaatatggagcgaaattgtcctttcagtcttttacagggcatagagggacacctgtattgcaatccttggaggaaaacttctttcatggtaaacgcaatactacggatgaacatataccgcttgtaagcgcctataatcgggaacgcgaggcggattgggtggctcgtgatattctttcctatattgaaagcagccctaatgcgcgctaccgcgatatatgtattatgctgcgtgaatccgaaacctatggcgatacgttggaaaaggtatttacccgctatggaatacctcattttggagaccgccaacgacctatgaacaatcatccgcttggagaattgatgacggatttgcttggtatcgttaagcatagttatagtcgtgacatcatgtttcgtttattaaaaacggatttgacacctcttactcgcgaggctgtggatgaactagaaaactacgtgctcgaatttggtattgatcatctacagtgggaacgagataactggtcctatatgcgccgtgtaacggggctttcagacgaagaacaaccggacgcaccgagacatgcgcgcgtgaatgcatcgagacaggccatcatggatattttgataccttggttcgattttgctacgtctagcgacgcgcatacaggggcggaatggtgtaaacatatctacagagtcctcgaagaattacaagtgcctcaacgcctctatgaatggtccttagaggctgaacgagatggcgatttagaatccaaggccagtcacgagcaaatgtacaatgcggtcatcggattcctcgatgaaatgatggtcctcaccgatacggaaccattgacgttagatgaaatgatagccctcttagaagaggccctcgataatgttcattactccatgattcctccgtccctcgatcacgtagcgattaccactatagaacgggcgtacagccaatcgtggcttcgggtctatgtgatgggccttaatcaaggtgtgttcccacaaaacatgggcgatgaaggtttgattaaggatagagaacgggaagcattggctgaggcgggcatcgttcttgcggaaggcgccttgccgaaggcatttaatgaaaatttccttctttatttagcgatgacgcgggccgagcagcatttaaccatatcctatgcaggttccaatgatgaaggggaaggacttgaaagttccctcgtcattaaacgattacaatctctcggtttctgtacgtcccctatagaggttcctttcaccattcaagacggtacagaagatgaatacttatggcgtccataccaaagtctatctctattatctgaacgttggggcgctttgtttagcggagtacctgtgtcacccctatggtggggactctataactgggctcgccatgatggggcctacagaccacgcttagaggacgtgagccgtggtattcgcgacaataatgatgtacctattattgcgccggagttagtaactggtctgttcctcaaacggggctatatgtctgggtcggtaacgcgccttgaaaaatatcgtcaatgtccgtttaaattctatgctcaatatggtttaaaattagagcctcgcaaggttcgctcctttggggcccctgaaattggtacctttttacatgccaatttggagcggttaggaacgcaactattatccgagcataagcaatggcgtgatttagatgaaacggcgcaacaagaattatgtgctcgcgtagcagcggatatattagaagaaaaccgttatgatgaggatgaaaagacagcctatgataaggctattgaagagcgcgttgtgagaacattacagaaaacggtatcgcgccttgttgattggtctagccggtcctcctttgatacgatgtatttagaacaggattttggacgtcccaatggatgggactctattaaggtatcccttggagaggaccgttatttacgcttggtagggcaaattgaccgtattgatgaatataatcgtgatggtcatacgtacggcatggttatcgactataaatcgggtagtacatcggttaatgcacaagaaatctattacggtttaaaattacaattgatgacctatctgttggcattagaatcggcttataagaaacaccatgatcaaccgatgacaccggccgctgtggtgtatacatatgtaaaaaatccacgaacgccagcgggtgagcctgtgtcctatgaagaggccaaagccttggcggatacaaatggggcccttaataataaagggtattttacagacgatatcgacatgttggaaaagatggataaaaatttgcttacctataagagcaagggcccttatgtgcccgttcgtattacgggaaagggaaccatccattctggggatatgaaaattgttaaatcctccggcgactttgatattatgtgccgctatacggaatcgattatggcggacaccggttctgccatcggtaagggtgaattccccattgctccgtatcagttgaataaggccattccttgttcctactgcgattacaagacggtatgtcgctttgataatgagcgcaatcaatataattatttgagcgctctaaatgaggcgaacgcccttgaaaaaatgcgcgatgccctcaatggttcatctggacagactgaggctaacgctgatttttgtgaaagttctaataccgatagctctatgacaggaggtgacgacaatgggcgttaaatggacaccggaacaggaatctgccatcatgtccccgaaggatagtaatttaggggctcaaaccttgctcgtcgccgctgctgctggttctggtaaaacggcggttcttgtagagcgtattattacgcggttaaaagatatggagaatcctttatccgtacaagaactgatggttgttacctttacgaaggccgctgccgctgaaatgagcgctcgtattggcgtcgccttagctaaggctatggaatccaccgatgataaagcgctacaagcgcgtttagagcgtcagcttaatctattgccatcggctcatatttcgacactgcactccttctgtcagtgggtaattcgttcctatttctataaactagatatacctccaacggcccgcatcggcaacgaagcggaaatggctcttttaaaacaagaggtattagagaacctcttaaaagaggcttatgaaaacaatacgtatggtatttttgatttatctgatttctttagtgatgataaatctgacgcgggattgcaagataaggtgctcagcctctatgaatttgccatgtctcaatcgaatcctgatggatggatgcgccatgccgtagaaccgtacgaggctgctcaaaaacaggatttacgagataccttatggggccgtgctatgtgggacgagcaacaggccgaaattgaccgcattgcagaccgcatcgaagcgatgaaacctttgcttgaaagccctgtaggtcctaagaaatgggataaggtgtatcaagagcaattagctgcattggctcaattaaaaggggcagagacttggtccgatatggtcgacgtatgccgtaacttagatacctttacaaaagcaagttttacaagccttggtaaagccttagaaaagggcgaagtcgatggtgcgctagcagacgaatttaaatcgctaggatcccaaaacaaggacagcttaaagggcatgaaaaacggtctattccatattaatgaagctgtattgcaacagcaatttagagaccaatatccgctcattcataatcttgtagaattgactatcgcctttcacaaagcctatgatgaggcaaaaaaagagcaaggcatcatggactttagcgatttggaacatctctgtttggcacttctcgttgaaccaggtacagaagatgatccacaaccatccgaggtggcccttgaattacaggaaacgttcaaagaaatcatggtggacgagtaccaagatacgaatggtgtacaagaaaccattatcaacctcatttcacgggtggataatcgtttctacgtaggcgatgtgaagcaggccatttatagtttccgcatggcagatagttcgctatttatgaacaagtacaatacgtatgggctcatgaatgacgccgttgagcgccgcatcgatttggcgaagaattttcggtctcacgaaaatattttgaccactacgaatttcattttctaccaaattatgacccaagaggcggcggagcttgattatggtgaaaaagaatcgctcataccgggccgtattgtagaagatgcgccatccgattgggtgggcggcgctgtagaattacatctcttggatacgagcgatacgaatcgttctgacgaaactgatggtgatgccgaaaccgcaggcgatgaaccggagaataatgagcgagaactagattttatcattcaaaaaatcaaggaattgcacgcttcgaagaaacaggtacaaaatgcggatggctcgtttcgccaaattcaatggcgcgactttgccgtattgcgcagatccctcgctggttggggtacgcgagccgtagcagctatgcgccaagccggtattccagccgttgttaatgaacgagatggctattttgaagcgcaagaaattcaattgctcttgtccttgttacaaatcatcgataatccagagcaggatttgccgatggccgccgtattgcattctgggctcgtaggcctcgatgcgaatgaattaggggcgttgcgccttaccggcgacggttctttatggtctgttatgcctctctatgcagaacaggctcaagatgaacggttgctccaatttatcgctcatattgagcgttggcgcacattgtctcgtcgccatggtgtagctgatttgttgtgggatatttacgaaaccttggattacgtgaactatgtaggcgccatgccgaatggactcgtgcgccgcgccaatgtgatggccctctatgaacgggcgaagggctttgaatcctctgggttccgcgggctctttaggttccttcgctttgttgaaagcttacgcgatagcaatcaagatatggccgttgccaatgtggttaccgaagcggatgacgtggtgcgccttatgacgatccataagagtaaaggccttgaattccctgttgtattcctatctggcgtacaaaagaaattcaataccatggattttaatttcccattattggttgataaaaatggaggtatcggattaaaggggtattacccagacattcgcgtctcctatccatccatgccgtggctctactgtaaatccatcaaatcagatgccatgaaagccgaagagcagcgtatcctctacgttgcgttgacacgggctcgggataagctattcttgactggatatattaacaaggaaatcaaaaaggaaaagggcgttggtgctcatataaaacatgcggccttgacacagacccaagcattaggtgccgatttgattaaagctggtaattcctatttgcattggctgctcatcgccttcgctcgtcatctggatggaggtgcaccacttcgcaatatcattgaactcgaaggggaaacgaactttgatttgttagaccgtcaatgtcaggtaaaggtagaaattcatgatggctctctctatggcgatttggattataaggccgatgtggatgaaacgactatcaatacggttcgtgccttaggtaaggtaaatgatgtagcattgccagaggaaatcgtacagcgctttgctttcacctatccaaatgttgtagcatccaagacaacggctaagatttctgttagtgaattgaaacggcgatttgctgaacgtgatgcagaggctgtatcggctacagaggtatcgatgcaacagcaatctgtaccatctggtgatatcactgaggatacgactagtgaggctgcggtagtagatactagcgttcctgctattagtgaaacagaactggccgattccgtatttggacgtaagccgctagctattgcagcggctgatgaaattgtaactggtgcgcaatggggcacattgatgcatgaagcgatgcaatggctacctgttaaaaagtatacgcaacaatctataacagatatgctcgattcattgcaagcagaaggtaaatttagcgatgaagaacgaagtctattaagtgatcgtagcttatatggattctttaactctgatttgggtcagcgtctcattgcatcaaaacgggtagaacgagaattgccgtttagcatgctctttgatggcaatcgggtatatcctgatgtagagacgggtgaacgcctattcttacaaggtatcatcgataccgcttttgtagaagatggtcaatgggtcctcgtggactataagacggaccgcgttaagagcggagacgagctcattcgtcgctataaaatacaaatggacctctacaaagaggccctagaaacgttaacagatatacctgttaaagcaagttatatttatagtttccgcttacatgaagcggttctgttgtaagcacatataagacaatctatttagtataatacgaaccccctttactggcttgccagcaaagggggttcgtatcgcttagagaagcggttttttcttttgatgttttgtcggtgcaaataccttgaggacccgtggtaatacttctaggtctacaggcatatacggacctgcatcgccgtccatattggtcggtaaattatctacattgctcaatagttcgatatgagcttttttgaccgttaatgtcgttgtattgctagagttatagatggcaccgcttaggataagaggtagaaccttgaagatatcgaggataaagtactctttgaaaattacgaggcgcatgtacccatcgtctacggaggcctctggcataaagcgttcaaaactagaaactacattggtgagtagagctagtacgagaggcgatttgcagatgaaatcgtcatcttccgtttgaatgcggtatgtatagtcctttgtagtgaagagggcttgaccggcgcgcaagaagtaggctaatggacctaagatgcgtttttcctttggtgttacctcttcgataacctttggaatgacaccagctgcaatattgttgcagaagtatttatcattacagcgaccaatatcgatggagcgaacttggttgatatcgagacggcgaatcgcctctaatggtcgttgtggaatgccgagagcacgagacatatcgttgacagttcctaccggaataaagccaaaggttgctttgaaaccgccttgggcgataccgtttaccgtttcattaacggtaccatcgccgcccatgcagaaaacggcgtcaaaaccatcttcacaagcggtctttgcaaaacgggttgcatcgtcggcaccggtggtaaatttaacttcaattgtgtcaaaaagagtgctcaatttccactgtaaatcaagggcgtatcggcgtgctgcaccaccgcccgatacagggttaatgataaccaaacaacgactcatagggtaacttccttactttttaactgtgactatcttgaaattgacagtcatatgtacgggacttataattatagagtatacaattattatatatacatgtgttcgtatataaaaatgcttacattctattatactcattttaggcgttcattgaaagtatgaaagcgtgtaaacattagaggggacctaaggctagaaatatgacaaaagacgtgaagggtacaaaagaaccaaaagatgtgtatcatttttccgctgtagattcaattgaacgattgcctttaagtgaacaagtttatgtgaccttgaaacaggctattttaacaggggagctattaccgcaagaaaaactaaatgaagttaaaatcgcagaacagctcaaagttagtgcaacgccagttcgcgaagctttcagaaagttagcaaaagataatcttgttgttatcgtgccatggaagggcgttaccgttaaggcggatacaccagaagaaatcgtggcgctatatcaatgtcgcgaggttatggaaggtttgggggcgcgtttgtgtgctcgtcacgctacgccagaacaagtggcagagcttaaggaattatgcaaggaaatgcatgccattgaggacgctacggcacgcgtagaggttaatagccgattccacagcatgatcgctcaattctccggcaatgatcgcgttgttgattacttagccgatttccgtgaacgcgtaaatcgcgatatgtacttgagctccttcaatgcagtgcgcacacacgattgtgacgatgaacatgatcacatcgtagatgccattgaacgtcacgacgaagtggccgcagaaaatgcgatgcgcgagcatatcaataatgcatttatctttaagcgagctaatgcggaattacaagacaagaacttgaacgaagtataaaaactacatagacatagcaaaaaggaccctagatagggtcctttgttttgcaaagtcatatataagatattgtaaggggtttatcttttatatatgttgtacgtgttaagtaggaattactttatcttgttaatctaatttttgaaaggttatataatgttattttaattgaatagaagagagtgtaataaagaattaattttgtctctattcatatgaggtctattgattagagacgtttttttagttctaaaaagcgctggtgtgctagtcggaaaaattcgactctttcataatgttttgaaagatgtctattacaggatttatagtcttgcgtacgaagatgtagcaattgactggtagaaatattgaggcaataagcaattttaaatactacctcgatggacacgcctgatattccgtatccacattctaatttactcaaatagctgcgactaatgcctacgacatcggccaattgtcgttgtgaaatgcccatcgacgttcgcagggtagagattttgtgacccaagcacatatactgttgctgaaattttgggtcttgataatgattccgtcggtaggccggcattgtaagtgtaggatccttcataagacctcctttccgatccctaccttgtgcttttagtatacttagcaaatacattgttgactaatacgtaatatgtgataattattatgtatatatgataattacacgaatcgttaattttatggagatctattatggaaaaatatatagctatcgcctgcggcggtgctcttggtgcactagcgcgaacagtggtaggggaatgggtaatggcgcggttaggaccttatccttttggcaccattacggttaatttaatcgggtgtttaatcatcggtatcatcttaggtgcctatctctgtagacccgactggcctcaatgggttcggttcttcttggtcgttggtggccttggtgcctttacgaccttttctacatttgcctttgagctcttacagctcctaatatccggtgatttcaccgacgttctattttatggggcggtgcaaatcctcggcggtttagccctttgtgccatcggtatgtggattgctaaactcgtatgtgcgtaaatgcatattagccgctatcattcatatgatatagtaaattgatatagtaaatgtattgctacatattacgtttgatatacatgaaacagaatatatattgaaaggttagattatgaaagaaataagagtacaagatgccgtaggacatgccttggtacatgatattgtacgcatcgtcattggcgaggtgaaagatacaccattccgccgcggtcatgtgattacagaagcagatgtgccaaaattactcgatcttggtaaagaacatatttatgtaatggaaccagaagatgaagggttcctccatgaagaagatgtggcccgtgccttgtatgctattgctaagggaaactatatgcatgatggtcctatggcacaaggtaaaatcgaggccattgccgatgtggatggcctactcaaggtggatgtagataaactatacgctatcaatagcatcggtgaattaactatcgttacgaaattgaataatacgcctgtgaaagcgggcgataaaattgctggtatgcgttgtattccattgttattggaagagcaacaggttgtggatgctcaaaaaattggtggacctatcttaaacataaaaccatttgtacgtaaaacaatgggcatcattacaactggttctgaagtatttgaaggacgcattaaagatgcgtttacacctattatcgaggagcgttgcgcagaatttggggtgaaaaaaatcgcccatgaaatcgtaacagataacacggacgacattgtggcagccatcgataaggtaaaagcggcgggcgcagatatcatattctgcacaggaggtatgagcgtagatcctgatgatttaacaccaggtgccattaaacgctacgcagaccgcgttgtaacctatggtctccctgtcttgccaggctctatggtgtgcattgcatactgtgctgatggcacgccaattttaggcgtaccaggtggtgtattgtttagcaaaccaacggcctttgatgaaatcgtgccacgcctcatcgcagatgatgaaattacaaaagaagactgtatctgtatggggcatggtggcttcttaggataaaatagatttaaagatagcttttatctttgtgatagaagtgtttatacctgaataaaataagaaatatacctaaaaagggactgtagcgaaatgcggtaaaaccgtattttactacagtccctttgcgttatcatactattacttaattttattgtacttagtgttctccgttttctctaaacctaatttcaagaatccaactggtagtatcaatgcgagtgtaggacgtattgatagtaaatggaaaagcgtgacccatcaggcaggtatttatgctggagaagatggctatgataagatttataacagcattggtctagttccaaacttaggcatagaatctaaaggtaaagccagctcgactactcaatttgctatttctgatggtatactaacagtagatggtaaagaaattgatactaagacgattaatacaaatactgaaaataccttacaccaattagataagattttcgataaaaagaaaattgaagaacgtcaagagttagctcgtctattctctaaaaatgcatttgaacaactacataactggcaaccaacaactaaggatggtaaagttgctaagtccattgcgcatggtgtagtaggtgggaaatcaagtaatagtggtgctgcaactacatcttatgctacaaagtggaatgaaggtttatttcatattgatagagttgatcttgatgggatttcagaagataataaagatttagcattagcagatttaaattatgacttagctcaaagtaatagacataatattaataaaccaagagaaaagaaaaaatatatacgtaaagatcatttgtattctgagtccaaagggattggagcaggtattactgatgttgttagaattggattttcaagaggttatgggatagattcggaaggttcttcatatgttacagaccaagttcctatagggccaagtgcattcccagttcaatcaacaaccagtgacactagagttttatatggtgagcaagggtttacaggtggggccatttcaatatcaatgaatactggtggtggtaaaagttatagtctgggccctaccaatataactgagtctaaaactatgaatgtttcgccagaggcaacaatatcattttcttatacagagaagttggatagtgaagttccatcagaatatgtggtgaatgatacttctgtagatttatcaacttatacaccagaacaacctgatggtgtatattcacctcctccaatagaacctgaagctgaaattagagaaacaaatgatatggaaagtttaaagaatcgtattcgagctattagaactcaatttgaaatagaggattaattatgaaaaaaataatgtcttattttaatttattgcctttatcgcttaagcttattttgggttttactgttatatgtgtgattatcattttttttatgacagtagctgctttttttaatagacctaaccaaattcaaaagcttgaatcatatgagcaaaagcttgtaagtatatcttcttataaggtaaatgaagatcattatgctacaggtaggaatagtcagggttataattttaaaattatatatgagcatattgaatttgaaaaaattaaagctttactttcgaatgacagaattaagtggcgtgaatataaaaatagacatataataggctatgatttaaattatgatgttactataaaaattgagggacattcttctggtaatagggtaatagtagttttgagtactgaaaagtagttagtaaataagaataggttgttaaactttagcatatctcattattgtgttgaactattataaaataggttaataggtatagtggattaatgcttactattttgcttaaataatatttatattcttgtttaatatgaaggttgtatatttagatagaagatagttgattagtggttctataataaatgttggggtgacactgtaaatgtcaatataagaatgtacaattttgacgatgtacaatgtacagttattccttctgttgcatatggtttcgtaaccggtatgaatctccagttatgctaatcacatgtgcatggtgaagtaatcgatcaacaatagcattagctactcgctcatcatgtaaaatggtagcccactcatcaaaattaatgttagacgttacgatggtacttttcttttcgtaccgtctatcaataatttgaaatagtaagttagcatcacctggttgtaacggtaaatagccaatttcatcaatgatgagtaattggtagcgtgcataatgcttgagccgagtttctaatcgtccttcatcttttgcactcttaaggttttgaattaaatcatggcatttaataaaataggtgcttcgtctgttacgagagctttcaatacctagagatgtagctaaatgtgttttcccaactccgctagagccaagaaatacaatgttttcagcttgttccatgaatcctaatgatgctaaatccttaatttgcatttcgttaatttgtggttgaaatgaaaattcaaaatcagctagtgttttcaaatgaggaaaattactaattttcaccatatggttaattacgttttgtcgtttaatatcaacttcgtaatcactcagcttcaataaccactcaatatgagataagctctgtgtattagctaattcaattgtttcatctaggtgtaacatgcattgttttagttttagatatgctagattatcttgtaagcgttggtaattagtctgtagtgtcatagatagctcctatcttttccaaattagattttgctttagctttcacatcttcagaacttagataaggaattgttttctgcaattgtgcctcataatgagaaggcaaatagttaaccttcttatcacttaatgggtgctgtgcaatcaattctgtgctatcatatatgtatagcatcttatctatggtctttaaggtcatagatttggccacatatcctggcggtacagaatagtggctaccacgaaagctaatgagattacttgctgaaaccttagcttttgggtgatctatgcggtaggaatctcttatcacttttgttggaagtggggtaagagattccttttctttttcaagcagtgcagacggtatttgtcttgtagcttgagaaatcgctagattactacgtaaaataattttttgaatctgttcttccacttcttgtattgttaattttccttggtacgcatgaatttcatctagaattttcatttggctttctactttgcctttcgtttgtggacggcgcgccatacacggcttaaatgtaaagccaaagtcacttgaaaattgttctgctttggtatgaagctgtcctttagttccagctagcctcggttgtaccatcacggttttcatattatctgttaatagtacatgcggaacaccttgtaattgttcaaagaattctaccaatgtatcttgtagtgtttcagtagttctatcgaaagtgacctttgctaatttgtatctagaatagcctaatgtcatcagcaatatattaaaagttatgtgtgtgccatcatgcaataggaatttaatattctctttccaatcaacttgagcctgttcagctggtgcggtttcaaaacgaatcgtatgctgcatactaggcgatgtatgttttctatcaaaataggattgaaatactggtatctttaaaatataaccgcgaaatgtagagtaagcagctgtgagtccatggttatctaccaagtattgccacaagacacgcttataataaaattgttggggtgtatcatcagataataaagtctgtattacgtcataaaatttatcaatcatagatggtttatcacgatgtggatcaggcgttccattttcataatgagattttatggtgcgtctatcatagcctaattcacgacctagtaaactataattaggtttcaaattgcaaacctccagaatgtcccttaataatggtaagtctaataatgatgttacagtaaatgaactgttaatagcgtatacgtattgcatgttgttatcacctcaactatagtatcggtgatacaattaaaattgtacattcttatatcatcatttttgtacattcttagagtatcatttacatgacaccacaacagtgtcacttccaacattattttatattgtacgccgaataggcatgactaaccccccagttaaaccgggggtcggtaaaaaattcttagagaaaaggaaagaacctcctagtgataaaatgaagttggtctggcaaccacaacatttcaacataggaggttcaatgtcaatgaatgacgtaaaaagcttatcacatagtaaatggagatgtaaatatcatattgtttttgtaccaaagtatagaagacaaataatttatggtcggataaaagctgatataggtaaaattttaagagatttatgtaatagaaaaaatgtagagattatagaggcagaatgctgtccggattatattcatatgctagtaactattccaccacatttaagtgtatcaagttttatgggatatttaaaaagtaaaagtagcctcatgatattcgataaacatgcgaatttaaaatataagtatggaaatagatatttctggtgtagaggatattatgtggatacagtgggaagatacgaaggagcgataaaagagtatattcgcaatcaactacaagaagatatagcacaagatacattaaactttaaagaatatactgacccgtttacgggtgagccggtaaaatagacaaaataaaagcccccgagtagggggcagctagtggtaatagagcgattgtcagatcattcaaagccctctttagagggctaccactagagaaagacccttatagggtcagagtaaaccacccgttctacgggtggttatgatttaaaatgattttttacctaatgtaggatggctacaccgttttaatgttagcgtatcaatcatatgaaccgcttcgtccaatgtaaggtcctctcgttttgtaggtgtttcgaggactgccaatggatggtctgtgcctacttcgccggatggcaagtagatatattcttgattaattgtatcgccaaagatatagcctgcttgtaaatgctctttatgaatgcgactcataatgctcctttataaatgtatgatgcacagttgaatagtatgtcagttatgcgcttatataaatttagattacagtattttttgtatcttaaattctgcatagtctgcagaaacgagttctaatttagtatttccatatgtagatggaattcgtttgaaagagttttggtcatgtaaatggccgaatatgcatatgtctacttggtagcgctccatgaggtctgtaaagcctgatggggcgttattttcattaaatggtggataatgcaataatagaattcgcgttacaggtagtggattacctgtattctctgtttcagcatgttccttttgtaatgcttggattgcttgctccatttcttgtaaggctgcttcggtacgcaggatttctctatcatagatagattgatccgtatctggttcaaagctagcatcatcaggacaaatatatccgcgggtgccaccaaaggctaagatgcattgctgttcgttggggtggctttcaccagtaagtgtattaacctgagttgtgaggttgataatgcgggctgtaccgtggccttgtaaaaaggtaatagcatcgcccatggcatttttcattttgtttgccgatgaccaccaataatcgtggttaccgcgaatcataaatttttgacccggaagactggcgatttctttgaggtcgtagagtgcttcatcgaggcgcaaagcccagctcatgtcgcctacgagaaagataatgtcctcatcggtgacggtggacagccaatgttcttttatacgttgccaatgattgtcccagtggggaccgaatatgttcatcggcttcgtaggtggattacctgatagatgaaggtctccaatggcgtaaatgttcatatatgtccttactagagtcctctaacctacggaactcgtagcagagggttcttatttcaattcaaaatagggtgtaatattctgtaaaattttcgcagctcgttcatcattgcacgtttgtggaattttataacccacgtagagcggcgttgtgatatagcgaggaattaccttgatatattcgtaaccatcttctagttgatagaaaaaatagttataggattgggaaaattttgccaagctatctagtacatagcgtatggtctgttgtaagcgcatggcgatggagcggacaggcgcatcatgtttataccgcaaattgtattcaaagaatccaataatagggtgtttggataaggtgatgcggatatcttgatcttcgtgtaatagccaaccattcatgttcttgaccgtaatgtcctcgtgataatcgtagttgcgtaggcctataatttggctgtgcggatggcgtatggaaccgcccgacatgggaccatggtttttaaagaagagaacagatttaaactcctttgtggcaatcgtttcatgccatttatctagaccgaattgaatgatccgtgttgcatcatcaacggaaagggtggatagttcgccttggtcaccttctgtttcaacgatgaccgtaggccacgtgtcctgtaaaacaggatatttattcatgagccatatgatatgaccatcttgagccagaatatctgttaactttgatcggtcgcagaatggacagcgcacacttgcgtcacgcatatttacaggctttgtacgccctagtgcaatgtcaaatataagtggttcgttcatggtgcgcctcctttcatctcatacctttaatcataccataaatgacagtattacacatgaaataatggtataatatattaataatctttaccaaattataggaggtcttatgaaacctacaaccttggtatttcccatagatgaacaacatagaattttgctaggccgtaaaaaacgcggctttggtgctgataagtataatggctttggtggtaaaatcaatgctggtgaaagctttcgccaatgcgccgtgcgcgaactatatgaggaatcgggcattcttgttaatgctgctgatttagagtgcgtagccctttttgactttcagtttccttatgatgaaagtctaacccatgtaggctatgtatattttgtgcatgttaccgatgtaaaacctattgaatcagacgagatggaaccgcattggtttacattggccgatgtcccttatgagcatatgtgggaaggggaccgtacgtggcttcctatgctattagagggcaagttgctaaaaggacctatccgttttggcccagataacagtcatgtagagaatatgcgtttaacagaggtcgatacagtcatggaaagtgaactgttggcccgtatcgatgtatatattaatgaatagagtgtagtgaaagtataggatgtgctttcacatatacctatattgaggaactatgaaagagatgaataaccccaagtgggtgccacagttgttggcgtggtatgatgtaaataaacgggatttgccgtggcgtgactgcggtgacccttataaggtgtgggtatctgaggtgatgagccaacagacccgcattgaggcgatgaagccttattatgataattggatgcgtctatttcctacactagaagatttggcaaaggccaccgaagatgaagtggtccatgcttggcaaggccttggttattatagccgtgctcggaatctacgtctaggcgtacaagatgtggtgaataattatggcggcgtagtgcctaataatcgcaaggatatggaatccttgaagggcgtcggttcctatacggccggcgctgtgttatctatggcatatggcgagccagaggtggccgttgatggcaatgtgttgcgtatctatgcccgtttgtacggcatattcgatgatattttgagcacaaagggcaagaaggccataactgctattgtagaggatacgttgcctcatgatagaccaggcgattttaaccaagccttgatggattttggctcagccgtatgtatccctaagacgccacgttgcggtgagtgccctatcgtcaatatgtgtcatgcgtaccaacataatgtaaccgatcaattgcctgtgcgtatcaagaaaacaaaggttgttgatgtgcctgtctttgtaggtatccttagttatggcgactattatttgctacataaacgccctaatcgaggcctgttgcgctccatgtgggaatttccatctatagaaaatgcggattcctatgatgcggcagaatctggtttaactgagctcgtaggggcattgggctttgaactatccttgcaaccagttattgtgaaagaattaactcatgtattttctcatcgcaagtggtttatgaaggcctttcgaggcgatttgcagtatactggagaccatacatcaatcgaaacgatacaaacgcaattaccgaaggattggatgcttatcaaacgggaggaattcgccgattatgcttgggcgggacctcatggtaaattgacagaattatgtcctattgtagaataaatttatgagatgaacactgattttatctcaatgtattagacattacttgatatacagttaggagcgtatatgcaattaattataaatattgtgtttctcgtggtgctagccatagcctttttaggcttttggggattgtacctctatttatggaaaccgaaaaaactatggcctgcgtggctggcctatattttagtagtcgctggttggttctgcgcggtacgatactatttcttataccaagttgatctatacggcacgccttggtatgaatggcttaacttgtttagaacggaaagctatggcgtagtattcgccatattcttgtgtataccagtttttattgtattggccttgatctatgcactggtaaaccgtatctcccataaggttcccgtcgaagaacgaactgggcgccgtgctttctttagaaccgtaggtacccttgtacctttggctgccatggggggggctggctatgctgcctatgaaggacaacgagaaatcgttgtaacccatgaaagctttggttatactaatctaccgtcagggcttgcagactataagattgtacaactcagtgatatccatattggaccaagcatcgacctagatgactttgacaaaatcttgcgattaacactattagaacacccaaaccgcgttgtcattaccggtgaccttatcgacaagatacaatggctacctgaagtctgcaatcgcttaaaggtatttgcaaaacaaattcctgatggcgtagattatatccttggcaatcatgaattccatcacgatgtaaataaaatcgtcgatgatattaaaacgaaaacgccattaaacgtactgattaatgacaatatccaaatcatgggtggtaaacaaccggtctatatggctggcgtatcctatgacaatgaacgtcgcaaagaaaaccgtgaagccatgattgataaggccttatccggtatccctaataatgcttttgttattctattggctcaccatccagaattctttgatgaagccattgaacgcaatgtgccacttacattgtccggacatacccatggcggacaaattatcctctttggcatgccttgggtaccgattggtacaccatatgtaaaaggacgctatacagagaaaaatagtgtatgttacgtaaacaatggatctggacactggttccctattcgtattaactgtccgagagaaattacggtcattacgttctttgatggggtggcatagcaattaaaaaggacgctatagtctaattttcagtagtatatactgaatgatttagaactatagcgtccttttttccgttcatttgaggtatgagaggatgttatagatatgtcaaagagagggagaggtttatttcatgcgaactgcttcagcgaattcgtcttcggtcatgagtttttcttccaagatgatttctttgatagagcaaccgcgtttgtatgcttcttttacgaccttagcactcttatcgtagccgatgtatggtgttaatgatgtagcaatcataagggattgttctacgaagaatttaagtttttcaggtacgaattctatgccgtcgatgcagtgtgtagtgaaggaattcatcgcatctgcgaggaggcgacagctttcaacaaaatcatagatcatgataggcatatacacattcaattggaacgcaccgctgcctgcacaaagcgtcatggttgtattgatgccgaatacttgggcacataccatagcaagagcttcgcattgggtagggttaaccttacctggcatgatggaggagcccggttcattttcaggaagatgccattcgccatagccacagcgagggccagatcctaagaaacggacatcgttcgcaatcttaaacaatgtagtagctaatgtgttaagtgcaccgtgagccatcatgaacgcatctttcaaggataggccttggaatttattattcttaacgcggaatggagcgcctgttacctctggcaatacggtttccataacgtctagatatcccttaggtgtgttcacacctgtaccaacggcagtgccaccaagggcaacgtcgagtagataatcagcgttttgaaggagcatagttttggcagtttttaggccgtctacaaaggcgctaatttcttgatccaccatgatgaaagtagcatcttgtaggtgagtacgaccaaccttttgcaagcctttgcctttttcttgcaatttttcaaaggatacaataaggccgtccaatgcaggaattacgcgttttgtaatttcaaagtacgcacagatatgcattgctgttgggaatgtatcatttgtactttggccgcggtttacatcgtcgttaggatgaagtggattagcttcatctaactgtttagcccggtgagcgataacttcgttcacattcatgtttgtttgtgtgccagagcctgtttggaatacggtcaatgggaattcctcatcccatttgccatctacgatttcatctactacttgagcaatgagtttcgctttttcctcagttactgcgccacattttgcattggttaaagcacatgcttttttgacaagcgcaagcgctttgatttgttcaatagggatgcggtggtcaccgatcttaaagttattgaacgagcgttgcgtttgaggtccgtaaattcgtctagcgtcgacttcgactggtcccattgaatcatattcaattcttgtttccataatgtttacaacctccttaaaagacatgccgaccttatcgtcggttcctttctattatatacagaaaaacgaaaaaatataatagaaaatgataataaataccaattagatataatgcgtacatggctattacctttatacatatttgatttatatctataaatttgtgtatacatagcacatatatggttatatttattgtcaacatcgctttaacacgataaaatgaatatagcttatagttagttttatttaatttataagaggaggtaagtacttatgaaacatgattttatgagccatgaccttcacttgccggaacttacgttgcgtgggatgttattaggtgcattgatcactctaatatttacggcatctaacgtatacttaggtttgaaggtcggtttgacattctcgtcatccatcccggcagccattatctcaatggcaattttacgtttcttcaaggattctaacgttcttgaaaacaacatggtacaaacgcaagcatctgcagctggtaccttatctgcaattatttttatcttgccaggtcttttaatgcttggttattggcaagggttcccattctggcaaacattcttgatttgtgcatgcggtggttccctcggtgtgttattcaccattccattgcgccgtgccatggtagtgaacagtgacctaccatatccagaaggccgtgcagcagccgaaatcttgaaggtcggatctcataatggtggtgaagttgctaaatctggttccggtatggcagacatcgtttccggtggtgctgtagctggtatcatcagcctttgcgctaacggcttcaaagttcttggcgatagcatgagcttctggcttccagtaggtagcaaagggattactcaaattccattgggcttctccacagcgttgttaggtgctggttaccttatcggtatcgcatctggtatcgctatcctcgttggtgttctcatcgcgtgggctggctttgtaccttacttgactaatgtatttgctccagatggtggtgcaactgcaaaatttgctatgggtatctggaaatctaaagttcgctttattggtgcgggtgctatcggtatcgcagcgatttggacgttgattaccttgattaaacctatcatcgaaggtatgaaaatttctgttaaatccatgaacagcagcgctgctgaacgcgaaacacatcgtatggatacagatatgagcacaaaatctgtattgatcgtatttgctatcatcctgattggtttggttattacgttctgggatttcgtatccgctgtacctattagtgcaggcttgatgtggactcttgttgttgtaggcgttgtagtagctttattaatcggcttcttcgtagcagcagcttgtggttacatggcaggtcttatcggtacatctgcatctccaatctccggtattggtatcctagcaactattatttcttctctagtggtatacttcatcgcttctgaaaataatttgtttgctaccgaagcaggcgttcaattcgctacagctatggctatctttatgacatccgtagttatcgccattgcatctatctctaacgataacttgcaagacttgaaaactggtcaactcgttggtgctacaccttggcgtcaacaaattgcattgttacttggttccgtagccggtgctattgcgattgctccagttcttaacttgttataccaagcatatggtttcacaggtgcgttgcctcgtgctgaaatggatccaaatgctgcattatctgctccacaagcaacattgatgactacaattgctcaaggtattttcaatgctagtatggattggaattacatcttgatcggcgttggtgttggcgtagtagcaatcattgttaacttgattcttaagagcacaactgcttccttaacattgcctccattggctgttggtatgggtatctacttgcctccaacattggaagtacctcttattatcggttctttcttgagctatttcgtaggtcgttatctcatcgctcgcgctaaaatgcgtgctggtgaattggctgaatacgatgtagaacaatctaatcgtcgtggcgttctctttgcgtctggtttgattgttggtgaaagcttgattggtgtaattatagctgttattattgtattgtcagttacaactggtggtggtgaatctccacttgaattagttggtcctgaatttgaaagtacagctggttggttaggtctacttgctttcatcttcgctgcactctatctagttcgtcgtgttgtaactcacaaatttgataaagcagaagctctcgctatgaaagcagagcaagaacaagcaaagtaagaggttaaccatgaaattaaaacagactgttctcatcatgatggctgccgcattgccactcacatttatggcagccgctagtgaaacgattcctgtaacaaaggatactggtgctgtagtagcacaaaataatcgtcacgatgtgacatatcgtctctctagcacggctacgccagagcaaaacaaaaaattacgttccgtagcgaataaaactgatcgtggtactatcgaagtggtagcgccaaatgcagatcgttatatggatcgtaaagaggtaggcgtatctcctgtagatgcgactacagatcatttgaatctcgtattcccagaggttaaatctgttagccctatcgttgaaaaagccattaatacaacgattaagaaatacgtgtccaaggttcaaaatgacactcaaaaattgaacgaaaaagaatccaataaaacgaatgtcatcatgtactatgatgtaaaaacggataaaaatggtatctttagcgttttgattcacacctatacaatgcgtgatggcgatgcaaatggtgtaaattatgtaaaaggctttacattcaatactacaacaggtcgtcaattatccttgtatgatcttggtggtttgaataagaaggaactcgttaatgctatcaataataatcaacaagtgaaggatgccgttggtgcgaatgctacattcgataaaatgccatctgaattctacacaactgaagattattcggtagtgatgattcttcaacaagatgtggatacaatccatagtgctggtaccgtatatgtaccagttggcaatttgcgcgaccgtcaaaatgatgtgaccaaataacaaaactaactatatgtgtctgtattgttaaacaatgcaaggtgcgtagcaccaaaaagggtacacagactgttttatgtggtatagaacttaatacttactaaaaagcccctccgctatgtgcggaggggcttttgtgcgtattatcctgtatgaagaatagggggataggacaaaaaagacagccccgaagggctgcctaattgattattttgttggttttaatggtaatgggaattggattgtcgtagtcggaatttcctcaggcggtgtttgaacaattaccttcttaccaaatttctttttaaatgcctttactgttccaggttgtacagaatcagccgtaataactaatacagatgcatcatctgttggtaaaatactaatgattttaccttgaggttctttgttttgataaagtgccaatgcatcggattggaggtcttctaattgggcttgtgtcaatttgccttggcttacaattaatgcattatcgagttgtggatcgtgagcgtcagctagtgctgtatgaactgtatcgaagtgttttttgtccactacagaaacgtgcaatttaccttccttccagaagagagcaccatcgtttctaaattgtgtgaagtcttgaccatagtgaagggcgtggctgatgacattggatgttttttgttccacttgttgacggtagagcgcattgtggaatgccaatgcttgtggtgtttgtgtcatacggtaggaaatttcagccgcctctgcacgggttacgtatttttctgggttaaacatcgtgcctggtgcatagttggtaaatcctaagtatgctaattcacggactgcatcttgtgcccaaggggctacgaatttttggtccccatacgctacttgatcgagtacagtaggatcatctgttgtatagcctagataatgtaggtagttatctgctaccacagcaaattcttggcgggacatatatttttcaggtttatatgtagtgtcgccatagccagagatgatattcttgcgcgctactgattcaatagcgagggcagaccaacggtcggatgtaatatctttaaagtgactagagatgaacgctgcttgtccatcatcggtaatgttgttgaatagggaggccacttcttcgcgtgtcattggttgattaggacggaatgtgccatccgcatagcctttcatcaatttagcctttgctacggcactaattgatttagaagcccaaaaatcacttggtacatcggagaagatgtatggtcgcacatcttggatatcctttggagacgtaacaacaccggagcgaagttgttgattaacaacggtattagcaggtacagcagttttgttttgttcagtagctgttgtatcttgaactgttgccgttgttgttacagtatgttgcgctggagtagcgcttggtgtttgtgccggtgtagcggcaaatgccataccggaagtagtaagtaaagcggacaggatgagagcccgtaatgtgtgtgttgatacctgttgcatacatatccttcttaatcatgtggtaaatatatcaaaaacagcgttagataacgctgtttttgaagtccccttaaggactaaagtatatcggagttttgtcgctattagcgttttacagtcattttaactttggaaccaaataccttggaaataccttgttgtgtttctttgcttgcagtgctaactacagcgtataattgattgttttcaacgtctgggaatacggcgataatattgccacctttttcgtttttgctgtagtagttacggaaattagattcgataacatcgtattcagtttggctgtattgagatggttcaactactacatagttgttgatagtagcattgccttggcttgccaaattagctttaattgtatccaaatcggaattagatttcaaagctacatgcaattgattgtctctccagtacataacaccatagtcttggaatgcttctggtgttttatatgttttgttgagttgagtgaatacattgttttccaatgtttcttgttgtttttgatcgagtggttttaatgtgctgcgacgtacaggtcgaacgatgcgtggagattgttctgctttagactcagaaaccttgtcagattttttagccttagcttctttttctacctttttcgcatcagcatcaacttttttagcatcagatttcacagcagcatcagctttttttgcatctgcctttgcagcagtatctactttcttagcatccgcttttacgtctttagcgacttctttttcaacggttttagttttgttttcaaccttttcagcgtcttgctttgcatcttctttaatagcggtagccttgctagtagtaggggctgtttcaccgtttaagatgcggtttaagattgttgccgcttgtgcgcgtgttacaggttgtgttgggttgaaagcagttgttgcaccggatgctacatagccgcgttgtgccatgtattcgatatccgctacatatgctttggaaatgctagcactgtctttgaatgtaaccttttcagattttacaggtgcatcaggttttattttctttactaaattagctgcggaagcaacgaattcttcacggtccatcgctttagcaggggcaaatgtagattttgttgtaccttccataacgccagcagcaccaactaatttaatagctgtattggaccaacggtcgctttcaacatcggaataggaaacgccgttttcttttgttactaagtcagcaagttcttgctcgttcatattgtgttgcaacactttgccgtaaatggctgctgcttgttcacgagtaatgcttttaccagggcggaatgtgttatctgcatagccggataagtagccagcctctgtcattgcttggatggcatcgcgagcccagttatcttttgtatctgggtatacgccagctggcaatgtttctttagcctttgcaggagcctcagatttttgtgttgcttttgcagttgttgtagttttatctgtagttgtagtagatttagctgtcgctgctggtgtagttttcgcagcagttgtttttgcatgtgttgtcttagcagttgtttttgcagcagttgtagtatgtgcagatgcttttgcattcgttacaactggtgttttcgtagttgttgtagtttctgcatgagccatgccgaatgtagatcctagcgccaatgtaatcgctagagataaggacaatttattgagtttcatgagaaagctcctttcaaattacgtttatatacataaattatagcacttttatgaaataaccactactataagaaaatgtaatatataaggataaaaattagatgaataatggtgaaagttacattttcattatagcaaatgagaatggtgcaattttgggactaaaaaatatctacttgataaacatttgcaaataaagaaaacacgggagttatagaaaaaatttataaagcagtacgtgagtgtgataaaaatcaattttgattattacttttagtcataaggatatgatttatacaaccctaaatacgaatatagcaattgcttggacatttatggtgcccttatttataattatatcgaaatgttctttaaatataacactttaaagatcgtcaatttattgtataggctgataatttgtgaaattttatcgacctaaatggatacatatcaaaattttttttgagttaagtactagaaaagttgaggacgaaaatatgaaaattcatcttttccaacagtgtttgattgatatgttctaccctcatgttggcatggctggcgtagaagtacttgagagactaggttgcgaccttgtagtgcctaagaaacaagtatgctgtggacaaatgttcacaaactccggttacaatgatgcggctatggatgctattaagaatacaatcgaatgcttcgaaaacgctgactatgtagtcagcatgtctggctcctgtgcctttgctattcgcgatgaataccaacacttcttggaaggtcaacctgaatggcaacaacgcgcagaaaaattgagcggaaaaatttatgaattcactgaattcattaccgatgtattgggtgtagaagacgttggcgcacgctttgacgaaactgttacataccatacatcttgccacgtaactcgcttgatgggtgtaaaagaaccacctttcaaactccttcgcaatgtaaaagaccttaagttgattgaattacctcgtgcagaccgttgctgcggtttcggcggtacattctccgttaaaaacccagaaatcagcgaagtaatgacacgcgaaaaagctttggaaatcgctagcactggtgctaatgtaatttccggttccgaccaagcttgcttgatgaatattgcaggtatgcttgaccgtcttcataaagatggtgaaatcgatcgccgtatcaaagtaatgcatattgctgaaatcttaaactgccgctaaggaggagacgacatggcacttatatatgacaatcgcccctataaaacacgtataaaagaatgtttggctgacgatttcaaagttgcagctatcaaaaaagcacaagacgtgttttatgataaacgtaatacagtagttgcggacgttcctgaatggttagatttccgcgcagaagcagctaaacttcgtgatcacgttcttaacaatttggattactatgtaaaccaattcgttgaaaacgctgaaaaagctggttctaaagttcactttgcattcgacgataaagaagcaactcaaatcgctttggatatccttcgtgaacgcgaagccaaaatgatcgttaaatccaaaactatcttaactgaagaaattggtttgaacgaagttcttgaagaagctggtatcgaagtaaacgaaactgacttggcggaatttattttgcaaactgcagtgagtcctccatctcacatcgtagtaccaggccttcactttgaacgtaataaaatccgcgaaattttcgctgaaaaattaggttatacaggtactgaaaaccctactgaaatgactcacttcgtacgtggttatgtacgtgaacgcttcttgaaagctgacgtaggtgttaatggttgtaactttgcagttgctgcatctggtacttgcacaatcgtttccaacgaaggtaacggtcgtatggctagttccattcctaagactcaagtaatcttcttgggtacagaacgtatcgttcctgacttcaaagctcttgacgtaatgatggaaatgttgaaccgctctgcagtaggtgctaaaatttccaactacttctccatgatgactggtcctggtcgtgctggcgaagctgacggtcctgaagaaactcacatcatcattatcgataacggtcgttccggtatcttgggtggtacattccaagaaatgttacgttgtatccgttgtggtgcatgtatgaacatctgtcctgtataccgtcacatctctggtcacggttatggctccgtatatccaggtccaatgggtgctgtattgactccattgttcaaaggttacgacgtagcaggtgatcttccatatgcttccacattgtgcggtgcatgtacagaaaactgtccagtagctattccattgcatgaattattgatggaacaccgtcatattatggctgacatcgaaaaaactcgtccgaaagcagaagaagcaatcttcactgcagcggctaagatgtttggtaactccacattattcgaccttggtacaaaagctggcgctatcggcatgaacttgattagtaataaagaaggtaatatgcctgcatggactcaagctgtgcctgtaatgaatggctggactaagtctaaagaattgggttccttgaaattcaagaaattccgcgatttgtatgctgaacatgaaaagaacaagaagaaggagaaaaaataatggatgaagctaaacgtaaacaatttattgcacgtttatctcgtgcattaggccgtgatcaagaaatgtgccctgcctatgtagaggattttgattacagccatggtcctcaagaaactatgttcaaagatttgaatcaagatcaaattttgacaatgtttaaggaacaatgtcaacgtgttggtacaaaattcgttgaaactacacctgataaattaggtgaaacaattttggcagctatcgaagactggggcaatggtaagattgtattcccaagcacttctgaagtagacgaatataaattaaaagaattattcgaacaagatgcagctaataatggcggcactcgtacatacttccaatgggacccagctaaaggccgtgaagaatgtatttctaatactgcgaatgcagatatgggtattacattcccatactgcggtattgctgaaacagctactgtagtacaagcatctggcgaagaatctggccgtgctatcagcttgttgcctacaacacatattgctgtattgtacactgatacaatcaatccacgtatgactcaaactatggaacatttgtctgaacgttatcataacgatccatccaaattccctacaaatatctgcttgatttctggtccatcccgtacagctgatattgagttggttactgtagatggtgctcatggtcctatccaagtaacttacgttttggttaagcgctaatacattaactacgtatagctataactgaatcactttaaaggtgatcttccttaggaaggtcaccttttttatatgtgttgatttctattatggtgtagagctctcttagaactgtataggctcctgtagagcgatggaaattaacatgtttatggagcttgcggattctgcatagataaactcataaaattcgtattgttttacttgcaaaattttcgatatatgctatacttagttcataacctattattatgatatgaattaaagaggtgtattatgaatattccattctttacagattacctcatgttaagcaatccactaagtattggtattatcgcagtgtttgtacttgccttaatcggtatttatgtgttgcaacgcaagggcacatcctttggtaatcttgttattattggcactattgttggtgccgtattaggcatagcaattcaagttattgctggttttcctgatgatccgtctaaggtggtctacatcaaggaaagtacgaagtggttctcccttgtgggtggcgggttcattgacttaatccgcatgcttgttattcctatcgtatttatctccatcgtccatgttattttacacatggaggcaggggctaatcttaagaagttggtagttgccatggtgtccactaacctcggcatggtggctgtagccgctatcgtaggccttatcctcggtaatgcttttggattaggtcaaggttttgatatcgttgagtccggtaaaaaaatccgtgaaatcaaaccgatggtggatacattccgtgctttgattcctagcaatcctattcaagctgctgcagaaacaaatgttattggcatcgtagtatttgccatcatcttgggcagtgtagcccgtctcttaaaacaaacgggcaccaataacatggaaatctttacaaagttatttgatgagcttcatcaattgatttcctgggttgccgatttcattattggccttatgccatacggcgtagttgctttattggcatctacattggcgacacgtggcttgcaagctatcctcgatatgggacttttcgtagtattgctttacgtaggtcttttgatcatgttcgtcgttcaagctatcttaattgctagctttggttacaacccgattacatactttaaaaaagcgaaggctccattattgttggccttcacatcccgttcctctatgggcgtattgccattgactgttgaaacattgacaaaacgtcttggcgtaaatgctacaactgctaatacagtggcatcctttggtactactgcaggcatgcaaggttgtgccggcgtattcccagctcttgtggtagtttacatttctaatgtagcgggtattccatttgatttgacaatgtatatcatgagcgttatcgttatcgccattggttctgttggtattgcaggcgttcctggtacggctacaatggctgcatccgtatcccttagtggtactggtcttggtgcatactttacatccatcagcccgatccttgctatcgatccattaatcgacatgggacgtacatgcttgaacgtatccggttccttaacaaatgcacttgtggtagataaaattatgggtaccattgataaagatgcgtataacaatcctacacaaggtgaggaataatagttaaataattatattgattgtgaaagcagcagacattaggtctgctgctttttgcgtagttggactatgtgttgtagtagaatgcatagattgtaatgcaattgaatttatacccttcttcggtgcaatcgaaaataattattattacattttgtaatatcaaaatacaaatatttatatacataattgtgactatggatacgttttcaagtattacataagcgtataatgtacatataaaagtttctatatatgcttaataaatataagccaagaggtagtactatgattacagaagaagtaaaagaacgtttaattgcagattatccaaagtttgaagatatgacacgcaagttttataagaaagagatgtctattgcggactataagggccagtccggcgcatatggtagctacgccgaacgtggtgctgctacgggtatgagccgttggcgttttaattgtggtcgcatcaaacaagaacaaatgcgattcttagcagatactatccgcaagtacaatcttacacatattcatttcacaaccggtcaatgcttacaaatgcatggactcgatggggaaactattttacaactcttcaaggaatgttatgaacatggcatttataatcgcggtgcaggcggtgataatccaaatgtagtagccagtatcttacgcggcattgatcctcgcgagacctttgacatttcaccatatgcggcagccattagcgaatttcttatggagcaaatgttttatatcaagattcctcgtaaatttaagatgggtatcgataatggatttgatagcacaccacatgctacctttaaggatctggggttcaatttaacaaaacatcatacctttgatgtatatgcatgtggcggtattggccctaatcctcgcatcggtattcccgtagctcgtgatgtgcaacctgaggatgttttgtatcatgtgaaagctatgctcatggtatttgcaaaccatggtaactttaaaaatcgcggcaaagcacgtacccgttatatgcctgcagaaatggggggcgcggaagctttcatcaaaacctatgaagaaacattggcaatggtgaaagaggttgaaaaattgaccattaatcctgcagattatgcttatgaaattacaaagacgggtaagcgcgatgattcggtagaaagtcatcgtattcatcgtcaaaaacaagaaggtctgtactttgtagaataccacccaattggtggcgatgcgaacgttgaacatatattggcggccctcgactatgctgttacactagaccaagtggaagctcgcattgcaccggatgaagccttgtttttcatcaatttgaccgctgacgaagctagaaaaattgcggaattaaccgatgatagcgcacgcgatgattttcgtcgttccgtatcctgtgtgggctctacagtttgtcaaatcggaatgcaagattctaatggcttgctaaaggctgtctttgatcatcttgaagaaaaaggtattgatacgaaaaaattgccgcgagtacatatttctggttgcccacattcttgtgggacccatcaaattggggaaattggatttcacggtgctgtaaaactcgtagataagaaaccacaacctgctttcatcatcgtagatggtggttcagaacatatgggctctgaaagttttggtaaaatggctgggaatattgtagctgcaaaaattccagcatttatggaggcgttagccaatatacttaatgaggcaccagaagcggactttggttcttggcgattgactcataagactcaatatatggacttaattaaatccttcgaataggaataatatgaacagataacacatatgtttatgcgtaaagattaactcattaacatatgtgttatatttttttgttatcctacgaattgattttatatggtataataggctttatagtatgtgtttggaggtttattactatgttatttaccgtgaatacagaagtctgtactcgttgtggtctatgcgtagccgattgtccaacaggccttcttgttatgactgatgatggtcctaaaacaggtaagggtggttgtatttcctgtggtcattgtgttgcagtatgccctacgcttgctctagatagcgacctaacaccgcgtgctgaacaagtggatattacaaaagaaactaaatttacaccggaacaagcagagctatttttacgcagccgtcgctccattcgtaattatcaaaataaaccagttcctgctgaattgattcgcaaggtattgaatgtggctcgcatggcgccaactgcgacaaatacgcaaggaatttcatatatcgtaattcgtgataaacaaaaattacgccgcattgcggatcttgttctcgaatggatgcacatagcagcaaagacagtaccgattatgcgtctttatactcgtgcagctcaggcagaagtggataaggggaaagaatatattctccgcgatgcaccagctctcgtggttgccattggatccaaaaaagacattcatcgcactcatgattcagggcattcttgtttatcttatgctgaattatatgcaccgacagtaggtcttggaacctgctgggcagggttctttgaacatgcaggcgaagctgaatataaaccattattagacatattaggtgtgccagacgataaaatcatcgctggaggcatcttgatgggctatcctaaggtgagatatcgcaatattgtggaacgccaaccgttggatgttacatttgatacagaagaataataaggcattatgtacaacgctctatatgtgtagagcgttgttttattatatgtacgatgataactaaaaaatctccatcctaaacagatggagattttttatgttagttggctgatgtaatggagcctttaaatgtttcattgataaattgtttgattacttcggatttgtaaatatccgcaatttttttgtatgtttcgttatctttgtcttggctacgtacagcaagtatcataacagctaaaggttcatcctttggctctaagaagaatccttgtttttctacattgaggcccgcactttgaacatagttcatagggatagctgctacagctacatcgtctaagctacgaggcaattgagctgcttcaagctcttggatttgaaggtttttagggttagacgtaatatctgctactgttgctttaaagccaacgccatctttcaatgtaatgagacctgccttagcaagtaatgcgaggccgcgaccaccgtttgttggatcgttaggaatagctacgatagcgccatttggtacatcttgtgcactatgtacagagttactatacaatcccataggcattaaaatcgttttgccaatagctacaaggtcggaaccattttgtttgttaaagttttccataaatggaacgtgttggtatgcgttgagttggatatctccatcagccaatgctttgtctggtgttacataatcggagaattccacaaccttaaggttaataccttgcttttgagcctcttttgcaactgcttctgctacttgagcatgagggcctgcagtagcaccgattttaatttcctttggtgtctgactagattgatttgtatttgtgccacagcctgcgatggcgaatgctaaaacgccaacgagaagtggggcaataaatttttttaatttcatgtaaacatccctttctatatacatataataaagatatcctatcatgtaaatggggttttgtatatagagtaaaatatactggttatctatagattaaaactatggctttcaaatagttgtaaaaatgggttattaatatatatctaaaaaaatcgaaatatgatataatacatataagttttatacaattaaagtggtggaatagaaatataatacttaggaggtctttatgtttaactttgatttttataaccctacacatatcgtattcggtaaagaccgtttagatgaattagatacattggttccaaaggatgcaaaggtgcttattacctatggtggtggatccgctgtgcgcagtggtcttattgaccgcattgtaaaggcacttggtaaccgcaaggtagagcaattcggcggtattgagccaaacccatctcttgaaacgtgtgaacgtgcggtagctttcattaaagaacatggcgtagatttcgttctcgctgtaggcggcggttctgtagtagacgctacaaaacttatcgttatgggcgctacttatgatggccctgttattgaggttatgaaagctggattaccagcagttccagtggaaatggtgccaaatccattgccatttggtacagttatgacactgcctgctacgggttccgaaatgaacaatggtgccgttattacttatggtgatggtaaatatcctgtgttcagtagcttagtattccctaagttctccatgcttgatccaacattgactttcacattgcctgaaaaacaagttaagaacggcgttattgatactttcgtacatacgacagagcaatatttaacatatcctgtagagggccgtattcaagaccgtttcagcgaaggtattttgaaaactatgattgaaatcggcaaagaaacagtagaaaatccagaaaactacgatattcgtgctaatcacgtgtgggcgtctacattggcattaaacggcttgattggtgccggcgtgccacaagattgggccacacatcttatcggtcatgaattgactgctgcataccatcttgaccatgggattacattagctatcgtattgcctgcattgttagaagtgaaaaaagcagacaagcttgaaaaattggcacaatatgctacacgtgtatggcatattacagaaggcacaacagaagaaaaagcagagaaggctatcgctaaaacgcgtgaattcttcgagtcccttggcgtatctacgcatttaaaagactatggtctaggcgaagaagcagttgataaagttgtgaaacaattagaagaccatggcatgactcgacttggtgaaaaaggtgatattacaccagaagtggctcgcgaaattttaacgcgtgccttataattagtagaatagtgtatatattagaaaagacacctggtaggtgtcttttctttgtacattgtatggggaatataatggcattatatacattttatgaatatcataatctagtgtaaatgaaagaaggcgatatattaatggaacaattacataaagggcgtcaagcttttagttatgcttttcctattatgattcctatgggcataagcttctttttcataggcttaggatttggtttatatgctacgagccaaggattcccttggtggacaccgcctgttttggcagcaaccatttttgcaggatctatggagtttgtaacgataggtatgttgatggctggatttgatcctattaatgcctttgttttaaccatgttcgttaatggtcgtcattttttctacggtttatctgcgctacaacgatatgttcatatggggtggaagtggtttcctaccgttgcttggatgtgtgatgaaagctttgctatcaacatgtctacaagattaccggatgatgtggataaaaaatggttttacttccacgtgtcttggcttaactatatattttgggtatttagtacctttgtaggtggtctatttggtaatctattgactactgtagatttacgaggcattgatttcgtgttacaagggctatttattgtggtatttcttgaaatgctacttaatgcaaagaataataagattcgagcctttggtgtagctggtgcagctatggcggtagccatgctcttattggtggggaaatctctctttatgcttttatctatgagctgtatgctggtagtttgctatattgcgtacaaatggggaggtgtgcgccttgactaatatagaaatggttatgaccgttgctatcgtagtagcaggtacattattgactcgttttggggcgttcctcatattcccacctgggaaaaaggcgccagattttgtactctttttaggcaaagcattacccgctgcagttatggggatgctcgtcgtgtatacctttaaggaaaccgttgttttagcatacccatatggtatccctgaattaattgcactactggttacagtaggattacatctatggaaacggaacatgctcgtatccattgccgtaggtactatagtgtatatgcttatcgtacaaaatatttaatattactcccgaatcaaagagcgttttggaaaagaggatagactgattactggatttgagcggattttaatttataaaattagttagagtaaacatgaatcctcgtattcttattatgctgagagtattatgttaatgaaatatccccttcgtcaaacgactttggccctgcgaagcccgcagggcgaagtcagacccggccggtggaggcttgacggaggggatatttcatttatgtatgttgctagagataagaatgcgaggattcataaactataactattttagttgtaaaatccgctcaagccctgcagcagtatgatgattttccaaaaacgctctttgatcaagtagctccatgagatccatatctgtaatggataatttgaagtcaaagacgtcaaagttagacttcatatgctctaagcttgttgcctttggcaatggaatgatgcctcgttggatgtgccaacgtaagatgatttgatgcttcgtttttccatatttttcagccaagctcttgatgatagggtggtcaaatataggctggcgatcacgagtaaatggagaccacgccatacctactacttgatgcttacgcattaattgtaataaggattgacgttggttaaacgggtggcactcgatttggttcaccacaggttttacattgcagtggtatagcaagtcgattaaacggtcttcgtagaagttggaaagacccaacccgcgtagcacgttttggtcgtataattcctccatagcgcgccaggaaccgtagtaatcgcctattggttggtgaataagcatgatatctatataattagtatttaacttctttagagaactttcaacagcacgcatcgtagcatcgtaaccggcattggtatgccaaattttagtggttacaatgatgtcggaccgattaataccagatgcactcatgcccttgccgacggcttcttcgttatcataataagctgccgtatcgagtaaacggtatccagcctgtaaggcattcgttacagcttgctccgtttcctccgacgttcctgttttgtaggtgccaaatccgatggatggcacaaagctaccattatttaaaattctaaaatccatacgttcttccatgagaaacctccatatgtatacttgtttaggaatattatatcagatattatttctgactagtaatatctaatcatatagggaattagctttcatacaattcttattgattttgtgatatactaaggtattgataaaaatcaatacaatggatagagataaggtgaaagtatgaacaaatttcgacttggtgctgtaatggcactattggtcattgttgtatgtgcgattactggttgtggtacatctacggtatccgttgccgatgttacttataaagatatgccgttacaaattcataatgaagcgaatgtaacagctcttaataagtccactattacgcccgctgtatcaggtgcggctacgtatgctgtgaaggtaggcgataaggtcacacaaggtcaagtggtggcgacaattgatacgtcggcattgcaacaacaattagcatcgctacaagggcaacttagtgcggcccaatcttatacgccgtctgttgaaacaacgacgacaacgacggcgcctacggttagtagtgctcagcttgaaagtgctcgccaaatgcgcgaggctggtaatattaccgaaaaggaatataatcgtattttagaacggtctcgacctcaaactgtgacaaccacaactggtggtggcggtggtggcaacggtgctagtgttgctgctattgaggcacaaattgctcaggtgtccgcacagatagcagcctctaatattacggctcccatagccggtgtggtgactgctatttacaatgaagatcgtcaaatggcgattgcagatcgtccatttatgttgatacaacaagagacgcctatggtagcatcattgagtattcctcgtgatgcggctatgaaattagctagcccagaggcaaaatcaagtattaaagtgtctttacatgtcggtgattcagatattccaggtgagttgacctatatagatacaaaccagcctgaaaatgtaccaagtgtactagttaaggctactttcaacaacgaaaaaggagctattaaggctggtgaattttatagtttgaccatcgaatctagtgctcaagctaagatgctcgttgttcctgctgcggcagtacgtgaaaatcaagatggtaaatatgtatatgtattaaccgctgataatacggtagacgtacgtgtcgttgaagtaggggatgaacaagatggatatgtgtccatcatgacaggcctcaatgaaggcgaacaagttattacaaccaagggtacctttgaactaggtgaaaaggtgaaggttcaataaatatcttatgtgtagctagaaactagcaaccatgaatgttgaaaaggaggagattattattttagagtttaaacgttttgaattaagagataaaccattaatcgataaatattttgaacaacatcattacgaagcgtcggataattgctttactacattgtatatgtggcaagaagcctatggcattcgttgggctgaagaaaatggcgtattgtacatccaaggtggtggtaagcgagatccgttcctattacctccatttgctggtaaggatgcgaagttcctcgatggtttattgcgtgcaaaagaatggtttgtagaaaataaattaccattcattttcaaaggtgttagcaaggttgtgaaagaacggatggaggaactatgcccaggccgttacgtattcacacctgaccgtgataactacgaatatatttataagtctgaagatcttatcaatttgtctggtaagaaattccgtcaaaagaaaaatcacttgaatcaattccgtatgcaatattccaactatgaatatgtgccaattacagaagacatcattccattgtgccgtgagacagcagcgtcttgggtggaaactcatcacgaagaaggtattgaagatgaattagtggctattaatttactctttgatcattgggatgtcttgggcttaaaaggcggcgctattaagttgtttggacgcgtagaggctttcagtatcggcgaattaatgaatgatagaatggctttaattcacatcgaaaaagccaatccggatattcgcggtttgtatcaagcaattaataatgaattcatccgtcatgaatttagcaatgtagagtttatcaatcgtgaagaagatatgggcttgcctggtcttcgtcaagcgaaggaatcttataatccagatcatttcgcagaaaaatatgatgctgtatatgctaatgaagcagataatgcaacgggcggtaaataattaggtcaatttaataatgaatgtgagagtggtactgtatggtgccactcttttccgttataataaagggtagagtgtgtgaaatacattctacaatatgaaatatatggctctagagctatttaggatagaaaggaaatcgtatggattttagaattgctacatcacaagacacccctcaagttgaagcgctatgggcgtattgctttgaaccaaaagaagatcccttctttcaatattatttttctaactgttatgagccggagaatactgtcgtaggtatccaagaaggtcaattgctctccactgttcatttgcgtcaatataacatcaatgtgcgcggcgctatcttgcccactagttatatggttggtgttgccactcatccagccgcacgtcgtggtggcataggtggtgcattattgttgcactccttggaagaattgcgtcgtcgtggtcaaggcattaccattttaatgccttctaaagcgggattttaccaacaatatggctgggatttgtacgctcatcaatgggtacagaccatgccattagagagtttgcgtcctttgacggataaaaccttatcctttggattgctaaatgatgtagagcaatggacattgcttgatcctgtttacaaagcctatacgaaggatttatgtggctatgcggaacggggtgagaaggaatggaaacgtctattaggcagtttctttgctgaaggtgtgaacattgcggtcgtgaaaaacgatgaaggtcaaatcgaaggttacgccgtctatcgtttaggggctcctgaaattcctgttacagaatttgtatatacaacgcgtcgtgttcaacgtggtttgcttaattatttttataaccatcgttctcaaggtgaaagcattcgctggaatgaagggttacatgatacgggttatagatttgttcctgatggaaaaacaggtcatacaacgatgccgtatatgatggcgcgtatcgtagacgtagaaacagcgttgactacggtacctgttaatccagaagccgttatgatgccaattaccctaaacattaaggttaccgatacattatgcgattggaataatggcgtatttgcccttaccctaggtgaaagcactttacctaacgtaaaacgcgtttctgctgaatctgtggatgaaatcgatatcactatagacattggcggtctaacagtcctgttgatgggggctgtatcagctaaagatcttgtgtttgaaggtaaattacaaggcgaatctcattggattgattatctagatatggtatatcctaaagaaaatacatatatcaacgaatggtggtaatatgagctggagaacatatacagtaaaagaagaggtagatacaacagtatctgcttatgtaaaagagcgattttctttatcctctcgaaatgtgcagatgatattccgtaagaaacgggtgaaggtaaatagccgcgttgctcattccaagcgtatgctaagaaaaggggatgttattactattgagttaccacaagataaggattatggtgtagaggttgaaaaaggacctatagaggttctctatgaggatgaacacacacttgtggtgtataagcctccatttatgctagttcatccagcaggtcaaacgaaatatcatacattgagtaatctggtggctggctattatgctaaacgcggcgaagttcataaaattcggcctgttcatcgcttggatcgagatacgacaggtattattatgtttggcaaaacccgtgaggcagaacaatattacactaaacagctacaagaaggtcgaattcatcgtgtctatcgcggtctcgtagaaggaaagattacatctgatggtgtggtgaatgaacctatcggtgtggatccggtatttgataatcgccgttgtgttgatgaatttggtcaagaggctataaccaaatatcgtgtgattgaatatgatgatgtgcagtccttgttagagtttacattgctaaccggacgaacgcatcaaattcgcgttcatatggctcatattggtcaccctatcattggagatgctatgtatggtatgcggaataaaccgtatacgagacaggccttacatgcctattcgttaacatttacaccatacggacaatctgagcaggtgactgttatcgcacctgtaccttccgatttaggtcgtgaattgcaaaacaaaaagctgccctagggcagctttgtctgtatgagcatataggttttacaacgaaaaaaggactccgtatggagtcctttttcatgtaaggggagtgttagtattaacatcaaatgacctatgtatttaaacaagtagtaggtttggggttagtattacttgtcgggagataaatacattaagtaatcagggaatatttacttataattatcatttgatacagtaattataagtaaatactatgaaggtaaaatgaacttctaaaaaatattttatgaaatttagatgaaatgtaaaattcgtttattaaatgttgataaatgccatacttcttgatatgataatagaggaggataatatcttctctttattttttttaaaaatatttaaaaaaatcgttctagttataagacttttgttgttgggttagaaagggggccactatgaagttgcttatagctttgatggcctttttttgcctcataacatattcgaatacagcacaagcgactgattggtattatgtaagtcctgatgacaaaggtaatcaattgtttatagataatgatagtgttcaaaaaagcgattatgatgctgttctttggctaaaagttaatgaaccaggtggcgatgaacttcgctataaggtatatattagccgttataatcggaccatggaaattctagaggtagatgcgtatatgccaaacggcactcaatatgataatgttgattatgataaagatcctgaaccgattgaaggcaatacgaatggccaagccatctatagattgttatggcaataaatagtttgaatttaatattttagatataaatttaaaaaattaaatataaaaatacctagctagacagcaactagctaggtattttttatgtgtaaatgtattgtaaacacgcaggggtgttacagtctgtgtagataggtaaaatttaagatatccactagtgattggaaacaaccgttagtttatagctgagcggctgtacgggttaattccaaatcattaatcatttgtaaatcgtcttgcggggatctaccgccggttgttaagtaaccgcctaccatgatgccattaagaccaccttttagtgcgtacgattgtaaatcacgtagatttacttctcgaccgccagcggtacgaattaatgcatgaggtaaaatgaagcggaatacagcgaaggtacgtaaaatttccatcggttttaacgctttgttatgttcgaatggagtacccttaatcggatttaatatgtttaatgggatggaatcaatgttaaggcgtttaagttcaaacgccatttctacgcgttgttctagcgtttcgtttagacctaagataccgccagaacaaacgcgaatgccagcttttttggcattttctatggtagacatcttgtcctcataggaatgtgtggagcagatgtcagggaaatgacttggtgcagtttcgatattggaatgatagcgagtaacaccaacttcttttaattgaagagcttgttcataggttaacaaaccaagggaacaacaaatttctaaaccaattttttcgcgaatttcttttaatacgcgtaagatttggttgaattcattagggttggaagtgttgcgaccgcttgtaacaatagagaagcgaatagcaccagcttcttttgcttttctagcagcatctaaaatcgattcatcatccataaatggatattcttgaacgcctgtattgtggtgtgccgactgtgcacagaatttacagttttcaggacatttaccagaacgagcatttacaatcgcgcaaatgtctacggaattatcgttaaaatgttgttttattttatctgccatagccaatagaatcatggtatcttcatcggatgtatggattaaatcgatggcttcctctttagtgatttctccaccatgtaatatacgattggcaatggttaatattttttcataagaacccacctgggtttgttgctctactggaagtgccattatagcctccttgttattgttaacttataaaaacgaatatatttacaatgtaattgtagtattcttggatactaattgtcaactgtataaataaattagtttacaatatgatatcttacatattatatagaaatatatagtataattagatattagtattctataagttaggaaaggagacaatatgcaaccctttcgttttatacattgtggagaccttcatttaggggctccttttcaatatgctatggggatgagtcggcatgtagatcgtgccgtcgcagaagcaacctatgaagctttcaataatatcattgaaatcgctgtgcgcaaacgcgttaatgcagttgtgattagcggtgatgtttataatagtgaagatcataatttagaggctcaggtccgatttgtgcgtgccatgtatcgcttgtgggaagcgcatattcccgtatatatggtgcaaggtaatcatgatcctgctgaaagctggcgcgctggcttatcaatgcctgataatgtacatgtgttttcggatacacaggtacaacgatttccgttgatggttaataatattgaagttggtggtgtttacggcatcagttgtggtcatggcaatgaacaatctaattttgctgcacaatataaagcctttgaacgagatgagttttcccttgctgtcatgcatggaacggttggatctagtgtgggcagtgaacatcatgatgtaacagggccctgtaatttgacggatatcatgcaaggcgctatggactattgggcattaggtcatatccataaatcacaggtgatttcagaagaccctatggtcgtatatgcgggcaatcctcaaggattacatcggaaggaatctggcgctaaaggatgctatatggtcaacgtatcacataatggacattgtgaattagaatttattgagaccagtgccattcgttttgaagatataaagatcgatattgcaggcatacaaactgaacgtgagttattagatttgttgagccataaaaagcagtccttacgtaaaaaatataataagaatacattggtatcagtccatttagtaggaactggtccaatgcatcgcttatgcgtggatgagtccgttcgaaaattatggctacgggagacgcaggcagaggaaaagagtaaatctatttttgttatgccataccgcatgattgctaaaacgcgtcctactgttaatttggcagagcgccgtttattgtccgacatggtaggcgattatctacgtgcctatgatgaaaccgttactgatattgaggccgtacgtcaaatcttggtcgatcgtcctgagtctaaacgacttggcagttatttagatttattatcagacgatgtattgaaacgagttatggaacgcagtgaaatggaaggggttacggtgttaatgggggtaaacgatgaacattaaacagattcgactcgactcatttggaccgtatgaaaactggacatttaaatccggtcctaacggtgtacagcttgtatatggcgctaatgaaagtggaaaaacctccttattagaaggtatacgttctcttttgtttggcggtaaacataaaaaatatggttatgtaagtggatctcttgagctcgacaaagatgggacggcttatcatttaggccgacaaaataagaatttagatttttattctcctggtgagcctagcataaaggacgagccgaatcaattgtggtggcatgggctcgataaaaaaacgtataaccgcatattcggccttacgttagaggatcttcaaggcgtagatatactcaatgaagtagatgtacgagctagattctttggcgccgaagggggcgagcaactcggtggtgtagtaaaaagcattgaaaccaatgctaatgacttactggttgcgtctgcatcaggcaaacgccgcatcaatgttttgatagatcaactacaggaaaacaaggctcgtttatctgcactgggtgaacatgaaacgcaatatgtagaattacaacaagcgttgaaggcttccgaggatacagaagcagaaattcagaatcaaatcaaagaatggcaagattatcgtgaaggcgtagagatggtgcttcgtgcatgggatacgtatcgacgtagcgaagaggcgcgtcgtcgtatgcaacagtttacatctcctgatacactagatcgcgatgcgtttttaagtatcgatgagggccttcgtgaagctcgtcagaatatgcagctttggcttgataaagaagaagcactaaaaccggaaaattttgatcctaatagtccatttactacctatggtcaagatatagaggatttgattcaacaaggtgcgaagtgggaacaattgcgccgtgagtgtgaagaaggcgaagcctacattgctaaggttaaagaacaacttgatttctcgagagggttacaatcttcatggcgcaaggatgaatcggttccaactgatgtgaattggtttgaaggggaacgtttatccaaacgattgcgtaccgcaaaggaccaattattatattggcaaagccaagcaccatccttgcaaaaagaaccaaaaataagtgaagatagttcatctgttgacactggtgaaaatagccctgttaacacctgggctcagcaagagttgcaggctgttatgactgatattgcaaatctagagtctcgacttggagaacatggttccatacgcatggccgcgatgccgatttggttgcaacgtattggggggattggagccgtcgttggtgtattgatgtcgctagcaggacttattgcactggaatctgtactatatagcatcggtggtattattctattaatacttggactgggattgttctggtatggatggcgccttcgccatgtagatgattccgatgtagctcggttgatgcgtgaactggaacgcttacagcaacgtaagtcgtatttggaaacacaattggatgtacctttacctgtggcgtcagatgtaccgaacttggaaacggcagctattgagcaacgttacaatgatgaaggtaaacaattacaggctaattatgaaaaagccttggctgaatggcaagcatggattcctgaaggagcggctaagagtctcgatgaagatgatttctttagtatgaagcatgaatttgaccagtattatgaacaattgcggaccattgaaggatacgagaaacgcttagatgaacataaggaatctttgcgcgttatagaggaccaagctgttaccttatggtataaccttggtgttgaagcccctgtgtctcctactgagctaaaacgtatttataaccaatataaaaactttcaacaacaaatgattcgttgggaacaaaaagaatcacagcgtaagagctatcgtatggagtatgataattggcatcgcaaggaaaaagaacttttacttgaacaaaaagcattgcttgaaaaaagtggagtgtccggcgccaatgaatatcgtcaaaaactcattgatgaagatcagtttaagcaatgggaaacgatttacaaacaaagccaagtacagcttgatttgttaactccagatggtgaaaataaggatttgttctatcgccgtttgcgtgaggggaataaagagaattggactgatgaattagcccatgcagatcaagagctgaatgcgcgcaaggatgcgatggctaacctctatgagaaacgaggccaaatcgtggaagctatgcgtgcattgggttcagatcaggagcaacgggaagccattcaacaacgacaagagttagaatctgaattggaatctgccttggaagattgggctactcaagttgtcatcgctcattgtatggaacgagcgcaacaatcatacgaagaagagtcacaaccaaagatgttagaattagcatctcaatatattaaacgattaacgaatggtgcttatacatttgatatgtggggattgcaagacggtttagcccttttgaatgaacggggtgaacgattaccgatttatcattggtctagtggcttagcggatcaggtgtatctcgcgttgcgtttggcactagcaaaggtcttttcgtaccaagtggatgcattgccaatcatattagatgatatcttagtccgatttgatgaagatcgccaaaagagtgcacttgagttgttagctgaacttggtgaacatcaacaaatttggttgtttacatgtcagcaacaagtgtattacatgggtcaagctattgctggtatagatacgcatatattacaacgtgcataaatttctatccctaaaaatatagataataagtggctttgcatattcatcacttttggggtacacttttaatataagcgtgacagtctaatataaaatcttatatacatgtatgggtgtgttttgtagaaaggggtggaaatttgaatactgcttatttagatatgattcagggcaagaaccctggcataacaccggtatggtatatgcgccaagcagggcgcagtcaggccgcatatcgtaagataaaagagaagtacacattgttcgaaattaccaaacaaccagaactttgcgcacaagtgacagaactgcctgttaaagaatatggcgttgatgcggctattctttataaggatattatgagccctatggtggccattggcgtgaatgtggatattaaacctggtgtaggtcctgtatttgatactccaatacgccgtatggaagatattgaacaattatatgcgtttgatgcaacaaaggtagagtatatttccaaaactattgagttgttgactaccgaggtgcttgatgtacctcttattggtttttgtggtgcaccattcaccatcgcgtcttaccttattgaaggaggtcctacgaaaagttataacaaaactcgtgggatgttaatcagcgaacccgaaatttggaatagactaatggaaaaactagcggatatgtccatcgagtatttgtcaatgcaagcacgcgctggtgctaatgctttacaaatctttgactcttgggtgggggccgttaatagtacagaatatgagcaagctattttccctcatatgaaacgtattatttccacagtaaaatctagattccctaacttgccgctcgctatgaatggtgtcggtacagaccaccttgtttctacttgggctaaattacctcttgatgttatcgccttagattggcgaagctctcttggggcggctaaggatagaggtgttacacaaacagtacagggaaaccttgatccggcttatttatacggggatacaaaaacaatagccaaggtggtagatgaaatcttaatggatggcgttcgccatggtaaacatgtatttaacttagggcatggcgtattccctgaggcagacccagcgaaattacattggttgacagattatgttcatgaaaagagccgtgaattgtgggctcgtgaaagccgataatatgaagcaggctatactgttattatcttttggtacacctcgtcaaccatctgatttattaccctatttgacgagcattcgacgcggaaaaattcccacagaacgagagttgaaggttctaactgctcgttacgatgccatcggacaatgggataataagctgttgcaaacgatgggggaagagcaaaagaaaactcttaaatccctattggcgatagacgcgatgtatttggcctatcttcatatgcctaatagtatggaacaagctatagaatccatagcaactgcagggtatacttctattttatgtattgtcacatcgccgttttattctatggttggaacgggcgcatatgaacggaaattacattctatattacgagcgtatccggatatatcttgtgaaattatcaaatcttggtggaatagaccacagttttttgaatactggcgttcacagttgatggccgcgaatccattacaagctgatacagcctgtattttctctgcccatagtgtacctacttcaacggttggtagctatgaagatgaagtcatgtccgcatcaaatcaaattgcaaaaatggtaggccttaatcactggtatcaggcatggcaaagtgcggcgccctatggtgaatggttaggtcctaccattgaaagtgtcattgaacaggctcttatagatggagcaaaacggattgtatgtattccttttgggtttgttagcaatcatgtagaaattttgtatgataatgatattatttgtcggaatatcgttgaaaatgctggggctacatatgaacgtctgcctatgcccaatggaaataccctatttatggaggccatggcaaaggctatacgagaaaggattaataagtgaaggtaacgattgttggtggtggccttacggggcttactgcagcctattatttaggccatgccaaaccagattggcagatacaattatatgaacaggcccctcgatttggcggtaaaattcaaacgcaacaagtagatgattttgtggttgagttaggaccggattcctacttgggccgcaaaacggaaatgacagatctcattacagatcttggtctagcagatacgcttgtatccaatgaaacggggcaggcctatgtgtatgaccgcgataacattcacccaattccaggtggttccatcatgggcgttcctacggaaatgatgccttttgtgaaagcgaccttaatttcctgggctggtaaagtgcgtgctggtcttgattattttaagaaaccgtatcccttagatgctcacggtgatgtatcgattggtcattttttccgctatcatttaggtcaagaaatgatggataaattaattgagccattattggcgggtatttatggtggcgatatttataaaatcagtctattatctacgtttccacattttattcaagtagaacaaaaatatggcaatatggttaagggcatgattgctgctaagatgagccatcaaaaggcgggggtatctaaggctgccaaaggtgctgttaatgaaggcgacgttccccgtgctggtaaaggaacgatgacggatgctcaatttgataagaaacaatctagtattcagcgaacgaatggaaatctaaaagcatcaaaaggaaccgcatcacaatccggtatgtttagacaattaacgggtggtcttgaaagcgtggtaagtgcgattgtggaacaaatgccatccaatgttacattgactactaaggcccttgttcgagatatatcgtatgctgatgcagtgtatcgttataatgtgaatggtcgagaagaaacctcccatatgttggttatctctacaccaccagctacgtataaagattggtttattggagatactggatttgatggcgtacgcaatatggaacaatccagttgtgctattgcaatcatggcctttgataaagcgtcctttgatggcgaactaaaaggctctggcttgttgattactcgtaaaacggatacaccattaacagcgtgtactatattaaatcaaaaatggccacaaacaacgccagatgataaaatcgttcttcgcgtttttatcggtaaacctggtaatgatgtggtggaacgttatagtgatgaagaactttctgcattagctcttaaagaaattcaacgtattatgaactttaatgcaaatccagaatggatcaaaatcaatcgtttaatacattgcatgcctcaatataatgtgggccatcgtgctgctatcgcagccgttcgggagcatgtgaaagaacattatcctaatttgtatctcattgggacaccgtttgatgggattgggataccggatggggtgaaacaggctaaggaacttgtgcaacggttaagtagttctacgtgaccggcgatagatttttgtaatcactacgttgccggtacgagatgggtttcagtaggctccagctagcttaacggtcttcggcctagggccttgacctactaaagtcgcctactgaagtccatcccgcacctgctgtaggttaaaccgcaatttatcgcctactgtagagcccttctagtaaccgatacacaaggtcctttagcctaggttagaggcaaacggtcttcgggctaggggttcaattttgtaattgtaaattgtgttttatatattttatgtgaaaaggagtgattgtatgggtaaggcaattcctactgttgagggttggcatagtcaacatatggtgttttccatggattttagtgcttggaattgttttgatgtagaggagaaggctgaggctcgcggtgagttaaaggcgtttttggctgagttggagtctatgcaccaagctaaagaaggcagttatgcattctatgatgtgaatggttataagggcgatcttttgttgtggattttggcgccgtctcttgaggatttggcaaaatgggaacgcaaattccgtcgtttaacgattgcgtctgtgcttgttcaaacgtattcttatacgtctgtaaccgaggttagtgcatatgtgaaagctaagcttgatacgcctgaggtggatgcgaaattgtatccaactgtaccaaaggataaatatatttgtttttataatatgacgaagaagcgtgaaggcaatgataattggtatatgttgcctccagaggaacgcggtcgtatgatgcgtgagcatggaatcactggtagaccatatttagaagtactatctgagtacactacaggtggtgttggtcttgatgattgggaatggggcgttactatttttagtaatgatgacatccaattcaagaaaattgtttatgatatgcgctttgaagaagcgagtgcacgatatggtatcttcagcgatttctatgtaggaacgttgattgatgaagcatgctttgatgaagtgtttgcttaatctataactaccagtagtagtactgtaaagggaaggggttaaagttttgacgctagccatacgaagccttgagggctaagtggaatcggctggtggaaaaattttaccccttttttgttttcctataatgaatcatgtatacaaaatacgcatatggctatgattttaccgcaagttagattgcggtttttatattatcaatttacagtggactttggtatactgtgtatagacattaaattctatagaatctaaattttatatgaatattgaaatggaagtaactttcacaaggcttatatataatgattatagaggttgtgaaacatcaagtgatatgagaaggagtacaaaagctatggagatgaatggtagcgttattgatcaacaacgtttagatcaggctagactcgaagcaaatggcatgtatagcagccaatttgaaaaagatgcctgtggtatgggttttgtcgtaaatattaagggcaaaaaatcccatgatatcatcgatgatggcttgcgtattttagagcgtcttgaacatcgtggtggtgctggtgcagataaggatacaggcgatggtgctggtatcttggtacaaatcccacatgaattttttaaacgtgaatgcgaagtgttaggcatcaatttacctgcagcaggtgaatatggtgtgggcatgatttttgcgcataaatatgaaagtcttcgtaatgagcaaaaacggatttttgaagaagtagtacgcgaagagggacaagtcgttctcggttggcgtgaagtacctgtagatggtactaaagttggtaaggaagcggctgctattcgtccttggatgatccaaattctcattggtaaaggccctgatgtaacgaataatgcggaatttgaacgtaaattatatgttatccgtaaattggcggaaaaacgcattattccattgagtaaggaactatctagcgacttttatattgcatccttgtcctctaaaacaattgtatataaaggtatgttgactcctggtcaattgcgtgacttctaccttgatttgagcgaccttgatttcacatctgcattggctatggttcactcccgttttagtacgaacacattcccaagctgggctcgggcgcatcctaaccgtttcttagttcataatggtgaaattaatacaattcgcggtaacgtaaactggatcaatgctcgtgaaggtaaagctgagtctccattgttccctgatattaaaaaggtattccctgtagtagatgatagcggttctgactctgctatgtttgataacacattggaattcttgcacatgacaggtcgttccttgcctcatgcaatcatgatgatgattcctgaaccttgggaacgcaataagctcatgagccaagaaaaacatgacttctacgaattcaatagctttatgatggaaccatgggatggtcctgctgctatgggcttcacggacgggactgttatcggcggtgttctcgaccgtaatggcttgcgtcctgctcgttactatgtaacaactgatgatcgcgttatcatggcatccgaagtgggcgttgtgaacgaaaatgcagaaaatattcgcgcaaaaggtcgtttggaaccaggcaaaatgcttcttatcgatacggcagaacaacgtatcatttccgatgatgaaattaaacaacgcattgcaactgaattgccatatgatgaatgggtaaaagaacatgttattcatttgtctgaaattacacaagctgatgaaagtgatgtgccagctgtagacgatttatttaagcaacaacaagcatttggctatactcaagaagatttggtacgcatgattgtgcctatggcaaaggatggtaaagatcctgtaggtgccatgggtgccgatgcgcctttggcaatcctctctgaaaaaccacaattactatataactactttaagcaaatgttcgcgcaagtaacaaatcctccaatcgattcgattcgtgaagaaatggttacatctacacgcgtaatgcttggcaactccggcaacttaacagatcctaataagactggtacatatgcattgtctatgcgtacaccaatccttacaaaccaagaattggcatctatcaaagctcttgcttgccgtcgtatgaaatctgtgacattgccaatcctttttgacccatctaagggtgtagacggaatgcgcgaagcgcttaaagaattgtgtgaaaaagcagaagaagcagcacgtacagatcaaaacgtattaattttatctgaccgtggtgttgatgcgaaccatgcgccaattccagcacttttagctgtggcagctgttcataatcacttgattcgcaaagtattgcgtacagaaattggcttgattcttgaatctggtgaacctcgtgaggtacatcatttctgtacattgatcggttatggtgtaactgctatcaacccttatttggcatttgaaacagtcaaagacttacatgcgcgcaaacgccttggtgatattacattagaaaaggcggaacaaaactatattaaggctgccgtcggtggtattatgaaggttatgtccaaaatgggtatttccacagtgcgttcctatcatggtgctcaaatctttgaagcattaggtcttaactctgatttcattaaaaaatatttcgtaaatacaccaacacgtatcggtggcattggtttgtatggtgttactacagaagcgttggctcgctttgatcgagctttcaaaaaagacgaatctgttctcgaaccaggcggttggtacggccctgtaaaagacggggaagaacatttattcaaccctaaaacaattgatcttttacaagaatctcttatcaacggggattatgcaaaatataaggaatactctaaagctatccgcaacgattaccacgttacattgcgttccttgatggaattgaactatcctgtaggcggcggtattcctattgaagaggttgaacctgaagaatctatcgtaaaacgcttcaaagcaggcgctatgagttatggtgccatcagtaaagaagcgcatgaaacaatcgctattgcgatgaatcgtcttggttctacatctaactctggtgaaggtggcgaagattctgcacgctttaaaccattgccaaatggcgacagcatgaactctgaagtaaaacaaattgcatccggtcgtttcggtgtaactgctaattacttgattcatgcaaaagaattgcaaatcaaatgtgcacaaggtgctaaaccaggtgaaggtggtcaattaccaggtaaaaaggtatatcctgaaatcggtaaggctcgtcactccacaccaggtgtagaacttgtttctcctccaccacatcatgatatttactccatcgaagacttggcggaattaatttacgatttgaaatgcgtcaataaagatgctcgcatttccgttaaattgacttccgaagctggcgttggtacaatcgcagctggtgtggcgaaagcaaaagcagataatatcttgatttccggttatgacggcggtacaggtgcggctggtcgtacatctgtaaaacatgctggtgtgccttgggaacttggtttatctgaaactcatcaaacattgatgctcaaccgtttgcgtgaccgcgttcaattagaggtagactctaaattgatgactggtttcgacgtagctgttgcggctatgcttggtgctgagttgtttggtttcggtacattaccacttgtagctgtaggctgtaaaatggctcgtgtatgtaacctcaatacatgcccttatggcgtggctacacaagatgaaaaattacgtgctcgtttcaacggcaaacctgaatatgtagaaaacttgatgatcttcattgcacgtgaattgcgtgaaatcatggctcgcttaggcatccgttccgtagctgaactcgttggccgtatcgatctggttcgtcaaaaatctcaagacgataacttcaaattgtctcgtgtcgatttgaaacgtatcttgttccatccatacatcgatgtgtctgttggtcatatgcataccatcgatcaagatcatgaattagaacgcacattggatatgtccaaactcttgcgtatgtgccgtcctgctatcgaagatcaaaaacctattcgcgctaaattggctatcaacaacattaaccgtgtagtaggtacattagttggttctgaggtaacacgtcgttatggtgaaagcggacttccagataacacaattaagttgaactttgaaggttctgcaggtcaatcctttggtgctttcattccaaaaggcatgacattagaactcgaaggggatgcgaatgactacctcggtaaaggtttatccggcggtaccatcgttgtttaccctcctaagaaatctatttttgaagctgatgaaaacattcttatcggcaacgttgccttctatggtgctacatctggtaaatcctatatcaatggtgtagctggtgaacgtttcgctgttcgtaacagtggtattacagctgttgtggaaggtgtaggcgaccatggttgtgaatacatgacaggtggcgaggttcttgtactcggtaaaattggtcgtaacttcgcagccggtatgtccggtggctatgcgtacatcctcgattgcgatgaacgttatgtaaatactggtcttgtagaattacgtcctgctaataatgatgaccttaaacgaatcaaagaattagtcgaacaacatgtattgcatactaattccacaaaaggccgtcatatccttgaaaactggaataactttgccaatagatttactaaggttgttcctgtagcatacgaagaaatgcatgctgctattgaacgattcaaagaacaaggcttgtccttagaagaagctcaattggctgcatttaaagaaaaatatgcaaaataagttctaatctaatataacttagagagaatgtaatgtagaatgcctctatagttttgactatagaggcattttcatgtataatatttgtattgcaatattggatcatggcagttctcgggcccgtgcaatgggggcctgtgaatcgtgtcaggactgagaggtagcagcactaagcggtaaccttcatgtgccacggggaacccgggggctgtcgtgatcgaatattgcaaggcggcctggggggccgctttttttattctattattgaagctaaaacgggtattagttacatgcaaagaggacgtgaaaggacgccctcttttttgtgtaatatggtataataaagtattgctaattacggactgtttacagggaaaagggggtgttcctatggcatatatggctctatatcgtaagtatcgtccgcagacgtttaccgatgtggttgggcaacatcaggtatcagatacgttgatgcgcgctattcgcgaggataaggtggctcatgcgtatctatttgccggcccgcgcgggactggtaagacaagtatggctaagatttttgcacgtgccattaattgtgaacatggccctaccgaccatccttgtaatgaatgtagcgtatgtaaatcgattttgagtggtcagtctatggacgtcctcgaaattgatgcggcgtcgaatcgtggtatcgatgagattcgtgctttacgtgaaagcgtaaagtttatgcctgtagaggggcgtaaaaaggtattcatcatcgacgaagcccatatgcttaccaatgaagcgtggaatgccctattaaagacgatagaggaaccaccagatcacgtgatgttcatctttgcgaccactgagattgaaaaactgcctgttaccatcgtatctcgttgccaacgatatacatttagacgtatcacatctgatgatattgcacagcggttacaatatgttgcggataaagaaggctttgccttagaagataatgcagcacgtctcatcgcggttcatgcggatggtggcttgcgcgatgcgttaagtattcttgatcaatgtgtgggcatggccagtggcgagattacaccggccgttgtagaggaactcattggcctcgttagtaaggactggattattaaattcctatctgccttgcataatggagatggcccagctgtattgaaatatattcaaaatgcactcagtgaagggcgtgatggggcccaaatcatggaggctcttacgcaacacttacgagctctattgattgctaaggtcgctcctgatgcggaggaattaaaggtatatgattcgttccgcactgaattcttagaacaagcacaagacattgagtttggtaccatcaatcaatatattaaacagttacaatccatcatgagcgatgcgaaacaggtagataatccacgcacggttattgaaatgggcctattggttttatgtgcaggcgtatccaaggctcatgacgatgtggaagaacgcttatcagtcttggaacattcagagcgagaatctcgcgaagggcttcttaatcgattagctaagttggaacaacaaggtccaccgatgtcggcgccatctattaattttgtggctacacctaatgcatcaagatcaaatgtggtagatgatgattttattccaccacctatggaggaatacgaatctgttacgattcatgaggtgccaacaaatcataagccttcacctattgtagcggaatcgaaacctagcggtagtaatcaaacggctactataggtttgacgccgccacctatgcatggtgttggtatgactccaccaccgatgaagaattctggtgcagtaccacctaagactagcacgtctcgaacgacgagacatacgagacgtcaaaagaatacaggcattagccaagtcgctgttatcggtgaaaccatggtggactctggggaatatagaaccattcagactactgtgataaaatatctaaaggacagcgataagggattagcatataatattattggtcaaggccaagttatttatgtagatcgtgaaaaagcagtagtagcttttaaaaagggaatatcccttaccttggctactaatgaagcaaatcgcaaggaaattgcattagcgttccaatatgcgttgggctattccgtgtctttagagattgtcgatatagagacagatgtctataaagaatatatgatggctagcggagcgcggtctaatcgagctgtacagcctaagaggtcacagcctacaccggttgttgaggccccgccaccaccggtagaaacagacttacttgataatggtgaaacagtatcctctacgcctatagcgaatcaggatactgaagagaagtctggagctactatacaatctgaaacccaagatgtatctggtggtgtaaaaccgccagagcctataagctccgaagctcgcaataatgctagagaggctgcgttagctgctcttaaagcaagaggtataaaaccaccgagcagtaagggagatgaggattcatctgctaagaaaaagacagctcatgatgacggtggtatacccgttatgagtttagacggaacacaggtaatgaccgatgatggtgaagttatcaatcggcctatggatagcggtgccaccgtggaggtagaagccgtcccaaagcgtgaataccagtgggaccctgaacacatgggcgttgaagaacaacaaaacccactgttggctaaaacattagagaaactttcagaagatcatgacatttatgtagaggtcatagaagagtaaattgcaattttcagtatatagttaatttattttgcaaggactttcacagtcctataaggaggaaatacaatgttcggtaaaggtatgggcaatatggcaggcatgatgaaaaaagttcaaaaaatgcaagctgacatgaaaaaaatgcaagaagagttaaaaactcgtacggtagaagcatccgtaggtggcggtgctgttaccgttgttatgaatggcgaaaagatgattgaatctttgaagttgaatccgtccgcagttgatcctgaagatgtggaaatgcttgaagacttggtaatggctgctgttaatgaagcaagcaaaaaagtagatgacctattgtctcaagaaatgggcaaggtaacaggtggttttaacttgccaacaggtttattctaaatgacaaacgcattagaacggctcgtagaacagttgcgcagattgccaggcattggatcaaaatctgcccgtcgcttggcataccatcttgtggaaatgccgcaagaagaggtggaccgattggtcaataccattgttgaagctaaaggggcaacccgtcattgttctatctgttttaatctatctgcgcaggacccttgtgaattttgctctaatcctaatcgggatcaaaccacgattatggtggttgaaacatctcgtgatgtgatcgccattgaacgcagtggtgattataaggggctctaccatgtactagaaggcgctttgtcacctttagagggcatcggtgccgaagatattcgcgttaaagagttgattgctcgtttgcgcgacggcgtcgtacaagaggttattctcgcaacggaccctgatgtagaaggggaggcgacggccttatatttggcacgtctactagcgccgactggcatcaaggtaacgcgtattgcccgcggtgttcctgtaggtggagatatcgaatatgccgatgaattgaccttgggcggtgccgttgtaaaccgccaggagatgaaaggataatatgaacgtattactcgcgccattattggcagcgcctatgactgaggcggttatatctgtatttgtcatagttattgcattgaaattggcttttttcaccattaaaaaggtagccatcaatgttgcactaggcattgtgacatacatggtatgtatctatgtgttacatataccaatggatattggctttggtgtgtgggctttgaccgtactatttggacctattccgatggtactggccgctctatactacggcttataaaataaggagaggatatcatggttatcaatagcgaacaacaacgcgtcatcgatgaactagatagaaatatcctcttgttggcgtccgctgggacgggaaaaacgaatacactggcttatcgagtggctcacattattgaaagtggccgctgcgaggctcatcagattttgtgcatgacctttaccaataaggcggcacaagagatgaagtcgcgcatcgaatccctcgttggccaacctgcaaaggctgtggagattagtacgttccacagcttttgtttttatgttcttcaacaagagggcaagcgagatgagtcgctctatacagatgtgaccatatttgatgaagaggattgtaaagaactatatttgccatataaaccgagaaacatgcgggatatgaactttgctagccttataagcatggtaaaggaatatcgttctgtgtatgaattttattctgaatcgttgatagatgattacaaacgaacgatacaacgtttagagcgggagcaatctaagcaaatagagaaattattttacaattacaatactcttgctactgaggacttgtcggacttttgggctcatggtcatgaatggattgctcgttatgatgaaagtttacaatctgttcacggcgttgattttactgatttaatctgtggtgtgcatcgactatttcaaaatccagatattcgagaacggtggcgtagtcactatcaatatatttccgttgatgaaatgcaagatacgggctcattagaatataaggttatggaaatgctatgggaaggcaatcacgttcttttatgtggcgactatttccaaactatctacgaatggcgcggctcagatccgttctgtttattagaggcatttacccgtgattttaatcctctaaaaatcatattctataaaaactatcgctctaatcgcactttgtttacaatggcttttaaaacattgcagaacatgtttcctcaactcgttggaactgtgtacgatgaaatgccagaggctaacagtgctagtgatggggcacctgtccttgtgaaagattgtcgtaatgaatatacggaatcaaaatttatttatgaccgtatttgcgcgcttccaaagaatgcatctatcggtgtgttggttcgcgataatcgcaaggcacagcgtttaagtgaacagtttgaacgatataatcaagacaagccagaatctgaacgtcgtccgtttatgattattgatgaatataaattcttccgccgtcaggaaatcaaggatatcatggcgtactttaagctcttgatgaatcctaatgatgcggttagtgcgaaacgcattattaaacgctatgtatcgggcattggcgacgcgcgtattcgcgatattgaaagtccaaaaaatcgcagtgtagggctaaaattgacggattttatggatatgcctatctttgaagctgagccatatgccaaattggtagctggtcttgaggtgggggaagtggtggtgtacgatgtagaaagcaccggtactgatacgacacaagatagaattatacaaattgcggcaatgcgcattgataaagatggcaatgaaatagaacggtttgaacggtttatcaatcctggtaaatcggtaggtacctctcaactcgttcatggctttacggatgcatatttagcagagcatggtgaaagtccaaaggtcgtactggaggctttcaaagaattttctaacaatcgtatcattgtaggccataatgtaaattatgatattagtattttgagccacgaattagcgcgccataatttaggcgagcctcaatttaaggccgtatatgatacactagatatctttagacggttctatccaacactggaaaatcataagttaggatttttgtcaaaatattttcctatcaatcatacgcctacccataatgcgatggatgatattatcgctacgggccaattattaatctacgcagtccgtgaaaatattatgcccacaacgacggatcgcatggtagccattaatcaatataaggcggctttcacaacgattgcgtctcaaatggcaaccttgcgcagaaagatgcataccgataatcctacggaattattggcctatattatgaatcaaatgggcatactagactattataagagtcatggcgaaatggccaaggttgaacatatacgagatttgtatcgtattatggaatcattagataaggaatatgaaggtacaacgggattagctcgtctcaatcatattttgcaattagctgccttgacggctggtgagccacaacagatgagtaaacaatctaagataccgattattacggttcatcaagcaaagggtagtgagtttgaccatgtatttttggcaggtatgaatcaagggaccttcccaagttttatgtccttacgcgagggcaatgaggatgaagaaaaacgcttgttctatgtggccattacgcgaccaaaacaggagctggttattacctataccaatgaatcacaacggggccaaggcacagcgccaagtgcatttcttgattatatgccaagggatgtaaaactcgtagaaaggagtatgtaatggcacgaaaaacgcatagaccagatgatattttttggtcagttactacccaggatatagaatccatacaacatgcaactacagatgctataacattagggcaactgttagatactaaatatccaagaaaagcgatggtaaagttatttgatgagaaattaatccatgtaaatggtcataaagcaacacctcatacagaggttgccgtagatgatgaaatttggatagctatggccaaagagaagattgattatgagccaattgcaatggatttacatattctctatgaagatgacgatttgctcattgtggataagcctgccggtgttacggtaaactcaaaagatcaagtatcccttgctaatggcattgcccattattttatgaaacatggtattaagcgaaaagtacgttttttgaaccgtcttgaccgcgatacaacaggctgtattgtaattgctaaaagcggtctagcccaaagcttatatcaacaacaaatggatgataacacatttgaaaagtggtacatggctattgttgaaggccttgtcgaatcagattcggattcgttggtgcttcctatggatagaagtattgatggcattcattacgaagtaaattctaaggggaaagaaacacggactgattttaccgttttacaccgatatccgtatggggctgtggataactctgtgcataacctacaaaatattgtggatatatcccatgaaaatgtggacagcacagtgaatactgtggataaacagggtggaattgtggataattctgtgcataacttagaaaatcagccttgtacagcagtggcagttcgcttatatacaggtaaaacacatcaaattcgagtggccttcagtcatataggtcatcctttgttaggggatacattgtatggggcgaaatctacgggagaaccatttgcactacgtgcaatgaaggttgtttttacacatatgcgttctggagaccgtataaccgttcaagcttaattagaatgggcattcagtagtagaatgagttcttaaatacataaaagtttctaattgagaaatgagaatgactgataagttcagtaaaatcaatggatttcgtgaaaatatattgaaaattatagtgacaaatgataatccataagctataatacaaataaacgtacacatataaattatttaatattgtacatatagtatgtaagaggtgtaatagtatgattttacaagataatagtgctgaacgtaatcggggtattacgctcgccagtatcaagggcattataggcaatgtggtgcttgtcatttttaagatgataataggattggcatcgaattccatcgccataatccttgatgcagtaaataacttaacagacgttctttcgtcggtgttgacgattgtcggtacaaaactggctgcaaaaggggccgataaggaacatccatttggacatggccgtatagaatatatgactaccatggctattgctttcatcattctcggtgcaggcattgggtcccttaaggagtcgatagataaaattcttcatccagaggtatccacatttgatattccaagccttgctatcatcgctgttgctatcgttgtaaaggttgtgatggggcgatacattaagtctcaaggtgagaaatataaatctgatgccctcgtagcgtctggtattgatgctctttttgatgcggtgattacctttgctacattggtgtctgcaggcctcgtatatttcttcaatgtagatattcaaggctatgtaggggctttaatttcgctattaattttgaaagcagcctatgagatcttacgggatatgtataatcatttgcttggtgttcgggccgatgatgatcttattcgaaacatcaaagaaactatcgcgcaacatccaaatgtaggcggtgtatatgacctagtgctaaatagctatggaccaggtgaagtgattggttctgttcatatttcgttgccagatacgatgacggtgggtgaggtccatccgttaactaaaggaatcgcagttcatctttataaaaagtttggcattaatatgactgtcggcgtatacgcagaaaatcaaccaagcgtagaagttcttgaaatcaaaaaagcgcttgatcaagttatcagtttgtatactaatgtagtccaactccatgctttctacgtacgagaagataaaaagattatctattatgatattatctttaactttgacgaagaagatccacatggtacattagaaaagattaaggcggaacttcataatcgttatccagattatacacaatttgctattgtggatacggattttagtaattagttttatataaagaataaccgatatgtatccttgtatgaggaacatatcggttatttttatggggctggatcgtcacttgataaatacattatttatgcctataataaattgtataaaatatagttagtcatatattatatatagtatggagagaactatgaataaattggtattatccacattagcagttatgactgcagttagtatctgtggcatgcaacctgtagatgctaaacaagttaaaccagacccaaccatgactatgcttcaaatgccgacgaatgatgaaatctcggtaggaaatggtactacacaagaaatcaataaacaaacacaaacattagtgaataatgtagccgtatctactaaatcgatgattaaaaagaattggaaaactatctatattaaggcgataccatctgacaatacagtttatttctactatacggatacgatgggccaagtatatagtggtcaaactattaaaaatactggtttatctaagggaaaatatagaacagaagcattacgtcaggctcaggcgttgcaggatttgtatatgtatctacaacaaacgaatcaggaaattccttcttctatagatattatcgttaccagtcaaggtcgtcggattcgaaccatcatgaattacgatgaaaatataggagatagttcaatctatcaacaaaattatgaacaaattaatttcccaaatttgaaatagtttggatatagtgaaagcccctacctcggtgaggtaggggctttgtgttaaattacataatcatcgtgatcatctgttgtttgttttttagcttgctttttagcacctgctaggtctaatagttcttcttcaagtgtatcttcgtcgcctgtattgagcatggagtagaaggcccacaagataatgaaccaaactggtgtgaagaataaggcaactcttgtgtcatcattcaaggccaagataatgaggatgaacgcgaagaacgcaagaattaaatagttcatcactggatatagaggcattttaaatttagattttgccgccaattcagaattttttttgcgatattttaaatggcaaataaccatgatagcccagatgaaaatgaagcagaatgtagagatagatgtaatcataacgaagactgcttctggcatgacatagttaagtacaactgtaataagtagtacggcagcagagaaaatagtcgcttgatatggcacgctactatgtgttaagcgacgcattgatttaggtgcgtgaccgcgttttgcaagggcatagatcatacgacctgtactaaaaataccagagtttgtagctgatgcggcagaggtaagcacaacaaagttgacgatacctgctgctgcggtaataccaactgctgtaaatacggccacaaatgggctggctgcagggttaacggctgtccatgggtaaatactcatgatgatggccaaggaaccaatatagaacaaaataatacgcaaaggaatattattgatggccattggaataaccttttcagggttttcagtttcacctgctgtcaaacctacaagttcaatgccggtgaatgcaaatacaaccatttggaaggataagataaagcccatcgttccatttgggaaccatccgccgtaattccataaattactaaaggcggcagctacaccagcatcggtactaaatccagagaaaatcatgattaagccgatgatgataagggacacaatggcaataaccttgatcatggcaaaccagaattccatttcaccaaagtgctttacggctgttaagttcatgagtaatagagctattaagacgacgagggctgggacccattgcggtagccatggtatccagtattgcatatacagtccgacggccgttaaatcggccatggctagtgatagccaacagaaccaatatgtccaccctgtgatgaacgcagcgcgatcacctagataatcctctacaaaatcgataaaggaatgatgattaagattagataataataattcccctaacgctctcattacaaagaaacatataagaccagtaatgagataagcaaaaagaatggatggacctgccaaatggatggcccgaccggaacctaagaataagcctgtaccaatggcaccgccgatggcgagcaattgtacgtggcgattcttaaggccccgctctaactgattcgtatcagacatagtaaagacctcttttctacaaactacctataaatacaaaaagccatggatgaccataactttcataatctatagaatatataaaactattttcttataatacagtatctattataaaaagtcaaatgtatttttacagtagacacatcctgtgaatagtattattaacatacgaataaaagaaagcgtattcatacttttaaaagcatactatgcgttaaaaggttttcataatttgctataataattgatagattatcttttacgtaaagtcgtggaggttattatgagacgacaagacagaagagttacagatatagaagaaattaagggcattttaaatagcactcgcatcattcacctaggcatgatggatggtgactacccttacgtggtgcccttacattttggttttgaatttatagatgaggtgctttatatctatgtgcatggccattatgagggaaagaagtttgacttgattaaagcaaatcctcatgtatttatcgaaattgatggcagtgatgaagcccttgtttcaggtggtgatattccttgtgcatatagttcagtttattccagtgtgatgggccgtggagaggctacctatttagaggctattgatgaaaagtctcatggcttacaagtattgatgaaacatcagacaggtcgtgagtttacttttacggaagccatggtaaactctgtgggcgtagttcaaattaaaattgtcgactatacggccaaaagacgaagacaacttgaacaagatgctattatgccgccattaactaaataatgacacaacaatcctattgaactctattatgatatagcgttcagtaggatttttttatatcgaacctaagcattagatacattatttggttgtgtcgatactttcacaaaaggaaagataaaagttttatgaagtagctagagctacagaaacggtagcttgattttgatataaataagaaaatatatcattatatgtgtggagtatattataaatttttgtaataggagagaatatgaagaaaataatgacatctgctgttttatgtgccgcgatggctactgcagtaagtacctttggcgtacagccagttagtgctacatacccgttaatagataaaaatggtaataccgttcctgttgaacgagatgtagataataaaaagctcatcgatgataataaaaaactcgctgatcgttatcgttggtatgatcaagttgatgattatgatttagttaaaactaatattgagagtgccgcgcaggaatttggctatcctatacaagttccgtcttatatgcctaaagactatgcagtacgcgatgtaaaggccaaggaccatgacgtattagaaatcgtttatacagaaacgggccgtgatggagaatttggtccgaaattaaccttctctaatacagatattgtatatcgtatgggatgggctatcgatacagtggtaacgcctattttagaaaagacaaattacaacgctaaggatgcagttagctttactacccctaatgggatcgctgtacatacgttaggttatagtaaagacgctattcaaattgcttattgggaaaaagataataaagtgtatatgctctactttgcttctttaagaaatcaaaactttgtaagcaaaattgtagactctgtaggtcctgtgagtaacgtagccattgatgatactcgactacgtggtgaccgcaatgataagcaaaatgttgaagaaaacgatgcgaaaaaggttaaacaaaatgatgatccggattggcctccttatgaaacgattggcttgccattgcgtacacatacgaattctgtgtggcctatacttacgagcaaaaccatcggtttacctagcggtgtaatcgatgcatctcataagatgtcctatgacgtatctgtaccaagttatttaccgtttggctatacatactatgctacacatttttatgacaatgatgtattagaaactgtatattggaagcaaggtgaagagtatcaagagcgcagcggtcgttgggtaactcatactatggtcttccgcatgagctactctatggatactgtatggcctgaagaatatattccattggagtatcatgacgtacagtggagtgagtctactccaataggggaggttcactatacaggtgatgtagataagggcttagtacgcagtgttacgtggtacaaggataatatggcgtatttcttgttcttccaagtgcctgtgaaagcatctgaagcagagttttatagaaatcatgtagtgccgttaaaagatatcgatccaagtcgtacagacttaattggtgtgaaaacgattcgttaatactaaatagcactaaaaaaagaacctatccattagatatcaaagtgaaccgacctccttaacgttaagatttttggtctaacattaagggagcggttcagtaatatcttttgagataggttcttttagctattaattagaagaatacgtaacggatgataacgagtaccgctaatacgtacataatccagttaacttcttttgcacgacctgcaatgattttgagtagagggtatgcaataagacctgcagagataccattagcaatgctgtatgtgaacggcatcaaaacgataacgaggaatgcaggaaatccttctgtccaatcatcgaagtcgatattgcggatagcacctaacatgagggcaccaacgatgataagaacaggagatgtggctgcatttggtaccaaggataccaatggagccaaaaataagcagattaggaataatatgcctgttgtgacagctgttaagcctgtacggccaccagcacctacacctgctgcactttcaacaaaagcagtgatcgtagatgtaccgagtaatgcgccagcactaacgccgatagcgtcaacagtcatcgctttaccaagacctgggaatttaccagattttggatccgcaattttcgcctctgtagcagtaccgattaacgtacccatagagtcgaacaattctacgaatgtgaaggagaagataatcgtaatcaagcccatgtggatcgcactaggaatatctaattgaagaaatgcggcttttgagaagtcaggcactgccaatactgtgaagttctcaggcattgtagatagtcccgttacataggacacaattgttgttaccaacacaccaatcaagagtgaaccttgaatcttacgagccattaatagagcggtaaagatgaggctgaatagggctaacaatgtttcgccactgtgcaagttacctagtgttaacaatgcttcagatgctggaggtactagattgccatgtgtttgtataacttggcctaaggtgttaggagataaactgatggaaatcgccatcaaaccggatagttttaaaccgataatggagataaatagcccaataccaacggtaatagcgactttcatagaagccggtatacctacaacaatcatttgtcgtatcgatgtcagcgttaggacgaggaatacgagaccggaaatgaacaccgcacctagtgccgtttgccatgatacacccataccgagaactacggtaaaggaataaaaggctaagaggccaacccctggagccagtgcgattggatagttaacaaataaacccatagcaatcgttacgaggccaccacctaaagctgtagcgatgaggacggcatccttgtccatgccagcaagactcaagatatttggcgccaaaaataggatgtacgccatcgtgataaacgtggtaatacccgctaaaatctcggttttaacggaggtacctcgttcattgagtttaaatagtttatctaacattagataaatcctccctgtatgaaattataaatcatatcaaataaaaatatttcgatatacctatagtgtatcatatttcccaccattttttgtatgaatttatgttatactatacatatattgtgaatgacttagaggttaacttatgaaaatatctacaaaagggcggtatgccttgcgaatcctagcggatattgcagaacacgggacggaaaaaaatgtgcctatccgtgaaatcgcagaacgccaagggttttcagataaatacttagaaggaattgtatctcgcttgtcctctgcaggcctcgttaaaagtggccgtggtaaatacggtggatatcgcttggttaaagatcctgctgaatataatgtatatgaaatcttatatgctgcagaggactctattgctcttgtgtcctgtttagaggatgatgtagagccatgtcctatgtttaatgattgtttgactgctcctctatggcagtatttacaagatgagtttcgccatgtaatggagcgcgtttccttgcaagatgtaatggatcacaagtttccagtggaataattgagagagtcgcgttttatatgcgactcttctttatataattttgtaaaagcatatttttatacacttttatatgtggaaagaaggcgaaagatgagtacaatcgcagatgatactcgtggtggcatgcgcaatgtatggattattacggctgccatgactgtattagctatatgctacaccatgattattccttttttgcctatatatctcttggaattaggtgtcccaaaagccgatgtagccctttggtcgggccttgtctttgggattacattcctcattgcgggcattatggctccaatttggggaaaaatcgccgataataaagggaaaaaacggatggccttgcgcgctggctttggcattgctgtctgttatgtattaattggtttagttacagaccaatatcaactactcatggggcgggccctcgttggatttgccaatgggttttatcccgcggcaatgactatggtatccctcagtgtcgatgagaaacaggttggtcgagctttaggtatcttccagacagggcttatcttggggaatgtcatcggtccattcttaggtggtgctgttgaaagtgtagtagggatgcgtcctgtattttatgtatctggtgttgctgtacttattgcgacattggctgtattgttctttgtgaaagaaccaaaattacatgctgtaggtactgatggaaaagaacagccggctcaacctactaaatctacatccttacgtgaagactttaaggccgttcaacaacaacctgtactagtacggttgcttgggattttcttctttatgcaatgtgtcatcatgatgctacagcctatcttggccctttatgtgggtgatatgcaaggcaccatggaaggagccgctattatttcaggtactatcctaagcatcggcggtttagcaggctccttaacgactaatctatgggttcgccttggtgaacgtcgtggttattttaagaccatttcctactgtatgatgggtagtggtatcgttttattgctgcaaagcttaccagtgggtatatggtggtttggtgttttacaggttctaattggttcatgcattgtagggattaacccatccttgagtgcagcagtaacccttaatacagatccaagctttagaggtcgtatgtttggtatgacaacgacagctcaacaatttggttctatggtaggtcctgtatttgctagtattgtatcgacctatgtgggcatatcctacgtatttagtattactggattgttattgttatatatgggctttcagtctagaaaattatctaaaaaacatgaatagcactatgatgagtcatagatagtattaagggaatcatttgtttcgtatgagatgcaaaggagttgttatggtccgtatcggtcaaactgtacttggagaaaagggtacaaagatatgcgtgcctattgtgggcacaacggtaaaagaaattctagatgctactgcggtggcatgcagtacaccttgtgatgtggtggagctacgcattgactattacgaacgagctcattccattgatgctattattgaactattgatgctcatgaaacctcaattaaaaggtcgtgggctgctgtttacgtggcgcacgaagggtgaggggggcgagaaatctatctcctcacaagattactttacaatgttagagcgccttatcccaacgggcttggtagatgctattgatattgagttattctttgatcaagatagaatggtcaaaaccatagaattcgccaaggttcatggtgtaacaatcgtcatgagcaatcatgattttaatggtacaccaagtagagatgttattgtaaatcgactcattcaaatgaaaggatttttagcggatgtgccaaagatagccgttatgcctcatataacaggtgatgtattaacacttcttgaagcgacgtctgaggtgaaatccttatatccatctgacccaatcattacgatggccatggggccactgggagctattacacgtgcttcaggagctttatttggcaatgctatgacctttgcctctgcaggcaaagcatcggcaccaggtcaaattgatgtacatgaactaaaacgtatcttagatactcttgatgtagatggtgtatttgatgaacaacaacataaacgcgtaaaagtgcattaaaaaagttggcgagagccgactttttttatatgttttgtatcgcctgtaatatattcatttttgaaggccgaatatagaaaatatagatgtaattacctataactttatatagaatgagatactttttgtgtgataattttctgtatttttccttgctatctacaataggatagcgctcaggaaaaatggataatgaacatattttttggtaaatttacgataattctttttggataaacgcagtgtctataaagcgttgctttaatgaaagtttgagatttactatgtcagatttagcagtaggggtcaaaattattgtatatctcattttaacctccgaacttataaatccttaaggagctcattaaagactttttcagcaggttcgccaattcccttttttgcttgattaagtcctatctctattcttgtgcttaaatcttctttagtccataaatcatcatttatagcatcaatccattctgggcgatggatagtggaaggaatatcgttagtgaattgtatttgttttgatacaagtgtaacagtttgtgatatagttaatcccatctcttttaagatagctgttgttagtgtcttaactttagggtttatacggatattgagtatgcctgttttatcaattttatcaaaggatatttctatttcgttttctgttgatgttccgtacgtatttatagtatctgaggcctttaatgttcttcgaggttgttcgtaggtgccgtcattcttgagtgtacttggagttggtgttttttcggtaggagttgttggtaaagcaatgtcaaatgggatacgacgttcttttataatttgacgaaatagtgcgtctagcatagaggtgtaggataggccctgtgcctttaatatgctagatacttcctgttttagatcttcgttgatgcggacttgtaggtttactgttttcatagtatctctcctagtattcttttggcttgtgactgtaattcgttggtaatattattgattttatattaaaagtttgttaagctaattaattccgtttgtaattacattgtaattgcacatgtggatttttacaaatacatataaaacataggggaaataaaaaagcagtagtaatcctaaggatagctactgcttttcagtttatatcattgatgtcatgatatgagttttagttttatctagaaatacagatgtaaagtattttacaaatttgatatataagctcttacaataaatttgcctcaaagtcttctaggatagtcgccactgtttctggtgcattgcgattatgttttacgatgcattgagcgaagctttcatacattggtgtacgcgttgcttctagttcgcgtaagcgttcgatgccaccactagagagaacacgaccagaggtagataggttttctactggttgtgttaattggtagatacgaccgttttgtcgtaggtgtgcgaagtttttaggcactgtgacacagccgccgccagtggaaataataagacctgtttgagtaccgaattttgcaatcatttccgcctctttttcacggaaggcaggttccccttgttctgtaatgtatgtggaaatgtctccaatttctttttctaactcatgatccacatctacgcaagtacggcccatttcttcaccgagcgctttgccgactgtagtttttcctacgccaggcatgccgatgaggataatgttttccttttcacggcgcatatctcgcaagatttgctcgatttcctttgtgccaaagctttcaccttggaaatggttagcagcttcaacgccttgagccacgaggaatggcaagccatcacaatgaggaatttccatcatttctgcttgtaacaacaaaatcgtacggcgtggattatagatgaggtctacaacgccttctaatttggagaattgtgtaatatcgataagattagctggattatgagggtacataccgataggtgtgcagttaataataatctgtgctgtttcgtagtaattaggcgcatcaccatagaatggtgcggtcttacgagagagatgaactatgttcttagctcctaagtcttcaagagctacgtgaacggtagcggaggaagcgccatcgccaaggataatacattccttgccagatacatcaatgccagcatgttgtagagtaaacacgaaaccatcgtagtcagtattatagccgtgccatttaccatctttgcgaaccatcgtattcacacaaccgatgcgttctgcacgagggtctactacatcacaagcttcaagggcacttaccttgtaaggaatagtgatattgataccttgtaattctggatccgcgaagaactcttgtagttggctcggttcgcgttcaaataatttgtaatttgtattccctagtgcactgtgaatgcgaggggagaagctatggcctaacgtacggccaagtaaaccaaatttcataggacctcctaggtcaatatacatagaatggctaataggctggtacctattagccattgaagttttataactatatgtattgtactatatatgttcttatagagactagtacatataagtatattagttttcagggtaattgcctagtaagcggaatttatcttgtgatgtgtgtagctctgctagaacagacaataccttaggatctgctagggatgcttctaagtcgaggtagaataagaactcaaagttatggcctacaatcgggcgagactcgagtttggtaagatttacgccgatgtttgcaaacttggtaagtaatgtaccaaggccacctggagcatggcttgctgtagttaccacggagattttattagcccctgggtatacatggaagtccttgctgatgcagataaagcgcgtatagttgttatcgctattttggatattgcgcattaatggagataaattatataagtcggcacattgaggagctgcaatagctgccacacctgggtcgtcactagccgctacgagctgggctgcacgagccgtgttatcgaaggagcgcaattctacgccttctaatttttctaggaagtgactgcattggcccaacgcttgaggatgggagatgatagtgtgaatatcttctagttttgtgccttttttcacgagtaaatcgtgagaaatccataggcgagtaccgcgtacgatatagcatttacgatcttctagaaggtcatacacttcttttacagaaccattggagctgttttcgataggtaatacgccgaattgacattctccagactcaacagcgtcgaatacggcacggaagcctgttacatagtgaatttggctgagtggtaataatttatcgcacgccacttgcgcattactaccgaagacgccagcacaagctacgctaccacgttgtggaggtaatgtaggggactgctcaatagcctttttcattttaacagtgaactcattatcttggaacaattgttcagactgataggtccggctcaagctgaataatgcttcgaagaaacggcgtgcgtataggtcgaggtctgggcctgcatctcgagttactttgtcgaggatatctcgttcccgtttggcatcgtaaatagccttgttcatttcttttttcgctgccgcaacgtccttagagagttccatgcgctctttgaagagggcgagcatttggtcgtttatatcgttaattttaacgcgtacttcatctaagttcatggtcaatatctcctaagaaatcaagaataacaagggccgtaacagcttcgattacaggtactgcacgaagcgctacacatgggtcgtgacgaccttggattgtgagcaatgtgtcctctttttgtgaaagtgacacagaatgttgttctttataaatggatggtgttggtttgatgcccacttgcataacgaggggcaagccgttagttataccaccttgaataccaccgctattattagttgtggttgtaatcttgtcgccgtccatggtgaaagcatcattcacttcggaacccagttgtgcacacatatcgaatccaccgccaaaggatacgcctttaatggcgggtaccccaaagattacgcgagctaagcggttttcgataccgtcaaagtttgggttgccaaggccaattggtagacctgtagccacgacttcaacgataccacctgtagagtccccatcttttttgaggttcataacaaggttttctacttcgttacgtttttgtggatcaaccatagcaattggctctgtagcgatgctagctaatgctttcatatctgggtgaaccatgttgataggagcatcttgaatcgttcccacttgttttaaatggccgtggatttcaatgcctttttcacgtaatagttgtagagcgatgccaccagctacgcaaagcggagctgtaaggcgcgccgagaagtgaccgccacctcgcatatctaccttattaccatagcgtatacgagctgtaaaatctgcatgagatgggcgagggatatcgcgtaagttgttataatcgctagagtgttgagatgtgttgcggatcataaatgccaatggagaaccactgagcatgccgtccaccaaacctgctaaaaactcaggtgtatcggcttctttacgctgtgttgttaattgattttgccctggcgcacggcgctttaaaaaggcttttaactcatcgatatcgatggtatgtccacaaggtagaccttcaacaataccgccgatagcgtatccatgagaggcgccaaaggtagatacttgtatagttttaccgaaattagatgccatgagcatcacctcctaataagttccagtcctcgaagaaatctggataggattttgtgatagcttcgctatcttttaaggtaacaggattttcactgatgagggccatcaatgtgccggccataacgaggcgatggtcatttacgcaatcaccttgtccacctttaagtataccactaccgatgatgtataggtcatcgccttcttcacgcactgtaccacctaagtctcttacgagattagcaacagctatgagacgatcggattcttttaagcgtaggcgagcacccttgataaaggagctttcaccagaaatagagcaagcaagggcggccataacaggcaacatatccggcatttgctctaggtctacatggattggcttggaagcacgacctgtgaccgttatattcataccatcccaaacaacatcacaaccagcatcaatcataacttgcatgatgcggcggtcagcttgtacagagtttttgttcatgcctgtaatcgtaattggtttgcccgtcataccagcggctaccatccagattgctgcattagaccagtcaccttcgatttggtaattatcacggccgataaaggacgcaccaaatgggactgtgaaagcctcgttgatgtttgtatcaggtaacgtatgctctacctccacgccaaaattacgcatggtttccgtcgttaatgttacataatcactagattgtagtgggctagtagccgtgatagtagataggccgatttgaggggctgccaacaataatccggagaagaattgactgctcacatcgcctaccatggagaaattaccgccttggagacgacctgtcatagtaaatggcggtttatcttgggagaatgttacgccatgcgctttcatttcgctgagcataggttcgagagggcgatctggtaaacgacctttggcatctacgtctacatcgttacagatggatgctgctacaggtaataaaaggcgtaatgtagtgcctgattcgtgaggtactacattgccctttgctgggacaggacctggtgtaacagtgacaactttattttcatatactacgtgagcacctaagcctcgcaaggagtccatagtagcatcgatgtctttagaggtacggcttagtagtatagtagatggagagttagcaagggctgcacaaattaatgcgcggtgtgcatgtgcctttgctgggatggacgcaatcgttcctgtaggaatggcgttcgttacggaatgcatagaaatctccttttacgtcttagtctaaataggtggcaagttcttcgtgggtaacaaccttaagttcgctgtggccatagcttgttggtactacaattttaatagtagcgccttcgcttttcttatcgtgcttagcagccgctagaatttcttcctttgttacagtcgttgtagttggcaaatcgtgggcttcaatgagggattttaacttatctagagccttaatatctagttctccatgttttaccgcaccctgtgccatgagtaccatgccaatagcaaccgcatagccatgatgaacctcaaagtgactcgctttttcaatgccgtgaccaaaggtatggcctaggtttaagagggcgcgaacaccagattcgcgttcgtcttgctctacgatatccgcctttgcttgtacgcatcgcgcaatgacagcactaacgctatcgcggtgtgttatcaatggcttattttctagctgagttaataaacctggtacatcgaggaaaccatatttgatgatttcgccgcacccatttttccattccatgtccggcaatgtattaagcgttgttggatcgcagaggacaagaatgggttgtttgaaagcaccccacaggtttttacctgcttcaagattgacagctgttttacctcctactgaggagtctaccgccgctaatagggaggtaggtacctgtacatagtcaatgccacgtaaataggtagccgctgcaaagcctgccatatcacctacaacaccaccgccaagggcgatgagaagatctttacgcgttaacgattgggctgccatgtattctactaactcaatgagttgatgggcatttttggagctttcaccagcagggaacacataatcacaaacagtataacccgcatgcgccatattagctttcacagaactcaaatagtgcggtgctacattgctgtcgctgacgatgataacacgacaatttggttttaatggttttatataatcgctgatgcgttgtaaagcaccgttttcgatgacgacgtcatacggcgtggatgcgttaatatggatgcgagtcataataattcctttcttaaaagaataagctagtatctattataacggatactagcttatttgtgtgatatttaagattatttagtgcattctaccaatgctttacgcaatgcgaatacttctttcataaggctagtgaattgatctgggcgtaatgcttgagggccatcgcataatgctttggatggatcattgtgaacttcgatcataaggccatctgcaccgccgcctacggatgcaagagaaagtgggcgaaccatacggctcatgcctgcagcatggctagggtccatgatgattggcaagtgagatagttcgtgcatcatagggattgctgttacgtctaatgtattacgtgttttaggttcgaatgtacgaataccacgttcgcataatacgatttgatcattgccttcggacatgatgtattcagcagccattaaccattcttcgtatgtagcggatagaccacgtttcaacaatacaggttttttcaatttgcccacttcttttaaaagtgtgaagttttgcatgttacgagcaccgatttgaagcatatctacattgtcgaagtattgcaattgggaaatatccataacttcggatacgataggaagaccagtttctctttttgctaattctaaaagttttaaaccttcagggcccataccttggaaggagtatggggatgtacgaggtttgaaagcgccaccacgaaggattgtagcacctgcatctttacatgcttggcaagatgcgagaacttgttctggtgtttccacggagcaaggaccagccattaccgcgaagtgaccgccaccgataagtgcaccgcctacattgataacggaatcttctgggtggaatttacggtttgcttttttgaaaggttcttgaatacgtgttactttatctacgaaatcaatggattcaatttgacgggaatcaagggatgctgtatcgccgataagacctaagatattatagtgggccccttctactggatggataacaagacctttcgcttctaattcattgcgtaattttgttacctctgcttctgtagctgttgtttttaatgtgatgatcataataagtcctcctcaaataacaatgcgaatagtggggccaaccatacgggatagcaaataaaaaagggctacccgtattctaatacgagtaacccttttactattctaagcaacgattgatgatttctaaattagcgtagctcaaatagttccttacccgtacgttggataaagaaccaataaaagtattgttttgctactgtgctaatttggttagtcatcttgttgttgctcctttctaaatttgatgtgtacagtataaacccatttgagaattttatgcaagtacttttttcaaaaaaacgcaaaattctatagaaaaaagttgtattaacattcctttgcctttatactcatggtaaaattaaagatagaaaatgctagcaatataacgttatagaacataattggtaaggagagttatgattattcaaattttaaatacaattaacgatgatattaaacaaattcgtacagatgtgttcatgaaagaacaaggtttcgagaatgaatttgatgaaattgatgaaatcgcaaaattcgtacttttatttatagatgggaaagctgttggtacctgtagatttttccccagcgatatagaaggggatgctcatattggtcgtatggcagtacgcaaattatatcgtggtcagaatttgggatcaaaaatcatgcttgctgcggaaaatggaatccgtcgcgatggatttaaaacatgttctctatcagcgcaagtacaggcaaaaccattctacgaatctcttggatatgtggctgaaggtgaagaatatctagatgaaggctgtccacatgtgatgatgcggaaacacttataatattgcagtttagtgttattagaaatataatcaagataaagatatgtattgattgatattcgcgggaggtacaaccatgaaacttgcagaagcattacaagaacgagctgatttaaataaaaaaattagcgatttgcgaggccgtttgaatcaaaatagtttggtacaagaaggggaaaagcctaatgaagaccctgcagtgttgatgcaagaactagaagcggcaattgctagacttcaacaactcattaaagatattaatcttactaactgtgcaacaattgttgaagggcgctctttaacgcaaattatagcggaaaaagaaggtgcaattatgcgtctatctgcatatcgtgcattagcagatagtgcaagttctattaattatcgtgcccgtggttcggaaattaaaatgatagcaactgtaaatgttagcgaattacaaaaaacagcagatataatctctaagaagattcgtactttagataatttactacagtcaaccaattggaccgttgatttaatagagtattaattataagttggtaatcaagatagggtggatacaaagccacgattgcttaattcgtaaaaagatgatattccattacatgtacggggcgttgatgatatgtatcgtgtaggcccttattgcgtataaatgtatggttattttttataaggtattaccatgtgtcaactattttgatgagggtggcgttggggactataaaaaggagtgttttcacgatttgttgtgaaagcactccttttatttatatttaagttttatctattctaaattatcaaaatcaaatgctgctgcttttgtatagtttgtaacttttgcttcgaagaaatcagtttttgtgctgtttaagttggagaagctttcaatccattccattggattgtccttgatttcaggatatagatgaggcaagccgattgcttctaaacggatattggcaaggtatttgatgtagcgttcaataagaacgttgttaaggccgagaattttatcatcagtgatgtattgaccccaagcgatttcattttctgcaccttggcgaatcatgtcagtgattttcgcttccagttcaggcgtgaacaagtcagggcgttcacgacgtaactcgcggatgatgttttggaacaatacaagatgagttacttcgtcgcggttgatgtatttgaaaatagtggatgtagctgtcattttaccttggcgtgccaatgtgtagaagaagctaaaaccagagtagaagtaaataccttctaagatatagttagcgatgattgtgtggataaggtttgcttcgctaggatcatcactgaaacgttggtatgcatcggcgatgaagcgattacgttcaagtaatgttttatctgtacgccattcgtcataaattttgtcacgtgtaataggatttgttacagtgtccaaaatgtaagaataactttgagcgtgaatttcttcttggaatgcctgaatattcaataaggatgccacttcagatgctgtaatataacggcttaagttaggcaagttttcagattgaatagaatcaaggaagttcaagaatgcaataattttgtcgaatgcacggcgttcgtaatctgttaagtatgggaattgcttaacgtcttcgttcaaggaaatctcttcaggaatccagaagttgttgagcattgtgcggtacatttggttcgcccagtcgtacttgatacggttccattcgcgaaggtttgtggtgttgccaccaatcatagattgcgtgccacgttcaccgtgttcgttgaaaatcagttttttatccatagtggactcctttatattatctgtgaaataataatatattaactattttatcactattttgtactagtggtggtcagtaaaacggagtgattttcagctggcgactttgggtaggtcgttagaaatgaccgttaaacccggtggagccagctgaagattactctgtttctatgatgaacagctagtgcactcgtccatttcaagggattggttacggatgtagtagattgttttaatcccttgtttgtatgcctcaacgtaaaggtctagaatttcttttgctttcatttgaggtgtgatatacaagttgaaagattgtgcttggtcaatatgacgttgacgtacgccacaagctttgatggaccattgttggtcgattgtatgcgcctctttgtagagccagaaagttttatcgttcaaatctggtgcagtttttggagtgaaagaacctttcttctcttcgatgaagaattttttgaagatagggtcgataccagccgttgtgttcgcaatattggaagtagaacctgtaggagctacggccattaagtaaccattgcggatgccgtattttgcaacatctgaagccaattgtttccaacgatcggatgtgtagctacgacgcgtgaagtattcaccagtttcccattcggaacctttgaacgctgggtatgcacctttttctttcgctaattccatggaagctttgatggaatagtacgcgatgttttcgaacaatttgtccgctacttcgatatgttcatcagattcccattggatatcgtggtttacaaggtagtggtggtaaccagaagtaccaagaccaatagcacggtatttatcagaagtcatgcgagattctggtactggtgcttgattgatggaaataacattgtctaacatacgaatttgaagagcaatgttttcttccaattcttcgtcagaaatacggccaaggctgatggagtttaagttacatgtaaccatgtcgcctgtatttgttttcgtagtgatggtgccgtcttcgttgatgatttcttcagcaaggtttgtgaagccaacgttttgtgcgatttcgtggcacaagttagatgcgtaaatcatacctgcatgtttgttagggtttgcagcgtttacagtgtcgcggaagaagatgaatggtgtaccagtttcaacagcagagcgcatgatttttttcatcatgtctagtgctggtacttcgatgccgtgcaagtttggatcttgttcacattcaaggtaacgttttgtgaactctttgttatcgtctgtgtcgtagaagtcctctagagcatagccttttacagccaagatttcatgagggtcgaagagggtgaagttttcacggccgatcatgcgttccatgaagatgtttggaacagagatagcagggaagatatcgtgtgctttacgacggtcgtcaccattgtttgtacgaagctctacgaattcgtagaagtctttgtgccaaatatcaagtgttactgtggcgccgcctttacgtttacccaattggtctactgcaacagctgtatcgttgtataaacggatccaaggaataacgccaccagaggagtttttgaaaccgcggatatcggagttcaatgcacgaactttaccaaggtagataccaagagcgccgccgtgtttagatacgcgggagaacttgctgtttacgtcgtaaatggaccataagttatcatctacaccagagataaagcaagaggacaactgatggaatggtgtacctgcatttgccaatgtaggtgtagctgttgtcatttttaactggctcatcaaatcgtagaatttcttagcgtattctactttgttttcgccctctaccaatgccaagtgcatggatatagccatgaagcgttcttgtggcaattcgtagatttctttgttgaagccttttaccaagtaacggtcagccaacaatttaagaccttcatagttgaagagatagtctcgtttaggtttaatataatcccctaactcttgcaattcgtcagctgtatattcagtaacgaagaagtctgcgtattttttctcttctacaagcatatgtacaagatttgggaagttaccataaccgaacgctttatagcggcgagtgatagcagcttctttatagagatcgaacaagaaaaggcgagctgcaacaaactgccaatcttggttcattttattaacttggttgccgaaaccgtcgtcttttttagcgataaccttttcgatagctgtttgtactaacgttttttgaatttctttagttgtcatgccatcaacgaattgtaacttcgcatccatttccaattctagtggatcacaagaatctaaccctaagcatgcgaaggcaatcatgcgtttcgttttctctacggatagcggttcaaaatggccatcccgtttcttgatcataatctccattatggttccccttacattgtaaatctatgtaaaatcatctataggactagcgtaaatcagatgtactcttttaaactagttctaatcagaaaaataagaaaactacaatatatggtagttttcttatttattaaatacattatgtaatgattatagcgaaaaaaatctatatattcaatattgacttttttaaatttatcaatgtggttagattaaatttatcgatgtagtttgtgattaattttattatagatagatactatatgatttataataaatatagctttacaataggaggttagctatgaaatctatcgttatatattcgtcccttacgggaaatacaaaacaagtggcagagaccattgccagagtattgccagcggatacaccatgtgtatctatgtcagagctaccctcagatatggcatcctatgatctggtgtttgcaggattttgggttgataaggggacagctaataaggaggcccgtgatgtactaggcacattacataaccctcacattgctctgtttgccacggctggtgttccaccgcaaatggcgcatgctaaggagagcttaattaatgcagcaaattgtttacccgatggcgtagagcctgtaggaaccttcatctgccaaggtaaggtagatcctaaggttatcgaaatgatgtacaagatgttcccgaaagggcatagccacggtcaatctgctgatcgcgatgcacgtcacaaacaagcggcagtacacccaaatgaagacgattttaaagcggcccaagactttgcccaacatattctagccaagttagatcgatgaataaaagcagtaccccttctggggtactgcttttgtcatattatatatgatgttgtaattattactatattgtattatatgcttaattataaagtacattaaatttaagtttacgtgtatcgaattggtttatgaagtacgacgtaatcaatagcttatatccattgccttctataatgacaggatcgacagctgttttgtcgactgtaaggaacttatcataaatatgatgcacctctgttactccatttggtagagaaacctctaaatcaaggcctttgttgaggaacttgaaggagatggagtcgaagttggcagactctacttggtattctttaagatcttgttcgtatacaattaactcgatgttttcaatgtatttatcgtatcctgcaatcgaaataacctttggtgcagttatagcatcaaaattaatatactcgatgcgtctgccgtttattgggtttgtatctggcagttttaaatcatctacagggacatatggtgtgccatagtccgtgaagttagggtcaaaggtagcagctattggtaggcttgcatgccattcgccatcaactttagtataggtcacaaattcacgatacgttgtatagcctatgaatggtgtcaagagaacagtacctaaggcaagagccataacggttgtgtgtacagatggttttaaacccttcaaaagagaatatacattatgtactaagaagattagattgaatgcactcacgtaaatcgtattgagccagagaactggttcattaatcacacgtttaccgataagaactaagcacagtgtagttagtgtaatgaacaagaagcataggatttgctgtgttctgctactttcactagatctaaagctagccaagtagaataggtagaaaatggctacatacggataataggtgtagaagaaacgcgtatcctctcgaagccctaacaggatcaagaccaaatagatattagctagaatgcctgtaataatggatgccttaggtaagatgatgccgaatacaacagtaaaaaatgagtttggtgccggaggacctgcgggatcttctttgtaagaacataccatagatagacaaatgaatagattaatggatgcgagcaccttaaaaatggtttcttcaaagttgaatggttggtccacgatgatgaagaagaaccataaactcatgatgataacaatgttatatagcgtagacgtaacaagggtgatgccaatccgtttgatgcggttaatgatttcaccaatgtagtgttcaccaggcgatgtgaaatacaaggcaatcatggagtatagccataggtacgatatattttccgtagccagttcaatacctcgcacatagccgtagctttcgtgaatcatataaaggccaacgctgattccgatacttactaaggtatataaaatggaaaactttcggattcttgttatatagctttgtaatataacgataaagaaatacagtgagtatagcttaatatcgatttcggcaaaccaatcttgttcaatatacaacggtgtacatgaaaatatggcaattaatgccagtaatataggcgactgcgttgctaggtctcgcagcgaagaccatacatgtttaatagcaaatttcatagatgttctctccctctataaatataaatacccccctcttattattagtatacctgttttctggtgaaagccctatgaggttttacatgcttgtaaatatcctttacaataacactaagaactagttttcaaagaaaagaggttatcacatggaattctcttattttttacctgtaaacattcaattcggttggaataaagtagataatgttgctggttttgctgcaccgtatggcaagaaagcacttattgtaactggtcgtactagtgctaaaaaatctggtttatatgaccgcgtagtagctaagcttgatgcggcccatattgaacatgttctctttgatcaagtggatgccaatccattgactacgactgccttagacggcgctgcgttagctaaatctgaaagctgtgatatggttattgccatcggcggtggatccattatggattgtgcaaagggcattgcttttatggctgtgaatgacggcgacattaatgattatatctttaaccgtaaaacgagtgataatgcgttaccgcttattgtgattccaaccacttgtggcacaggttctgaaggcaacggttttggtgttcttactaatcctgaaacaggggataagaaatctttacgctgtaatgccatcgtgcctaaggtatctatcgtggaccctgctgtaatggggactatgcctcctcatgtgttggcatctgttggtttcgatgcattgtgccataacatcgaggcgtacacatctaaaacggcacaacctttcaccgatgcgttagctcattatgcagtaacattactagcacaatatcttgtacctctatataaacatgtgaaagcgattgcgaatggtcaagaagctgtactaaacaaaaaacaattaacaaaagcatgggagtccgttacattggctagcactattggcggtatggttatcaatacagcaggcgtcacacttggtcatggtatggaacaccctgctagtggccttaaagatattacccatggtgttggtcttgcagttattgaacctgttgtagtggaatacacatggagtgctaactctgaaaaattcaactcattggcacgtatattcaaccatggtgatggttctgagctgggtgaagcattacgcctaatcgtacatgacctagaccttaccacaaaccttacagaattaggatttactaaaaaggatattccgtggcttgtcgataatgtatacgtagtggctacaggaaatattgctaatacagtggctaaaataagccgtgaagatatagaagtgctatataagaaaatgttgtagtcatagaaatatagggagagagttttggttcgcatattttatggcctattaactgcatatataattatgctatttattgtggcaatgctatttaatatagcacctataacatatattgtatttggcgtagcaatagtattgcttttagtactacaatatgactggtataagaaacatgctttatctgaaaaaacacatattaaattgatttgctgcgtatttattatatttaatttatgtttagctggacttgttgcggattggctcaagtacgatactcaaacgactcttgaacaaaccgatggatttgagtttagtactatggactggcaacgaggttggccaaatgatgacgggttgccggaaggtctaaagcgccctaagaaccttcctgaaggtatttcaaaggcctctgcatctggcgatagcttagcgtgggcaaatgcatatcctacaagatatactgtattagaaggaaatcctacagttattgcacagtatgaggagattgctaaggaacacactgtgtatcaagcacaaattgatgcggatggtgtattgcgtgatttagacactggggagaaaaagcgtcttatatctcatcccaatagctataacattatagagagcatcgaggaagaacctctaaacttaccacaacggagttttatagagtggttacgctttgctcctcgaaaagaaacgaaaaaagtggtgaagtacacatataattctactgaaaatcatagactatatgtctttgtagacgatgggaatactaaaagacctcatttcgtggaacttttgatcagtaatgatgggacacgggctgtgttttatcagtctaagtaaggattatatattgtgaatcgatttattaaacttttacaaatgctaataggccctccttgtggtaaacatattattctatcaatcgtattctttgcctttttttcttggggaaatgcacatgttcaattgccaggactatggtttgtaattgtaggtgtaatcttagtactatcaataagaatacagttttattactacttttatcatttaacattaccgaagaaacacattttatatgcttggtgcacattggttgtagcagtacctttattattaatgtctatgtttatatatgagattctttttggaagtgaagttaatgatgtatcacgatggaaacaaagatggccagtaaatgcaacagtattaccagatcattttagagaccctgatatagtgccgaaaggattgcatcctatatcttcaaggggaacaatagaaagtttttatgatttcacaaccactattgtttttgaaggtaaccgagaagttgtaaaagaatttgagaaaactgttgccgaatcctcagcacctggcgtagttattacaccggagttatttaaggagggcacatataagtctgtggcagactctattttttcaaaaggggatatacaaagcacttatgaccttttaattgaagattatacaaagtggaacttatttgtgtggcttctatatggtcgtcaattagcaggtggatattatcaacttgaacaagttcctacctatggctatacggtttatgttatgcaccgagagagtggacttgattcgtatgtgatttattttttgtttagccctgatcgtactcgtgttgtcttctatgattttatagtgacgcattaattgaatatattaatctgtatatcaaattatttggtttgacaattttaaaacatatctttataatgggttttataaagagactcggatgtgacaattatcccagccccaagggctgggatttatttattagtctctagtagttttattagttgagaggtgtttttatggcagatcaaaacaacaaaaatgttgatgccttagcgcaagagattaccttgaaaagtcgtggtcaaggtaaattacgtcaatttatattatggatgggtgcgctcatcatcggcgctatcttaggatggcaacatattccagttcttaatgatttatttaatttcattgctgcagtatttacgcatttattccaatttattgcaatacctactgtatcactagcggttattaccacattgtccatgttgggtgctaagaaggatacaggccgtatctttggtcatgctgtcacctatacattgttaacaacaatttgtgcagccgctgttggtcttggtttattcctttggattgcgccaggtaacttaccacttgatgtaatcggtgccggtgcagcgcaagtacctgaaaaattaggtcacgtaacatattatgatcatttcttatccgttattcctaacaatattttgaaaccgtatttagaaggtaacgtattgtccgttatgttcatttctgcttctgttggtttagcttttgctttcatgcctcgtacagaaggtcgtgaagcagtattgaaggtgttatttggtttacaagaattactattcacattgattagaggtttactttacgttttaccaatcggtatccttgcttttgcaggtcaattatctgcacaaatcgaagcaggggtcatcgttggtgcattaggtaaatatacagctgttgtaatcggcggcaacttgattcaattctttattgtaattccattgttcttgttattccgtggtttaaaccctctcgatgtattccgcaaaatgtctccagccgtagctgttgcattgttcacgaaatcttctgctgctacattgcctgttacattggcctctgcagaagacaatttgaaagcccatccttctgtagcgcgtttcgtgttaccaatttgtacaactattaatatgaatggttgcgcagctttcatccttgtaacatccttatttgtaatgcaaaatgcaggtattgaattaactatgggtaccatgattgcttggttattcattgccgttcttgctgcgattggtaatgccggtgttcctatgggttgttactttttaacattgtccttgatgagttccattggcgcgccaatcggtttgcttggtattattttaccaatctatacaattatcgacatgattgaaacggccgaaaacgtttggtccgatgcatctgtatgtgctatggttgataatgatttgaaaggtacattagacgatcctgactctcatgatgacatgcctcaattccaaggtgcgtagattgtacgttataaaagcatatataaataggttgcctcttatatgttaggcaacctattttgctttcaaatagaaaatataataatgtgccacgtttactattttctggaaaacaattattggtataattaagaaaagggggatggctatggatagacaattaagcgtatatttaaatgggcgagaaccgcaagtgactacagatattgatgttataacggcagcggtagcagtgccattgcttgaaattgatggtgaggatcacgtcctatttacggtgcgtagtcagaccttacgtagacagcctggtgaaattagctttcctggtggacattgtgaaagcaccgataaaactggagctgctgcggctattcgtgaatgctcggaagaattagggatagatacagagcaaattgaattgttaggctcattagattgtttagtatctgccattggtgttaaattacatgcagtggcggtacgtttacatacggatgaatttcgccctaatattgatgaggtcggtgaaatttttacggtaccactttcgtatttattgaatatggaaccaacggtagggcacttagatatcggaactaaaccattacgagattttccgttccatttattagaagggtatcaaatagattggaaaattcggcagaactattctgtttatttttatccctataagcaatatacgatatggggattaacaggtcgagtcctcaaaaatttcttagatttatatcgacaaggtaatactatataaaatgaaagataacgaaataacttcatttgataaagaattgaataaattcctccaacctaagtgtctaatacctggtggccttggtttatgggaaacctattttcgtaaaatttgtacggcttggggccgtatcgatagtgaaattagacctcagcacatcatattttccgccgataatgggtgcaatatggaaggctatgtaggttataactatgaggtaacgcaaaagcagtcgcgtaatatgctcttgggtcgttcgtcggctacacagttttgtaactttaacaacattccttatgaagttgtggatgtaggaattgcctcagatgatggtatcggagtggatcgcaaggtcgcaaaggggacaaagaatatattaaaccatcctgctatgagtgaggatgaatttaatagtgcctttcaagctggctatggacgagttgaacattatgtaaagcaagggataaatcttttttcctttggtgaaatgggactcggtaatacgacgacctctgcctgtgtgctatctgccttaactggggctgatcctactgaaacagtaggccccggttcttggccgaataaaccagatttgatgaaacgaaaaattgattttgtgcgcgctgtattagataagcataagactagtatcgtttctgacagtgaagttgaaagagttcgtaaaatcgtagcccatgtagggggctttgatattgctgctattcttggggctatgctcgcttgtgttgagtttaaaaagccctttgtcattgatggctttattacagctgtatcagcagcttgtgcggtacatatgaatgatcgtgttaaggattatgcattgccatctcataattctcgagaaaaaggcacagagctagctttagcagaggtagatattacacaagacatggttcctattcaagcccacatgtcgatgggggaagggacaggagctatcttaatggttcaaatgctcaaaactacacagcatatgtttgtaaacgtagggacctttgcagatttgatgaaattataaggaggacgaatgaaaataaataaatactttgatatacattttgagcgagctgatgatgcaactatcgccaaaagactgataggtggtgctaagattaagggacctgctttggttatcctgatcctctccatgtttattgcctctattgggttgaatatgaatagtacggcagttgttattggtgctatgcttatatcgccgttgatgggacctattttagcaactggttttggcttcgctacgcttaattttacagttgtgaaaagcggtattttaagattgtccttacagattacgattgctgttttggcatctgctttatatttttatatttctcccgttcagacggctacatctgaactattagcgcgtacagaaccgaatatttttgatgtattcattgcgatatttggtgggttagctgggattattgggcaaacgcgtaaaaccttagataatgttataccaggtgttgcaattgcgactgcacttatgccaccactatgtacggcaggatatggacttgctaatggaaattggaactatttctttggggctagctatttattctttataaatgcattcttcatcttctttgcatcttttattgttttaaagggtgtatatagtttgccatttcataaacaagcagaagaggttaatcgtcgtaaccagctaatatttctcgtgattggtcttattatggctataccaagtatttatgcgggctatgatatgaccatcaagtattctgagtcaaatcatatggaacagtttattaagaatgatattaatcaagagggacgtcgacaagtgattgattattcattggatcaaacgaataagctagtagacatagtagttataggagctcctgtgacttcagaggagcaagcccagttggatgacaagttacataaggatgagtacttgcagccttatacattacgatttgttaatagcgtagatgagaaaaaatctactatggataagacgaacttgaataaatcttcagagaatcttgaaacatataaaaacttgagtaatctgtaccagccgacttatcaattagtaagtgaaactatgaatactatgaaaacgacagaagctgaagcaaaggcgttatttccgtttgtaagcaaagtggaaggcatgcctttgatagataatctagaacagcctaaagcgagtcgctatatggttataatccatactacatccactatatctgatgcagatttggaacgaataaaagcttggttagaggctaaattatcagcgcctgtaactatttctatcgagcaaacaacgtcaactctataagggagctatcatcccagcgttctaattgatcgttaataatatatgtatctgatacaataccttctcatgacaaattctatagatacgaaaaggggctgttttgttacagcccctttttgacatatatgtattgaattaatgttgtatgttttgtatatcatctaaaatgtgttcaaaatctaggtgattttgttgtaatacatcttctggattgtatcggtcgtagaattgtttggaaatgccatagtttaagacgttcatggacgtttttccataatagctagcaattttttgaccatagccaccttcgagttcaccgtcctctaaggtgatgacgatattgtggttctttgttaattcattcaatatatcagtgtctaaactagaaatacaaagtggtttgacaagcgtcggagagatatgaatggcatcatgtattgcgtggctaagttcgaccgccttatggtagaaattaccgacacctatgatggcaatcgtattacctgattgggttatgttacacgacgttacaggacatcctgttgtattggattgactagtttcgtaaatcggtgatcctacaggaatacggatggcgataggatgattgtgatgttctactccataacgaatggaagattctaattcctctactgttgtaggtgctaggtacatgagatttggcatgttgctgagcatagtaatatcgttgaatccaaggtgggtcatatccttattaccataaatggacgcgcgatatacaaggatcagtgcattgctattattaatacataggtcattaataatttgatcataggcacgttgtaaaaatgtactgtaaatcggtaaaatcggcgtgccaccgttgtgggcaatgccagcaagtaatgttgtagcatgttcctctgcaatgcctacgtcgatgtattgagcacctaatctttcacgtatatctttggttaaacagaaaccgccaggcgtagcagctgtaacgatacatgcagctttgttttgctccagtgcatcaatgagttgttttgcaacgatagattcgtagctgttggtatagcgcttttttgtttcccctgtgtcaatatcaaatccggatggattatgaaagctttcaggattggtaatagccttgttgtaaccgtagccctttgtcgtatggatgtggagcactatcggtgttgtctctgctttacattcttttaaagccttaattacggttggcaacgaattgccatcgtcgacgtaacgatatgaaaatcctagagctttaaagatattattagggctttcaccattagtttcgcgtaattgttgaagatggctatacaaaccgccgtgattttctgcaatagattggtcgttgtcgttgatgataatcaaacattgagaggacattgtggctaagtgatttaatgcttcataagcctcgccaccagagagagctccgtcgccgattaacgtaataattggatacgttttatgctgtaaatcgcgtccaatcatgaggccacatgctaaactgaggcttgtggaagcatggcctaagtgaaatgcgtcataggtgctttcatcaggattgctataaccggatacggtgtgaaatttgtccttatttttaaagccttcgtaacggcctgttaaaattttatgagcataactttgatgggaaatatcaaatataaattgagcatcatcagggctgaacacatgatgcaaggcaacaataatatcagtggctcctaaagatgaaccaatgtgaccgccaatgtgtgatgttctatggataattaaattacgtatatgttgtgcgatgacctcgagttctgtgagagaacagtcgcgcaaatcgctaggaatttgaatgtctgtcagttccataggtctcctacatgatccatactaatggataaatcaattacagttaatgaaatatatgactcattaatagttattataacattatagactaaaattatttataaataaaaaggcaattcgatatatttagatatataaataagtaataactaaccatattaattttagaatgtatctttacgtacaatatttttcactttaaagtggtataataaaaaatacacgacatgtagagttttatatatattattaggaattgtcatgttctatataccacattggaatatggcaaaacctagaattaatctctgtttgttgtataatatatttaatatttaattttttagatgtgtagttaaaagctttattatttaacttttacttaaatgtatgaagaaaaatggtgcgagcgtaccaattcttcatttttttcaagagaggtatatatgcaaaaatccttacgtatggggatcgatgttggctctacaacggtcaaggtcgttttgttggacgaacaagataattatttgtataaaaaatatatccgacattacgccaatattttggatactgttcatacattgctacaagaggctcaagtgggctataaagaagcaaaagtacatgtagcaattacaggttctggcggtatggcgatggctgataaggtgcgtataccttttgtacaagaagtaattgccgaaacaaaggcgataaaagcattgtacccacaaactgatgttattatcgaacttggtggtgaagatgctaaggttacgtatctaggtcgtactgcagaacatcgcatgaatggttcttgtgccggtggtacaggtgctttcatagatcaaatggcaacattattgcaaacggatgcatccggccttaatcaattggcgatgaatgcggatactatttacccaattgccgctcgttgtggcgtatttgcgaaaacagacgtacaagcattgctaaatcaaggcgcatctcatgaaaatattgcaaagtccgtatttcaagccatcgttaaccaaacgattgcaggccttgcatgtggtcataaaattgaagggaatgtagcattcctcggtggtccattgacattcttatccgaattacgtcaatgcttctgtgacaccttagaactcgatgaagcacatcgtatcatccctgaaaatggtgagttgtttattgccctaggcgcagctctcatgaatgatgaatgtcgtgatattacagtaggtgaattgacgaaggaaatcggtgcgcttattggtgtaccaatggaagcaaccgatcgtgtggatccgctatttagaaatgaagcggaactagaagaattccgtgcacgtcatgctaaggcggtaacaccgaagggtgatattaacgatgctgaaggtccatgttacctcggtatcgatgcgggttctacgacgttgaaagtcgtcttgatcaatagcaagaatgaaatcatcttctctcactatggcccaaatcatggtaaaccattagaaaaatcccaagaactaatagagaaaatctatagcttattgccaaaaggggcttacatcgctcattctggtgtaactggatatggcgaagccttcttgaaacgagctcttggtatcgatattggggaagtagaaacaattgcccattatcgtgctgctcaattcttctgccctgatgtatcctttatcttggatattggcggtcaagatatgaaatgtacaaaggtacgcgatggatacattgaagacatagtattgaatgaagcctgctcctctggttgtggttcctttattgatacctttgctacatccttgcgtttgccgattgagcaatttgccaaggaaggtttattggcacctatgccaatcgacttggggtctcgctgtaccgtatttatgaattccaaggtaaaacaggcgcaaaaagaaggggctactgtaccggatatagccgctggccttgcatattctgttatcaagaatgcattgtataaggtgcttaaggtaaaagatcctaaggaattaggtgaccacatcgtcgtacaaggcggtacattctataatgaagcggtgcttcgtgcctttgaaaaattaatgggcgtcgaagtaattcgccctgatgtatccggcttgatgggtgcttatggtatggcattgctcgcttctgaagcggcagaagagttacaaaatcaacatagcacattgcttgatagtgacggtttgaaatccttgcaagtgtctacatccatgcgtaattgcggattgtgctctaataattgtatgcttaccatcaatgcattctccgatggccgtacctatgtaacgggtaatcgttgcgaccgtggtgccggtgatatgattcaagagaaacataagcctgttccaaatatggtagacataaaattacgccgttattttgattacttcctcaagaaaaatattcctgagtttgaaggtaaattgcgtattggtattcctcgcgtcctcaatatgtacgaagattttccgttctggtttacattcttcaatcaattaggctgcgaagtggtattgtcagattatacgacgaaggatcaatataataaagcaattgatacgattccttccgatacagcgtgttatcctgctaaggctgttcatggtcatattcgtgatcttgcccaagcccaagttgatttaatctggtacccatgtattcaacatggtccaaaggaatttagccgcgacaataattaccattgtcctatggttatttcttacccagaattgattcgaaacaatatgcaagatgtgatgggaaaaacgccattttatgcgccattcttaccactagcagataagaaatcattggtgcctgctttggtgaaagccttaaaagagttaccattctctaaatctgaaatttctaatgccgttgagactgcttgggccgaacaagaaaaatgtaaggctgactatcgcgagatgacaaagaaaactgtatctcgtctcgtagcagaacaagtgcctaccatcgtactggctggtcgtccatatcacttagactccggtattaatcatggtatccctgagctcattacctctcttggtatggcggttcttaccgaagatggtgtagcaccattaggtaaggatattaaacatcttcgcgttgtagaccaatggtcataccatagtcgtctatatcatgcagctgaattcgtaagtcgtacagaagggttccaaattgttgagttgaactccttcggttgtggtcttgattccattgtggcagatcaagtaaaggatatcttatctgcaaagcataagattcatacattgcttaaaattgatgaaggtacaaacttaggcgctgtcactattcgcttacgttccttgcaatccgtaatggaacggagtatgcgtaaacaccataatccagaatctcctatagagaccgttgttgatgatacaccagcatatgattatgaacgcgttgtctttactgaagaaatgcgtaagacctataagattttggtgcctcaaatgtcacctcttcatttccaactattggagccagtgcttaagtctgaaggttatgactttgacatgttaccagcacctacgcgtgaagatgtagagataggtctaaaatatatcaataatgatgcatgttatcctgctatcatcgttgtaggccaattgatgagcgccttattgtctggtaaatacgatgttaataagacagctgttattatctctcaaaccggtggcggttgtcgtgctaccaactatattggttatttgcgtaaagccctcatcgatgcaggtatgaaacaagttccaatcttgtcacttaatgcgagtgatatggaacgtcaaccaggttttaaattgactaaatccttcttacatcgcatgattcaagccgtagtatacggcgatgcgttgatgcaatgtgtattggctacgcgcccttatgaaattaatccaggatctgcagatgcattgtgcgattattgggttaaaaaattacgggaacgtattacaaaagctaatatattccaatatagtaaatatattaagaacatcattgaagactttgacaatttaccagtcgataaatctaagccgaaacctcgggttggcgtggtaggtgaaatctacgttaaattccatccaagtgcgaacaaccatattaatgaacttatagagaaggaaggtggcgaggttgtaacctctggtctactagactttttcttgtactgtgctatggatagtacatatcgtgctaaacacttagatggtacatggctttccggattctttggatccttggctcgcgaagcgttagaattataccgtttgccatatgcaaaagccgttgcagcatctaagcattttgatccattgcaacggatgacgaaggttgcaaaagaagcagctcattatattgaccttggtaatcaatgcggtgaaggttggtttcttacaggtgatatgattgatcttatcgaaaaaggtgcgaaacaagtagtttgcttgcaaccatttggctgcttacctaaccacgttagtggtaaaggcatggtaaaaacattatccgaagcatatcctgatgtgcgcattgcagccatcgactatgacccaggttcaagtgcggttaaccaagcaaatcgattgaaattgttgttagcaacaatgtttgaatgataatgtaataatcaattatataattactgaatataaaataagcgtccctagtgatatgtcccctctttactgaacaaccagtaaagaggggacatatgagggacgcttttttatgaaattgatgaatcttctttaatcattgtatagaagcatactaatgctaatacagcacatacaaccataacaatccccatagggataccagtatgactgccaccaataccaactaatggggatacgaacccggctgaaaacatgcctgcaaatcctaaaatagcagaggcgctacctgctttgtgtccatattttgccattgccatagagaaccctgttgatccaaatacagatacggtacaaactgtaaagaacagaatgacactggttataataaaggaccaattaaaatacattgcacaaaggaataggatagaaccaatcgttaattgcaatagactagtatgtaaaatggtttttatttttacaacattacttactttggcactgattacgctagcgaggataataccgcaactattaatcccgaacatataactaaattcttgtgcagataaattgaatatattttgatatacaaaggatgaacccgaaatataggcaaagaaaccaccaaaggcgaatagctgaactagagtctggcctaagaaagaattatcttttagtagagcaccgtagtttttaaatgctgttgctataccaccggaaatacgcttttctgatggtaggctttcagtaaaaatgaaagagctcataagtaacagtgcagagaaaacggcgaggacaataaaaataaagcgccatgtagaaaataataaaagctgaccacctataagcggtgcaataacaggagctaatccgttgacgagcatgagtagagacatgagtctcattaattccttaccagatgcaaaatctcgggagatggccttagcaataacaactccgatagaacctgttaaaccttgtaaaaatcgtgcaactagtaaaatctcaatattgggcgcaatagcacagagtatactagcgattacacagaggatattgccaatgatgagtggttttttccgccccaatgagtcactaagaggaccgccaatcaattgaccaatagcgataccaaaagtcataataccaattgtcatctgaatgagggacgcatttgtattaagctcatgaggcatgattggtaatgctggtagatataaatcagtaccaagtggtgtgatagccgtaagaagtcctagaaatacgacaatgaataaagatattttctttgtagactccataaaatctcctatattaaaaaaagggaaaaataaaagtctgcgaatcgcacttcgcagactgcatttaattttatctatttaataagggtattgtaacatgattaataagaaaaagctataggtttatgtatgagtaacaagggtattgcttattagtatttgaaataaaaagaacagctcacgaatgagctgttcttttatattaccaattcttagaagaagatgtggtgaatttcatggatgaaatgttgaccgaagaaggagatacaaccatgcatgatgatgaagatgatgaagtatttgaacgcgctgttcatgataacacttgcttcgatttcatgttctaagttgtgagcttcttctgcattgatttctttgtggttttctaagtatgctttcaaagcaggacctacggcaccaatagaaattgcaatggattgtggggacaacattttgccgataccagctgcaccggagttaacagctgctaaccagaagccaagatcttcgaagtttgtaggatttaaaccttgagctgcagcgatttgaagtggtccaaacaatacgttggagtttgtaccggaacctgttaagaacgcacccaatgcacctacgataggagcgaatagaggatacaaggaacctgtacctgcaaccattgctttagcgatgtctgcagtcataccagagtatgtcatcaatttagcagtcataacaactgtgatgattgtaaggtatgtgaatttcaagtttttaactgtggaacccaatgtaccgaagatttcaccagcttttgctttttggatgaaaccaccaacgataccagcgatgaaaatcatgataccaggagttgcaatccatacgaatgtgtaaggttttgcaccagcaccttggtaaataggtacagatgttttaatggatgcaagaggaccattgattgctgggaacaatttagaggttaataataataatacgaagattaagatgaatggcattgcagccacaaggccttcgccaccagaaactttaggaacttcgccagtttgtttaactgcgtattgaggatcattaggaggcataatttttgcacaaccgatgatcactgccatgattacgatggatgcagaaattacggataattcaggacccattacagcattgattacagtttcaggaatagctaatgctaaaccagaaagtaatgttacaaggaatacgccttttaacgctttgataccgccaccgataatcataactacgaagaaaggagcgataaggttaagcaagaataattgtacggaaatgaatgtacctaaatggcttggatcaaggcttgttaaggaagccaatgtagttgttgggataccaatggagccgaatgttgttggtacggagtttgcaacgagacatgcgatgatagattttagtgggtcaaaacctacggcaaccatcatagcagctggaattgcaacggcagtaccaaagccagccataccttccatgaaagcaccgaagccccatgcaagtaataatgcaagtacacgagtatcagatgttacagaggaaagcatggttttaatagtttccatagctttcgtatgtactaccaagttgtaaacgaagatagctgctgtaataactaataggataggccaaattgccaatgcggcaccttcaagggcgccagtgaccataataaatgggtcggattggaatgctgtaatagcgatgatgaaagaaccgattgcagcaacacttgttgcttgccatgcaggtaatttcaagatggataacgctacgatcaaccaaatgattggagatagcgctaatagaacggtgagagcactcatttctaaaatcatcctttcaagaaaaataaaaatatatgcttaacaggacgatgtagcaataatcaatttaattgatgagtaattcgctattggattaagttgtaaaagttcagtaataataaaagattacaataaaataacagatatacttatcagaaaaagtgatatatctcttaaaattttttaacctcatagcttatgaggttaaaaaaatataagagaggggacataaacagtgtttatgtccccctctgtactaactacatgtccgtgttagggccaacactaattagatattagtagttacctttgaacattgtagcaggagcttctggtacataatcgccgaagtaggatttgaagtctaaacctaattcattgcaaagatcttgaacttcaagcattgtaccgttaagtacagggatgccttcagctttaactttagcaacagattcatgttctttttcgccatgagtgtagatgcggtcttgaccttgagctttaggagcttcacgtaattcttgtaagaattgagagaagtgttttttgatttcagctgggtcaccgaagaattcagggttgatagccatgaagccgtggcagatattggatttgccgccaaccatacatttattggaagtaccaccttgggaaaggatggaggagaacaattcagcaatcatgccgttaccataacctttgtggccgccaagaacttctgtagcaccacctaaaggaaggataccgccgccttcatgacgggaaatgttgcccaatacttcagctgcgtcagtggaaggaacgccgtctttgttaacagcccaaccatctggagtagctttgcccattttgttgtacatttcaagtttaccacgagttactactgtagtggagcaatcgaagaagaagtcaacaggatcagctggtacagtccaagcgataggattggaaccaagcatagctttacgagcatatacaggaaccatgattgcttcggagtttgtacaagagaaaccgattaagccttggtcggatgccattttagcatagtaaccagcgataccatagtggttggagttacgtacggatacgataccaacaccggattttttagctttttcgatagccatttccatagctttgtgacccaacaattggcccatgccatcatgaccgtcgataactgcggagattggagtttcttttacgatttctggttttgcgtcgattttgatcaagccattagtgatacctttgtggtaacgaaccatacgttgcataccatggctttgaataccgaacaagtcggaagtcaaaagtacgtcttgaatgatgtcagcttctttttcggagaaaccgaatttttggaaagcatccatgctcaattttttcaatgtttcataagggaaaagaacagtgttttttgcgtctgccattgttaaaacctcttttcagaaaatatgtacctgatatagttgactccactccgttatatcaatgaatgtgatatgatgtccggtgagttctatatcctctcaaatgacaatgtcagtatagcacacaaagttgagttattgaatagttttacataacttaatgcattacataatttgcataacttacgtgaaatttatcacacaggttaacaaaaagcactgaaataatcgataataccttgaaattataaattatgacttttggtaatagatacattcctgaacgtaaaaaatggtacttttatgcgttgcttatctgtttgtattgtaggggagaaactataaataaatactgaaaagtatcgatatttattgtgtatctacatggtacacattaataaaagttataatgtcacacacttattttgataagtgattttgttatatgcattgatatacaatgtattcattgatacgaagtttgaaaaatatcgatattcgttaattttgttacagatatagtgatgtatgtatgatactataaatatacatataaaattactgctataaatacgatgataagcgaggtgcttatatgaaagaatataaaagtgtatgtccctatgattgtcctgatgcttgtggacttatacttacagtagatgacaataaagtgacaaaggttcgcggtaataaagagcacgctttcacacggggcacattatgtcctaagatggctcattatgagcgtgttattcattcgcctaaacgtttaatgacaccattacgccgaattggtaaaaaaggtattggtccagatcaatttacacccatttcatgggatgaggccttagagcgaattgtagaaaattttaaccatactattaatacctatggtagtgaaagtattcttcgttattcctatgcggggaccatgggggctgtaaatagtcctgcagcggactatttcttccgttgtattggcgctactagtcaagacagagggatttgttctcctgcgaaacaagcagcatttaagtctgtttatggagacacagtagctatcaaaccacaagaagcacaacatagtgatttgattatattatggagccttaatgcgacggctacagatgtacatatattacacgatgtgaatgtagcaaaacgaaacggcgcttttgtatggattatagatacccataaaacctatacttatgatcaaggcacacatcatgtgtatgtaaaacccggttctgatggtgcattagcacttggcatgatgcatatcatacatcgggatggtcttgaggatactagatttattcaagcatatgtgcaaggttatgatgagctagtacgcgatgtattgcctacatttactccagaatatgtttcctctatatgtggtgtaccggttgaaatcatagaagaactagctcatgcctatgcaaaagcaaaggctccatttattcgccttggtagtggtgtatcccgctatggtaatggagcaatgagttgccggtgtatcaatgccctccctgccgtggtaggtgcatggcaacatttaggtggtggcttattatctagttctagtagtagccaatattttaataaatcattcatgcaacaacctaatacaccaacgccgtctaaacggatgatgccgatgatattattaggggatttgttgacaaatccaaaagcgcttctagagcatggattagaggatactagtggcgggattcccgttcatagtctatatatattttcatcaaatccagctataacggcaccaaatcaaaatctcgttagacaaggtcttatgagagatgatttatttaccgttgtgcatgaacgcttctttacagatacatgtgcatatgcagatattatcttaccagccacgagctctgctgaatccgatgatatttttaactcttacggacactatacaattgcggctagttaccaagctattcctccggttggtgaatcgaaatctaattggcaagttatttctgaacttgctcggcgtatgggcttagatgatcctttctttgccatgacagcacgagaactaattgagcatatggttcgcaattcgtctaaactttcacaagacgaacaagatgccattttacgtggcgacttggttgaagtagtattgccagacaattataagatggattttaaaacgccgtcaggcaaaatcgaaatcttaaatcctcgagaatctattccgttgattacctatacagaaccttatggtgatgatgaaccattctggttgattatcggtaatgatatacgtatattagattctagtttttgtgaactagaatttgatgattctgaattgatgaagctacgaatgcatccagatgatgctgcattatataacattaataatagtgatgctgtggaaatttataataatcgaggggctgttcgtattaaagtatatctagatgatacggtacaacgaggtacacttgtgacccttggtgtatggtggcaatctcagtccagtgacgcaaaggtaggaatcaatgctgtaactgcatctagaccgactgatgaagcatgggggagtacattctatgacgtacaagttaatattcgtaaggtgtaatgaaagttcgatataattcgattttactgttgaaccagattaccatatcatatataatgttatctaatatgatagtgtagtacgaagggagataaccttatggatggaaaagaaaatctatcactgcgcgcctatttagccataggcatgatgttattcgccctattctttggtgcgggaaatcttattttcccggccgcattaggtcaacacgcagggtctaatgtaggatgggcattagctggtttcgtattaactggcgtaggattaccattacttggcgttatggccatgggctattccggatgtaaagacgttgaggaactagcaggtcgtgcgcatcctatatatggtcttatttatacagtggccttatatttaagtattggtcctatgtttgcgacaccaagaacgggtaccgttgcgtatgaaattgcgatcaagccatttttacaaggcatgactttggatatgcaaccactgttccttgctatattctttggcgtttctttgtggctatcgattagtcctcaaaagcttgttaatcgtattggcaatattttgacacctgcattattgcttgttattttattattgattattaaatcttttgttacaccgattggggcatatgcggtgcctcaaccagcttacgcgactaatggtacagccgtattgcaaggcttcctcgatggctataatacaatggatgctttagcttctgtggtattcgctattctcgtcattgattttgtacgccttacaggtgccacatctcgcgatgttattacgaaaactgtgatggaggttggtgctattgcggtagcattactcggcattgtgtatatattcattgcgaacatcggcgctacaagtgtagagcgatttggcttgtttgatacaggtgcaccggtgttaacagctagtgcggacttcctctttgggggaactggtcaaattattttggctatcatcgttctattagcttgcttgagtacaagtattggtcttattacttcttgtagtacatatttccacaaactatatagcaaaattagctataaaatgtatgttgtcatattctctgtggctgcatttgcacttgggctgttcggattgaaaacaatcattagtgcagctattccagtgttgatgttattgtacccgttgacgattgttattatcttgttagccttaagtgatactatttttggcggtcgtcgttgcgtatatggttggactattggattgaccatgatttctgccttaatgagcggtcttgaaactgctggttgggcacctgatgccatcgaaggtttgtttacccaatatattccgttccaaggtattggtatgggctgggtaagttttgcaatccttggctttatcataggtcttattcataaaggcttggtttcagatacaactaaataaatgtagaatgttactcgcattctccttttatactctattggctcagtccttcttagaaggattacagtaaaagaaaaggggggatgcgagtgttttgtttatagtgataaacatcttttttcaaatagtatttcctagtataatgtttaataagaaatgaaagattgtttttagtaagccgaggtagttatgaacgaaatcgtaaaaggtggtttgtatcgtcattttaaaggtatgtattattacgtgttagatgtggctacacattctgaaacgggtgaaaaattggtggtatatcaaaaattatatgatgaccgcgatttgtatgtacgtcccttagacatgttttgtagcgatgtagatcgagataaatatcctgatgtgaaacaacaaaaacgctttcaattaatgagtggacgagatgaatagtgcttaccgggtagagtttatagtttgtatatgaactcgtatatagcgatagataggaggacttgtggaacaaaaatttttcttttttgatatcgataacacattggctgtgtggccggaaggaaaaattccagatagtgctcagtactgtatagatgaattgcaacggcgtggccatttagtatcgattgcaacaggtagaatacaagtcgatgctatgcgttttgccgagcaagctagaattacgaatgtagttgctgatggaggtcatagtataaccattgatgggaaattggtatctatgattggcatgaatcgagatatgtgtattcaatatttagaatatcttgagtcaaagcatatcccatgggctgtaacagaccgtaataaattggggcgcattacaccgtataaagaaatattagaatggcatcctgattgggacgtgtttaaaactgtagtggatccagagttcgactttcacagtgtagaagatttctataaaatctatgtattttttaaagatggcgaagaagaggaaaaagatatcgagcatatgacgcataaacttattcgctatggcgatgggtgcgttttatatgaacctatggaaaaagcattggggattcgcaatatgatcggacattttcatatgaagccaaatcaagttgtcgtttttggtgatggctataatgatttgtctatgtttagaccggagtggttaaacattgccatgggaaatgctcgtccggagcttaaattagaggcagattatgttacaactgactgtgataaggatggtatttacaatgcatgtaagcatttcggatggattgattaatcgttggcataagaccatttagattataaatttttatagaattttaaagaaattcatagtgaaaacatgatatactaataaagagccgctcatgggttgagcggtttttctatgtatatataatttggggaaattctatattttgtgagggattatcatgaatgttaaaagaatattaggttgtgctctattggggggcatgatggtagtaaccgcagcgtgtggcaataatagtgcagataaaacgattacacctgttgcacaagctgaaacggttaataagatgcctaattttacaaatgctccaattgcagatgaatatgctgtttttgatacaaattatggacaaattaaaattcgtttgtatggctctaaagcgcctattactgttaaaaactttgactaccttgtaaaaaaaggcttttataatggcgttacattccatcgtgttatcgatggatttatgattcaaggtggcgacccaacaggcacaggtgcaggtggccctggttatgagattccagatgaattttctaatgaccttcattttaataaaatggggattcttgccatggcaaatcgtggaccgaatacaggtggttctcagttctttattaccttgggacctacgcctcatctcgataataaacacaccatttttggtatagttgtacaaggtatggatgtggtcgaaaaaattggtaaggtaaaaacagataaaaatgataagcctgttgatcctgtgatcattaattcgattaccattgagccgattaaggatgacgctagtaaataagatgaatcatgaacaatttttcacgtatattgtgagatgtgctgatgaaagcttgtattgcgggtggacaacggatttaaaaaaacggttggatgctcataatggcgttataaaaggtggggctaagtatacgaaatgtcgtagaccagtgtatttggtttattatgaaagctttcaaagtaaacaagaggcacagtcgcgagaatatgctattaaacgactcaataggatacaaaaattacagcttattgcgtcaggtgagaatagagaaattgaacgtataaatctattgaaatagagtgtacaaaacattcaaaacgacccttgtttgtgctataatatattgatatgttttatcggttaaaaacaccagtaaatacaaggtttattgtctaatcgtcaataaatccgtcaaaaattctagccgaaaattttagacacactatcatgtgcctttaatctcatttcatcggtatagtgaatgtacgtattaatgactgtatcgacagtatcacctaataaggatgctactgtttttatatcaacaccatttgccaataaccttgtagcgtatgtgtgccttaaatcatggatggatgtgttcggtaagtagcgtttaatcattaccgataccgcaccagtaccaccagttggattgttgaatagatataatccgctggtggtatttttgcattcaagcaatatatcaatcagtattggtggaataggtatttttctgtaactgttttttgtctttagattgcggatcatatatgtactttcaccgctataagcaaattgtttattcacatcaataatagcgttatctaaatctatatcatcccatgtaagacctaagatttcaccatacctcatgcctgtataggcagcaatggaacacacgatatagtatttgtaattatggccttttaacgatgttaacaggtatgttacatcatcttcacttacagcattgattttagcggtttgtgttttatgcaaccgcttaatattcttacacggactactattaataattctatatggcgatactgcataagcgaatacctttgttataatcgttatgcacatatttttagtagctattgattgttgtaaatcattaattactttccgaatttgtatttcagaaatatcttttactttcatattgaatagcgtgttgaatttctgaaatgcattgtcatatgctttgaacgtagaatatacatttgctttgttttcatctgtatatatcttgtaaaactcaataagcgttatatcttttagactatcatcaagtggattggtgatagtcttttttagattgtctactatttcttggccgtaaagtttagcttctctttgtgtggcaaagccctgtttagatttctgcttccatttatatccgtccttatagctaactataatctgatagcctttatcctttctccgaattgttgtattgaattgcataattcacctcatatgatgtgtgtgtaaaagttgataccctctacatcgtcaaattgccttgcatgagccatgcgttccaacaaatcaatgtgtgcctgactgtacatatcatcgtttaatatatgacctatctcatgtagtatacccttacgttgtacatcaataggtttatcactattaacgagaatggtgtaagtaccatcatcgtttagttttaataccgcagtttgtgttttccgtaattttatataaatcaaattaatgttcatactatcatcccctttgtagggttattgtatattattccacatggaagttttgacacatgctatttgatagtatggacaatccacatgattattgatgtaacccaaatagatatagaagatgatataccaacgcttaataacagatttggtttatatgtgattaaaaatatattgaataacaccgcaataactaaccatgggagtataaccacatatggcttttcttgcttagaataaaaccaaacaaacgcaatcaatcctattaaaccgatgataccagcaacagtaggaaaaccgataaaataagcaacaatagaaatgaacgataataacaattccatattatttaccctctcttttctttaacatctctatagtattaataacgaaattaatatcatcttttgacatgtctttacttgcatcaaacaataaacgtaaatctggattatcttttattgcttgtgcgtattccgaaacagatggatcattatagtattgttcattttcagagtatttgttttcaatcaagtcagctttgtttactctaaagtaattagctagtaattctatcttatctatacgaggatagttagtacctttaatccaacttgtaaatgtggtgtatgaaacaccaatatcttttgcaacttgcactctagttttattgtataggttcatatagtactgtaaattcttggagaatatttctctattgcctaaatcactcattatactcacctcattgtaattttaaaatatttgttgttatttatataatatatttaaactgcaaaaaaatcaaatatttttttatatttttacagaaaaactgttgacattacagtttaactgtaatacaatacaatcaacgaaagggaaagtgaggtgataaattgaaccaacaagatttcgtaaaagatggaattacattaaaagcagcacgagtaaataaagggctgacacaaaagaaagcagcggaaatgctaggtattagcgaatatacgttgatgaattatgaaaaaggaaaatcatccccagatgtacatgtgctaaaaaagattgaaaatctttatgaggttccgtaccacaagattatttttttgtaaaagagttacagtttaaatgtaattttaaagaggtgattagatgctagtacaaaatcaagcggatctaaaactagccaacaaacgatacggacaaacatccacaagatttggatgggctggtcgaaatgatgagtacggccaatactggcgaaaactcatcaaatcaaaatggcctaaacgtaatcaatcaagatggaataagaaagtcattctatcttgggtaaagttagctagaactgctgatttacacgcaaggaacgaaaagcgatggagagcctagtatacacggctaaccaagtagcggaactatttcaaatttcactaactgcagtatatgacctaagaaataaaggcaagctaaaacaactaccgaatgtaagtggtgtgaggtttagcaaaaaagaggttgaagcactagcaggagttgaaagtgaatactcagctattggttacagaaaacttaaaaacgaggtggaagcattaagagaagaaaacaatcgtttgaaaaatagcattaaaaaaatcactggcgatttgctagtgatggttggaaaggatttgtaatgaaattcatatttttagtaagagttatatctgtaattcttatggctggttcaataggttctgttgaactggaaaggatagatgaatacacaggatttttgcaagtcgcattaggaataactttgatgattttatccaatttctggatgagggaagtcagaaaggaaataaaaaaatgatgctgattagaactatgaatgggcaaaaacaaattaaccctgacaaggcgtatgcacttggattctggtgtacaccaaaacaattatcagaaaaattaaaaactaaattattcgacagattgcgtgcagcggtaacagaacaggtgaataaagaaaatgcacgcttaccaatccaatatcgtgcttttgattatcaagaaattgatttcagagtatccgatatttggaataattgtgcggtgccaagtatcatcatggcttgcagagaaatggaaaaagcacgctaggccgtaggaaaagcaagcgtgctagtagagagtatgtcttatatctctacttgtattttaacacagagtataaggagaaacaaaatatatggaaacagttgatgtaatcgtacaaccagcaattgaaccacaagtgattgatagtaatttaactatgacatggaataacgcagaacttgcgaagtaccttgaagagaaattagaaaaatacaatgggttagttgttacggaagataacctaaaagaaatgaaatctgtactaaaagagattgtatctatccgtacaaagttgacacgatttggtactgataaaaaacgtgaattaaaaattccgtataatacattcactgcagaattagaacaagtattagcagtggtaagtagagttgaaaaccctatcgcaaatcaaatcaatgaatttgaacaacaagaaatgttgaaacgtaaagaaacagtattaaatatggttgaagataaagcacaatcattaggtgttagagaagagtataaaaacagagtaattccaaaccataaatggtgggaaaacaaaaccgctaaaatgtcagatgttgcactagctattgatgaaatggttaaaaacgttttagaacagcaacaaaacgatgatgatctaaagcgtatgcaggctgaaaaagtagaaatgattaagatgaaaattgatttatttaatcaaaactacgcactagatacacctatccaatacgaagaaattaaatatcgtgttgataatattccgtttggtgaattggataatgtgctttccaatgaatttgaaaagcgacttgaaattgaaatgaaagcgaaagaacctcaacaaacggaaccgatattcacagaacaaccacaagtaacagaggtaatcaaagaggaagtaaaaacagtaacttatgttgtaaagaatatcaattcaagacaacgtaaagcaattaccgatacattaatccgattaggtattgaatggagcgaaatttaatgaatagaagtgaaaccataacagaaatagcaaaagcattagcgaaattccaatcagaagtatctgacccaaacagaacaaaagaaaatgcatttctaaaatcaaaatatgtaacgctagacagtttactacaagcggttagacctgtattagcaagtaatggattgtcttttttgcaagtaccttttacaggtgctgatgtagtatctgtaactaccatgttattacatgaaagcggtgaatggttggaaagcgaccctttcacgctaccattgatgaaaaaagaccctcaaggtgttggtagtgttgtaacgtatgcacgaagatattccttatcctctattttaggtgtggcttgggatgaagatgatgatgcacaaagcaataacgaaactgaattaaccaagggtattaaacacgaaatttctgaattagcaaaaatcaaaaatgtaacaaaagaaaatgctatttcttatatgaaaacaacatttaataaatcgtcaactgaatttttagatttgcaagagttacaacaatttaaagcgtggctaacaactctatgaaatggacaacaaataacatcgaattattaagaagtccactaggtgtaatggtagtcataccagcaccacatgacaatgacctagcgaaattagataaagaaaaggaatacgtgatagagattaaaaagaagtcaaaatcacgcagtttaaacgctaacgcttattgctgggttctatgtcaaaagatagcggaagtcatgagcgctcattcgtatacatctaaagaggatgtgtaccgcaaagcaattaaagattgtagccattttagttacgttccagtacgtgaggatgccatagaacgatacattcaaatatggcaagcacacggaataggatggatagccgaagatgcaggcgaatgtaaaagcctacaaggctatcacaatattatgtgctaccacggaagcagtgtatatacagtattagaaatgcaacgattgattgattgcctagtcgatgaatgtcatcaactaggaatacaacttgaagatagtgattacatacaatcgctagttaaggagtgggggaatgaacaagagaaaaagggaagatgacaaactctacaaaatcacaagactgaaagctattgaacgagatagtatagacggctatccgtgttgcgtaatatgtggcgcacctgcaacggaagtgcatcacatattccctagaggtagaggcggcacaagtgaattaaccaatctagcatgcttgtgcagatattgccataacaatttagcacatggagtatttgcgaaagaaaccaaaagaaagctagaagcgatcattgaagaaaggacaaaacgatatgaagagaattgatgtagttgaactatatgtaagaaagcgtattgaaattctagaacgtgaaaatggcgaatataaagttaatcaaaaagaaatcaacgagttaaaagatgtactggatgtaatcgcaaaaacaagaactgttagatgtggtaagactttgacaaagattaatggttttgatgttgataaactcatcaaacaaactaccagctatctataaggactagcctatgagcgacaacaaaaagtattactatctacggctgaaagataatttctttgacagtgatgagttgaagatattagaaagcatgaaagacggctacttgtacagtaatattcttttaaaactctacctacgaagcctaaagaatgacggaaagttggtggttaatgatcgcattccgtacaacgcagaaatgctagcaagtgtaactggacaccaaataggaacagttaaacaagcattatcaatctttaaagacttaggactaatcgatgtgctagaaaatggtgctatctatatgttggatattcaaaatttcattggtaaaggtagtagtgaagccgatagaaagcgtgaatatagacaacgaatagaaacagataggacaaatgtccagacaaatctccgacaaatctccgagaaatctccaccagagatagagatagagttagagaaagatatagagatagagaaagagatacatagtagtgcaaaaagcactacaacaaaacgcaagcgttttgaaaaacctactctatctcaaattacacagtattgtcttgaacgcaataataacgtaaatgctgaacaattctatgactactacgaaagcaatggctggaaagtaggaaagaacgctatgaaagattggaaagcatgtgtaagaacatgggaacgtaattgttacgataaaccaatcaaaaagaaaaacaataagcaagatgcattaaatgatatgcgagatttgatgaacgaatatgggggtgtaaatgaacaatcaaatgaaccatcaacagaagatactggaagcactattgatattgagtacagggtggaacactagcccctctaaagaaacaatcaagttgtatgtacatcaattatcgtatgctgatccattaattctacaacgagccatgcttaacctgttgagtaaatgtaaattcttaccatcatttgcagaaatagagagtgagtataaagaacttgataattacatcaacggaaaagaagaaatgatgactgcacaagaagcttatggggtagttgaagatgcagttagactgtatagctatgagcatgggttagagcatttagacggaataacaaaacaggcagcacaaacaatatggagtgcgtttaacccttggaatggtgattataatcgtgctgcttgtatgtctcaatttgtcagatgctatgaagagttagtaaaaaggaaaaacagaaacgatgaaaaagcatctgaaattaagaatgatggattgcttttagaaatgaagatgaagaaagaggaagaacgaaaacaaatagaaacaggcaatgcacaaatcaaaatgctaccaaatggacatttaattgaaacagtcaaagaggagcgaaaaccagtagatttaaatgaaatactagacaatgctgatatttctgaaaaaggaaaagcattactacggcaagcaatagggggatagatgaaacaaaagccaaaggaatttgaagtgagttgtaaagtatcgtttgatgtcagctttacagtattagctactagcgaagaacaggctagagtgaagattgataacctacttgaaatcatgcgtgatgaagcaacagtcgattgccacattcaccctaattacgatgtgtacattgacgatgtaaaggtaactatgaatgggatgtattacgactaagggggttaaatggtaagcaaaaaacataaaatggcaatcctaatcgaaataccactcaatgtggaaactgagcaggaagcaacagagcaaatgtcaatgctaatgcaggcgaacgcaaaagagtttgagtgtatgcatgacatgataagaacgtacaaaggcaagattaatattgaaaggaagttaatttaatgaatagtgtacaaattctaggcaatctagcacgtgatcctgaattacgttttacaaaaacaggacgagctgtagcgactttcacagtcgcagcgactaatacatatattgactcagcaaccaacgaaacaaaagaacaaactgcttttatcaattgcgtagcatggggcaagacaggcgaagccgttagtgcatgtaagaaaggcgaacggctattcgtagaggggcgattacaaacacgttcctatgaggatagcaacggccaaaagaaatatgtaaccgaggtaattgctagtttcataggacggaaattagagagtgaatttgatagcggtagtaactttgatagttttgaacaaccgcaaaatgaaaatattccgttctaggtagttattttttacttaaataaaattattgcaataaaagagcatatcaagaaaggaatttcaaaatgacagtacgtgaattgattgagtatttagaaaaatgtgaccaagaacaagagtgttgtatcgatgcaaacaaaacactttatgagattgaatatgttgataatttgtatgatggatttggaataaatattgttgctggattggaaaaagaagaagaggaataacaatgttggttgaagataaaacaaaatattgctgggtagacgatgaaatagcaggtgaaccacaaggcagtattaaagatgcaatagcggattatttagaatacatcagttattttggcgatgttgattgcgattgtgatattgaatgggtacgcattggacacccttatcattatgttccagagattgatagtgaacgagtactttggaatttaattgaatatgatatggatgatgaaattaaagaatggtcagacgattacttgaacgatgtaaagaaagagcatattgaagaactaagcgaagaactaacaaaagtattccgagcatgggagaagaaatatgggttcgaaaatcgtgcatatgtagttatggaaactgagcagtatcgtattggtgattacatcgacaaataggggtatggattatgaaagtaccatgtaaggagcgagtatataggagatgcacatatggggattatttgatgatggcaacggctgctatcgtcaagcagtagatgaatataacatgaatacgggggggcagcacacaataacatcaataggaattggtgatgcgtgtatcaatcaagatttagcaatcaatacgttacacaatcccaaagcactatgggaaaaactagatggactagatagacctgatgttattctagctagtccaccatgtgaaagctggagtgtggcaagtgctatgaaaggtggaaacgcttgctggaaacaagaaaaggatatgactataaacctgtttggtgagtatgaaaaagcaagtaaattcacaatcagaaatcaagctgattatgaaaactaccaattcaagtatgacaagtcattcctaacacgtatcaatggtgaaatgtgtatctataacacgttgaaaatcattgaacgttatcaacccaaagtatttgtgattgaaaacccagcatatgggcggatatgggaatacatagcaagtgtaatagggttcgatattccatatgaaaacctaacttattacaacaactatgattatccaatcaagaaacctacaaagtttggtagtaatatcaatttgaagttattaaaagataacattagaaacactattgagtttgaaagaatgaatatcaaaggtgttaaacgatacaatgctagatcacatattccgttgatgttagtacaggatattttaaaacgatgtgagcaatacgtagagaggtgatatatattgccagtagaaaagaagaaaaagaaagtaaatagtaaacgaaaaggtgcagatggtgaacgtgaatttgccaatctatgcaaggaacatggatttgatgttcgtagaacgcaacaatattgtggaaatacaggtgatgccagtgattgtgttggactacctaatatccacatcgaagtaaaacgtgtgcaagcattgaatatagacaaggcaatggcacaagcggttcgtgatagcgaacataaaaacgtgatgccaatcgtggcacatagaaaaaataatgctaaatggttaatcaccatgagggcggatgattggtttgaaatgtataaagaaagcggattaagtaatggcagttaatacatcaacatatggtattccacacaattgcaagaactggctagcgttagcatcggtggtgtggggcgaactggatataagcgaggccatacatattgttactgacaaaggcaggggattgcctaccaaaagaagcatacaagatgaatttgcattgactgataaagtaattgcgttatgcaaaaaaggattaacgaataaacaaatcatggctgagttgaatatatcgagcaatcgagttgttagagcgaagaactggggagaatggaataatgttagtgaaattaataaatgaatacgcacaactaccgacaagaggtagtaaggatgcagcaggattagatttgtattgcccctttcatatcaaagtacctgctgacagtcaaaagaaaattccgctaggtgtagcagtagaaatacctaaaggatatatggggatattagtaccaagaagcagtatgagtaaaacacctctaagatgtgcaaatagcataggagttattgatgcagattatagaggagaattaagcatcgcatatgaaaacatatcttgtagtgattacatgatatttagaggcgatcgcatcgcacaattaatcatcataccaatcgccattgtagatgtagaagaagcacaaacactcagcgaaacagaacgtggcgatggtggttatggcagtactggtaaataaaaaagacagtaaatagacagaaaagacagtagaaagacagaaagtagacagtaaaaggagaaaacaaatatgaataaattagtattagcaacaatgattatgggtacaattggcggtaatgtattagcaagcggtgtagttacaggccctgtagagcctaacacacaagcaccagtagtaagcggttacaattctgtagccgtaggggcaaatacagtagttacaggcacaaatacaattgcaattggccgtgataataaagtaacaggaaatgatagcgttgtaatcggtggtggtaatggaacaatcgaagccgaccaagcaagcgtaattgggtataacaattacgtaggcaataataaagaacaaactgtattaggtgctaataacactgtagacaatcaaggtgcaatcgtagtaggcacacatagcgtagtacgtggtattgatgcggtagttgttggtaacaatgcatcagcacctattcaaaattccgtagcgattggcacaaacagtcaaacggataaccctgtaggtgtgcgacaagttgtattgaatggggtaactcatgtgttcgcaggtgagaaccctaatagcgtagtatcctttggtagcaagaaaagcgatacatacagcggaattagcaattacaatagacaactgcacaatgtaagtgcaggccgtgtagatcctagcagtttagatgcggtaaacggcagtcagttgttcgcagcatatgacgaaattgaaacaaacggaacacacattgccaaacttcaaaaggatgtaaattgtttagataaacgagtaacacgaaatactacaaatatctctaatttgacttctaaggtggataacggatttacaacgattaataactctctaaacgctacaaatgagcgtgtagggcaaaatagccaagccattttgaacaatacggatagaattaataatcacgaaacacgcattacagatttagaacgtaatacagtaggtcaaatctcaaacgtgatgcatgaagtagcaaaagctggtgcatctactgctgcactaagtgcgctacactatttaggctataattctgatgacaaactaacattcgcggtaggatacggccactacaaaaacgcaaatgatgtagccctcggtatgttctatgcaccaacagaacacgttatgtttagcttgggtactacattagccaataagatgattaatgcaggtgtatcctttagacttggtaagggtagtgaatacgaaaccaaccacaaaggcaaaatcaaacaacttgaagagttggtaaatcaattagtagcggaagttgaagaattgaaagcaggtaaataaatgtgtacaccgataggatcatataaaggcgatgcagaaaaactacaaacgaaaaaagcaactaaatttgcacaagagttattctttaatgcaatcatgggtgtatcgctagtagctttgatatttgggtttgtgattttaattaaagtattgattggatagatataggcggtgaaatatccgccttatcataagaggttagtatgttaggatatagcggatacgttgtacactttgattattttatagatgtacatgaaacaaaagaaagtgctatggaatttctaaaacagttagcttatgaaagcggtgaaaaccaatttgtagtcggtgtggctgttaaaaaagatgatggtatagtattagaatttcctgatttataccaatatgacgaagtaagaaaagaatggtataaattgtggtgataaaaagcataatgaggtataagaattatgaacgataaacaatttacagatgaattgttccttagaatgtatgatctaggatacaaaaaagcggaaatagaaaacggaacgatattcttttacaaagaccgtgaatgtatttcgcaatggtcaaatagagttgatataagaagtacgtgttttacagaagaaaatcaacagattgatattgcagcatatctaggtgttgttgattggtcaaaagtggaagttgatacaccgatttttgtaaagaatagaagtgaaaatgtgtggaagtgtagatattttgccaaatatgaagatggaaaagtgtatacgtggtgtggtggaagaacatcttggagtaatgtaatagcttatgaacctgttaattgggagtatgcggaactagcgtttaaatagtgaggtggaatgcttggaagaatatgaagaaaaacaactaatagaaaaggcggttgagtacctacaacctgttaagttaattgatgtacagattgcatcaattaaagaagaaatcaatcagttaagagcgaaccttacatctataggtgcgattgattactcaaaagaccgagtaacaggcggtggaactccgcaagggttagaggggagcgtagctagatttattgatacagtagcagaacgtgataagcgtattgatgaattatcagagttaaaatgcgatgcgatcacattgattgatagcctagatgaaaaactaggagcggtcattctaagatatgagtacatattgaataccacaacggaagatgcgtacaagatgattggaaattactcaactaaacaggcgaaacgatataagcaacgagcattgattgaatgtggcgaaaagttgtccgcaaatgtccgcaaatgtccgcaaatgtccgtataagtccaagtctatatatagtagaatataaggtgtaagagttgccaatgagcaattctaagaactaaatagcaattgaggtgcggttttatattttgtatttgaaaatcaacgagtattgtttctaagtcattacaatctatattattttctaactgtaccgcacctcttatattgcattttgtaaactaataccgcacatataatcctttccaatattgcaataacaaccaactatacgtttcatgagataaaaccttaagcgaaaaaatgttacatactacaaacaactagcggtattagtttagagagtgcaattgcatattgaaaactaaagctatatatgttccattaagaaccgagtattgtgcgagcgttagacagagtgagctaaccatgattacaattcatacactcgtgttggtgagaaccaactatataactttggttttgagtatgcaataaaaatgaataaaactatcacataatgaggtatatccacggcgatatatctcattttttgcataaagttatcaaaaggggagaaatgatgactgatatattgtgttgtaaaagcaaatgcttaaacaacaagaaaggaaaatgtacggctaatgtcattgaatatgatggattatgccaaacatatatcacacaggggaacgcaagaaaaagtacatgtggtttgtgtgttagatctaatggaaagctaaaacggaaaggcggtgaagtactaaaatgattaaagcgattaaacaattcattaaggatagagcgttattcaaaaaggctgcacaagatttagataacaaagacttacaagcgaaagcaaaatatgcgtttgaacatcgtgaagataacgtgttaagtattattgattgcctagccattgtgtgcggtgtattgattatagtcggtattgtgtggtgcttgatgtgaattatcaaccaacgataaagaaactactgaaagcgttacaaatgaacggcaggcggtatgtagtcgatgtacggcaaacatggagcaaatatgataagccttgtaaggtatatatcgttaatcgaatgtatacagaggaagagtacaaactaacatttcctcataagtacaaaaagggcaagacctttaaacaaggacaactatataagaaagaaagtgagtatagcagtactaaacaacatgaagtactgctatttttagttagaacatataaaggtggtgattgatatatggcagatgctaacaccttaacagaaaaagaacgtatatttgcagatgagtatatcaagactaccaatgcaacacagagtgctattaaggctggatatgcagaaaaaagtgcatcaagcaagggaagtcagctgttaagaaaagtaaaggtacgtaaatacatagatgatgtaatggaaaagcgaagtaaaaacacaatcgcaactgctgatgaagtgttggagtacctaaccaaggttatgaatggcgaagaaaaagatgcatttggtttggatacctcaattgcggatagaaccaaagcagctgagttgttaggtaaacggcacatgctatttactgacaaggtaaaacttgatgcagaaatagagattgatatatccgacagaatgaaacaagcaagggtgaaatcagatgaagtacaacaaggcacaactgattgatgcgttgggttcgttcacgcatgatccattaggctttgcatacttttcttttccttggggtgaaaaaggaacaccacttgaaaattttgacggccctgatgaatggcaagttaagactttcgctaaaataggcgaagaactacgaaagggaaagtcattagctaaagcaatacaaattgcagttgcatcaggtcatggtattggtaagtcagcgttttcatcgattttaattctatttgctattgctacacatgagaatacgaggggagttgtaactgctaatactgatacacagttaaagtctaagacttgggctgagttaaacaagtggtacaacctgttcataggtaaggaattatttacctacacggcaaccgcattgtttagtgctgataaacagtatgagaaaacatggcggatagatgctattccatggagcgaaagtaaccctgaagcattcgcaggcttgcacaatcaaggtaacagaatacttatcatatttgatgaagcgtccgctatttccgataagatatgggaagtaacagagggtgcattaacagataaggaaaccgagattatatggtgcgtgtttggaaatcctacacgtaatagtggtaggtttagagaatgttttagaaagcatagagcctactggactacataccaaatagatagccgtactgttaaaatctcaaacaaagcgaaattgcaagaatgggttgatattcatggtgaagatagcgattttgtaaaagtgcgtgtaagagggatattccctagtgcatctgacactcaatttatatccgcatcaatcgttgatgaagcacaaaagcgaatgtacagagttggtgagtttaacaacctacctgtaattatcggtgtagaccctgcatggactggtggcgatacattagaaatcgtgatgcgtaatggctattccatgaaatgcttggcaaccattgaaaagaatgacgatgatatgcgtatggctaacctaatagcacaatttgaagatgaatacaaagctgatgcggtattcattgaccaagggtacggcacaggtatttatagtatcggtaaatcgatgggtagacgatggaggttagttgcctttggtggtgcatcgcctaacaatatgtacctcaatatgagagcgtacatgtggggcgaaatgaaagaatggctaaaagagggcggttcaattcctaatgagcaaggattgtatgatgacctcgtagggccagaagcgatcattgataaaaacggccgtatccaactggaaagcaaaaaggatatgaaagaacgaggcttaccatctccgaacaaaggcgatgcattagccttgacctttgcatttagggtcaataaaaaagtaaatggcaatcacagaagagtagcgaatacagagtacaaaccatttgggtaaagggggaatgtgaatgtgtatgaaagctaaaacaccagatattaagcaaccagcaccatcgcctacaccagttgcacaaactgatgatatggcacaaaaaagagatgaacaatggttcacagacaagaagcgcaagaaaactggttatgatagtacaatcttggctagcgctttaagtcaagcaacaggcaaaacgacattaggcggttaatatgggaactatactatcaagcctagcaaggcaaccgacagaaaagcaggttacaaagcctaaagattacaagaaaataaaagctaaattcaatcagatgttcacaaatcgtcaaaagtacgttgagaaatggaagatgataagagattatcaattaccattccttggtgtgttcgatggtgaacaagaccaatcgaagttgtataccgataaaatactaactggtatagcatgggaaagttgccaaatattcgccagtggtgtaatgagtggaatgacaccgcctagccgtaagtggtttaaattaaccatggaaaataccgacatggcagcaaatagcgatgtagcaaaagtattagatgaacgtgaagaaatattgtatgcagtatttgcaaaatccaatttctacaatgtggttcaccaagtctatatggagttaccattcggacaagcaccgatgtcaatcatgcctgatggtaaagttggtgtacgtttcacatcgtatccaatcggtacttacgcattagaatgtaatgctaatggtgaggttaacacgtttgggcggaagtacaacatgacttgcgaccaactcgtggaagaatttgggtatgataactgtaccgataagattaaaaacgcatacgatgatggcaagggtaatgcaactgtatatactgtttgttggctagtgtgcgagaacaaagaccgcaacggaaagctaggtaataagaacatgccttactcctctatttactgggttgaggggagtagagatgatgaaatcttgcgacatagtggctatgaagaatggcctattccaattgcacggcacactacacatgatctaaatggttatggtaaaggtagtgcatggtttgcgcaatctgatgcgatgatgttgcagaaattggaactagaccgactaactgctattgagttaggtgtaaagccaccaatggccgtaacatccgatgtaatcggtagcgtatcactatttcctggcggaataaccgaagttgatacaggcggtaaggttgaacctatctttaacgtaggtatcaatctcgattggataatgcaacaaatcattgaagttaaagacagtatcaagcgtgcgtatagtgctgacttattcctaatgctagacaacatggacaatggacaaatgacggcacgggaagtcatggaacgcacgcaagagaagttacaacaattagggcctgtagtggaacggctactatctgaatttcttaatccgattatcgaacgtacctatgcgatattagatcgtgcaggtgtgtttccaccaatcgatgaagcattggcggaagagttaaacggccaagatgttaagatagagtacatttcgccattggcgcaggcgcagaaagtatcatctttaacttctatagagcagtatttcgcattcttaatgtcattggcacagggcaatcctaacattctacaaaaattcaattttgaagaagcagcggattattatggtgttaacctcggtgtacctgcaaaagttattgtatccaatgatgactatcaagctaagatggaagaacaacaacaggcacaacaagaacaagaggaacaagcacaaatgatgcaagcggcacaattagcacctcaaatggctagtgcagcaaaacaagcaaccgatgcagcaaatgatggaaaccctgtaatgcaacagttaatgggaatggggtactagatgaaacaaaaaagagattatatgcgagagcgtgatattgaagcgctaaaccacgtactgagtgatgaacttggtaggtggtttttttatcgcattcttgaccgagcaaaactgaatagccaatcattcacaggcaacagtacaacattctttaacgagggaatgagggctgttgctattttgttacaaaacgatttaggaaagattggcgatggtatagagggtgttaagaaataccacctagcacaattagaaaatattcagatgcagaaatattttaaaacgcttgaagaaaacgaattaaagaaaggtgaataaccatggatgaaaatttagaacaaggcacaaacaataacacggatagtgcaaatggtggtacaccacaggacacgaacgcacaagaccaacaaagtacgattttaggcggtggcggtgatactaacaccgaccaacctgcagaacctactgtatatgatttctcaactgcatttgagggtggcgaagtcgaccaaaccatcgcagatgagttttcaaaaatgcttaatggtgtaggtgcaacgcaagaacaagcattacagatggctaagtttggcaatcaatatgctaccaatcttgtaacggcttacgaaaaccaaaagcaagaagcactcaaagcacaatacgatgggtatgcagaaaacgctaaaaaggtattaggtaacaaattcgatactactgttaaccaagcggccgcaggtgttgaagcagtagaaaagactattcctaatatccgtgaaatcttagcagaaaatggcttgggtaatcgtgtagaagtaattcaactattcgcacatattgctggtatggcaagcgaagatagcaacgcagggaacaacagacctgcaaataatcaatctgacgaagctattagacgaaatatgtatccgtctatgtttaaagattaaaggagattaattaatggctacaatcggaactaacaatcctacattattggatttacaaactcgtatggatccaaatggtaaaattgcacaaatcattgagcaattgaaccaaacaaacgaaattattcaagacatgacaatgattgaatgtaatgacggcacatctaacaaaacaactgtacgtactggattaccatccacaacatggcgcatattgtatggtggtgtacaaccatctaaatctactaccaaacaaatcacagatacttgtggtatgttggaagcatattccgaagtggataaagacttggttaaactttccaatgaccctgtagcgttccgtgcaacagaagatagtgcatttgttgaaagtatgggccaagaaatcgcacgcacacttttctatggtgatgaaactacaccagaaaaattcattggcttatccgcacggttcaatacattggatactaaaaaagctgattgtgctaaaaacattattgatgcaggcggtactgctaaccttgcctctatgtggctcgtaggttggggccctcttactgtacatggtatttatccacgtggcagtcaaggcggtttagaacaagaagatttgggcgaagtaacagttactaaagctgatggttctatgttccaagcttatcgaactcatttcaaagaaaacatcggtttatccgtgcgtgattggagatatgtagtacgtatcgctaatatcgatatgaaatctatcaaagaagatatttccgcaggccctaacttgattaacttgatgatccgtgcagaagaaaaaatgcaatctcttacaggatgtcgtccagcatggtacatgaaccaagaattgcgtacattcttacgcttgcaaaagaataaagtacatggttctactatcacagaagatatggaaatgggtaaaatggttactcgtgcaaatggtattcctgttcgtaaaattgatgcattgctttccacagaagcacgtgttactgcatagtagagaggagaaaatacatgattattgatactttaaatacattccattggaaacgtgaattatctggtaatgtcagctccgatgttatggttactagcggtgatgctgaccctaacttgtggttagtggttcgtgtagacaaagcattaacaggtactgcattaatcaacgtatatacatctgatacagaaaacattgctaaccctgtattgttgcatggtattacattaccagccaatgcaccagctgggtacgaatataaagtgcgcttggcaaatggtgttaaacgttatacacgtgctaatgtcaacaatgcaacggctggcacaatttctgtattcttaactagcggtatcactagcaaatagggggtaacatggaatacattgcaaaagtaactttgtatcacaatacaaagggtttaattgaagaaggacaaacagtagaacttacaaaagaagaagtagttgaatacgataaagattacttcaatgatttgtttgaagctgtaggcgcagaagaaaccgaagatggcgaagaaaagccaaagactaaatctaaaggcaagaaatcggaagaaactgctgaataacagaatgaggggtgcttatgcatccctctttttcactataaaaagggggcaatatgacacctactgatatttgcaacatggctttgtcattaatcaatggcggtaggatatacggccttgatgaagaaacagaaacggctagacaatgtagattgcactatgatgcgacacgcaagatgctactatctcaatacgaatggaattttgcacgtaagcgtgaagagtgcgtactatctgaacataaactagctggctatgaatttgtttatgcgtatcctgaaaagtgcatccgtatccttggggttattcctaaaggggaacgatttagaacggataggcaaaaggaatatgatgtatttacttttgatgacaacacaaagtacatagtgagcgatgtaccgcttgcgtacattgattacgtgtacgatgtgcaagatatagatgtattcagtcctgtattcgtacaggccttgaaatctaaaatggggtcagaattagccatgccattaactggtaatagtggtttattcgaccaatgctataaactctatcaagcagcaacgcaagaagccaagagtttgagtgctaaagaacgtaggcaagatatgccatatatttctaactacgtaaaagcaaggagttggtaatcatgaaaccaatgtatatatcacaacttgcatttacaactggtgagatttcgcctgatgtatctaggcgctttgacctagatcaattcaaaagtgcattgctattagcagaaaatgcggtcattagaccttatggtgcagtagctagacggcaaggttcagaatatatagggcaagtcaaaaacaaagataagtctacacggctatttgagtttacggccgaaaagaacaaatcatttctacttgagattggcgaacagtacatcagagtatggcggaatggtatctatacaggtattgaactagaaacaccatttgaaagtgatgtggttgataaattgaactgcatccaaagtggtgatgtcctgttcatttgtagtggtaagtatcctgtaaaaacgctatctaggtattctgatacagactggcgatttgacacatacaaattatcagagcaaccatatggcgaagtcaacatagacaaagaaagtactgtaatcttgaatggcgataccttaaccgccacaaaggatatattcaatgctgatatggttaattctgttatgcagattgaacattacataaaatctattgcaactagcagtataggtgaagtcattgagcgtagagaatggcgcatcggtgatagacatggtgggcgtaatacgctgattggtacggattacaacaatatcaattacgatgtagaacaattcagtagtgatgaggatttatcatggaaattcacatcgcatggcacatggaatggcactgtaaaaattcaaatcagtaatgatggtggtacaacatggaaagattaccgagtgtacacatctaacaatgactacaacgttacagatacaggcaaggtatcgcctagtgctaaattgaaagttgtatctgatttgaaaggtggtagcgttaatgtagatttatcgtttttgccacatgttagctatggtgtagtcgaaatcaaagaatttacagatagcaagcacgttaaagttaatgtgttaaatggtgtggttgaaaacgaagcaacctctaaattcagatttggacaatggggcaaaggtaaaggttatcctcgtgtatgtactttttatcaagatagatttatcctagcatccagctttcaatatcctaactacatatggtttagtcgcacaggcgattattcaaactttggtgtagaaaaggtgggcggaacgattacagatgatagtgcaatcacactaccagtaattaaccgcaaaatgtatgacattagacacttgatacctgctaatgacttattgattttaacgagcggtaacgaatggataattgatggttctaaaactatcacacctacaaactgcaatctacgtacacaaacccaacgtggtgcatctgaatgtgagccacagtacatagggaatagatgtgtgtatgtgcaagctagaggatgtgtagtgcgtgatttaggttactcctatgaaagcgataactacacaggggctgacttaactctattcgttaagcatttaacaaagtatcgtaactttatcacaagtgcttatgcacaagatccagatagtatcgtttactacgtaacagatgatggcaatatcgattgtctaacttacattcctgagcaaaaggtgtatgcatggtcgcattttaccaccaaaggcaaatacaaatacgctgagagtgtggcagagggcgaacaagacagtttgtatgtaatcgttgagcgtgattttaaaagcggtacagtgatgtgcatagaacgatttgagccaatgtataactctgataataacaatgtgtacatggattgttacattcgacaaactagcacagagactatcagcactattacagcacctcatctaattggtgaggatgtgcaaatcgttgtaaatggtagggaacggccaattaaggaagtaccaccaacggcaattattaatatcgatggtaaggcacaaagtgtagccgttggtattaactacactacacgattacgtattccaagtattgaaatgcaaatacaagatggcacattgcaaggtagacaattaacgatgagtagattatcgatgaacatcttaaattcattcggtggcaaaatcggaagaaacttcaaccatatggatgatatttcattaccgccactcaagttatatagtggcgataaggtgtgtatattgccaaaattcgatggagtgtactcaaccgatgcatctgtatgtattttgcacgaaaaaccttatccatttaaccttttgagcgttacaagagaaatagaaataggcggtggttttccaaatgttacaggactttgagatttgccctgtaaggcacacttcattaattcatgacttatatatcaacttacgagccatagacaccttagaggtcaatatagcgaaccaaaattttccaaattatggaaaaaatgattttgtgagggatatatgtagtgatgactacgaaaaccacattgtaattgagaatgatgtaccgatagccgtatatggtatctcaaaaaagccaatcaacggaatgtactgtatttatttcctagggaataagatactagatactaatttgaaattacaaaaggaatttctaaaacgaagtaacgcagtcataaaagagtggttatccactcatgaatgtttattcaatttcatacataagaaaaataaccgctcgaagcgatggcttacatcactaggggcggttattcattctgatataacacataacggaatggaactatttacattgagaaagggggatgcgaatgtgtaatcctattgcattaatggcaggtcaaatggttactcaattatgggggcaacatcaacagaccaaagcacaaactgcaatgtataatgcacaggcacaagcagcggaagctaatgcacgaatatccgataggaaacaacaggatattgccaaccaagcactacaagagcgtgataagatggacaataaaatgcggttgattgcaggtcagaatacggcggaagcaggcgctacagggttatccatgagtggtacaccattacaattaatggctagtagctacgatgaatacaacaaggatattaacaattgggaaactaacaaaaataatagtatctacaatgaatatctaaatggggttaattatcgcaatgaagctagtagtgcaagagcggctgcatccaatgctaaaacacaagggcgattgcaaatgcttggtactatcttgagtggcgcatctagtatatatgggatgaaacaacaatatactggtggtaaataccaaactcaatatggcggtgatgtaaatggtgtaacagaaagaccagttagaacagttaagaaagtttggacttttaacggcaggtaactatgaaattagttaattatgaacaaaatgaaagattgaatacagttaatggtgagtttagaccaacaatcaatgcggaagcatatggtgttaatcaaaacggaattaacacatttgcaaaagcattggatgatgcatctaaaacttggcttgaaatcgacaaacagaaagattatatcaatgctacaaatgctattaacgaatttaatcaaaaagtaactgaattaaaatttgataaagataaagggttaatgtaccaaaaaggtatgaatgcacaagggatactacctacataccttgagagtacacaaaaattccaaagcgaacttgctgctaaatataacttacgtacaactgatgcggtaaacgctttcaataaagcggttgaaacatcaaaaacaaacgatttagatggtatatctaggtacatgaggggtcagtacgaggatgcactaagcacagccacacaaaatcaaatcaataacttgaataacaatctgttacaaacgaatgatgttaatcaacaaatgaaaacattaacattaacaggcgatttaatagaagcaactggtaaacaattagggcttgatgatgaacaaatatcatctaaaaaacaacaaaactatgatcttaatgctaaaaccttattagataaaactgttgctgataacaattcagaaacattggataagcagttgactgcattaactgggcttgctagtgagaatgtattaacaccatacaggaaaatgtaccaacaaatgggtataaacaaaatcgctaacaatgaaaacgatttcggcgcaattcgattggctgcaggcgatgatgtaaatcgtggtatggacattatgggttcacgcatacgttcgcaaatggaagccaaaaacaaggaagccatgcagtcaggtattggtgctaatcaacatttatggaaattagcacaatatgcacataacaagtatggtatcaatacagaaattgcatataggcagttgtatgcagagggaacgcttggcggtgaactcagtaggctggcaaaagaaaatcgtaactatgcaggattaactcaatcagagcctaatggagaagataacaaacaaccagatggaacgaattattacaaagtgtataattccgatgaagagtttgttgatgattggattgaacactatattaaaccgaatggcgcagtcaacgcacagagcatagatgaatacgctgacaagttaaaagcaggtggatattatggcgcagatgcaggccattataaagaattaatgcgcaatgcacctatgactaaaggtggtcaacctgtttattctgaagatcagattgaaaaggctgttaaacaaggccgtgaaaattataaaggttggctgacaatgcaaatgaacatcgaagccaagcaagctaaagatagaattacggcagctaaaattgtatataaccaattaatagcaaaaggcgattatgtaggtgcatcatcttacgcacacgcacaagcagcaggcgcacagaccgatatggaaaaggaagcgtggagcggtacagaagcatcaatgcgacctaaacttgattctatgtatgaaaaaggccttaaactgaatgcaaaacaaaagtttgagttgaaaaaatatgctgaaactcatacatacgaagaaacactagcacacgcacagagagtgtaccctgataaagttgttgatgatagttttgatggagtgttactcgaagcaaacgataaccgattaaaggccaacaaaattgatttaacaccttatgatagcgaaatacaaagtgcgttgcctgctgacaaatcattgcgttcaagttttgaatatggtgttaaacaagagatgttaagccgtaaagctgactttgaaagcaaacacggcagagcgcctacagaagcagaaatgcatgatatatttgagggcgcattggcaacacaaacattacgaagtacggaaaaaccatatttcggtgatggtgatgattatagcgcacctattagcgcagcaagcaacagagcaatgggtattgtgcatgttgaacctgttggcaaccattatgtgcgtgtaacatatcaagatggctcaacaagagatatttacgaaagcgtgtataacaacatgcaaagaagatataacgataacggagattaaaaatggctaaacaaacacttgaacaagaacggcaagaagcactagctgtacagaatggctatgttaaaacatcaccatcttttagtgctagtgctggtgttcagtctaaacctactggcggttttactgaggttggtaatgcaataggtgcagggatagatacaacggcacaagtagttgataatgctattaatgcaattaaggctattgcaaatacaccacgcacaatggaagaaactaatgctgatggtacaactacatattatccgtttggtaaagctgacaatccatatcaaggtttagaaccactaggacagtcattacagaaagtacttcctacaagtgttgttagtaatacggatagattgtttctatacaataatgataccctacgttataacgaagcagttagaatggggaaggtattagatattgaccctgatgtaattatgcgtggtgatgataaagcatttgaacgtgctgattacttatcaagacgagttgaacgtggcgcagtattacaagatatatacgatgaatttcctgaactatataaagtaaaatatggttcacaagctgaacaattacaagcaatcaacaatctacaatcaattcgtgctacgaaatctacattcgatgcaattcaacaaggtatttggtctatgaacgatcagatgaagttgggcgatgttggatttgaattggcacatacaaaagaccctgaacgtattaacgaattaacatcagaaatggaacgcttacaaaataacttgcgcaactaccgaacacctgacggaactaatccattacaagaagtattcggacaaacggcagcacaaacatacatgatgggtaagcaaggcggtacaggtgcaatcataggcggtgcaattggtgcggtaattggcggtttaactacagatggtgtaggtataggcgcaggtgcagtaactggtgctaaatggggtggcggtgctgacatggcatatgaaatgtacaaaatgtcattcggtaacaaatacctagaactcattaataaacgtgatgcaaatggtaataaagtatactctaatgatgaagcctataaatacgctatgacatatgctgcagttgatacaggtattgaaatggcatctacacgtttcatggttaaaggtatcggtaaagtagcacctaaagcggttatgtcaaaagtattacaaggtgctacaagtgatacaatcgcaacatttaataggggcattggcactactgttgcacaaatggccaaagcatctgttaaggctggcggttctgaattggttgaagagggattgcaagacattaacgaaaaattccaacataacctataccgcaatgctaatgaccctgagggagtatattccataggcgatatggcagtaggtgcaggcggtgcaatgttacaagcattaccagccgtaattggtttaggtgcaattggtggcggtattagtggtatccacaccatgaaagcattccatgaatttcaaaagctaacacccgaagaacaacaacaagccgtgatggccgaacaaaatcgaaatggtaacgctatcatgcaagcattgaaacaagatgcatcgtcaaacaaaatggcaaaagaaaaccctgaactgtacggaaagattgtacaagcacagggcgataatgtaggtgtatctactgcatatgtaaatgttaatgaaatggcagaaacagagcaagggcaacaagccattaagaacatgattgatagtggtttggttacgcaagaggaagtatcaaagagtattgaagctaacgcagatattcctgtaccaattggcaaatacgcacagttgagcggtgatttgacggaagaaactgtaaaagcactagaagaaagcacatactttactcgtggtggtatgtctatgaaaaccctagaacgagcaaaagcggaagtggaagcctttaataataacctagttgatgcaacagaaaagaaagctgaacgagttaaagaaagcattatccgtgatgaatttgaagatgcaagcgatgtagatcgtgaagtgctagaccaagtatttgctaatcctacacaggttaagcaagcgtataataacttgtacaaaaacctagtgcaagagtatcgtgaaaactacgcaagcgactttgacaatatggatactgatattaaggaagctacggcaagtggtgtagagccacaatggttgactgattataaatctaacaatagcggtaaagcaccacgcactaacgcagaacgtagacgagcagcgtaccattcaagcgtagcaaaagcacaaactgcattcgctgacaatgcggaagcacttaaccaaagcaatatccatcatgctgatatggagcataccctacaacaaattgaaagccttgagcgcttgcacgataagatttttacattagcagataacgatatagcgttacggatgcaactatccaagagtggctatgaagtgtacaacaaagtagttaaagcgattggtgaaagtaccgatagaaaacaacgtgaaacggcaaaagctaatgcgttgttaatggcacaacatgctgatgtaatggcacaatatatgcgacaaatgggccgtggtggttatactgctatggattattttcgtgatagtgtgcgtatcaaaatggatgcggttttagataaccaaaaagggtatgcacaacaattggcaatgcatcaaaaattacaagccgatataactcaatgggggaaaatattaaacgatttacaaaacggaacgcttaaacaaggtgtaaataaaataatgtcagcacctttagtgtttagcacaattaaagatcctgactacaaatttacaactggtgatgtttatataacaacgaaaatgcttaataaagtatttgccactaagcatgcacataagtttgacttaaatgttatgaaacagttacctggtgcgttatctaatccgattgcaatattcaaaaactttgaccctgttgctaatgcatcggtaaaaggtgaaattattgccgttgttgaattaagagatacgcaaaataaccttgttcatgtgccgttggtttttaatgttcaaagcggaagaaatagctatcaaactagggttaaaagtatattccctagagttaatactacatggtactctaatgcgataaataatggcgatttgttatatgttaatacaaaaaaaataaaccaactaacagtcaataacgtccaatcaagcggacaaatgagtgttagttggtctaatattattaatagtataccaaacgaaaatgatttagacaagctccgaaagaaacataattatcagtattatcaatccgcatggcatcgttcaccacatgactttgataaatttgatttaggtgctattggtactggtgagggtaatcaagtacatggttggggattatattttgccaaagataagaaagtatctaagcaatataaagatgtattgagtaaattacaaggttctaacaaaagcagcttatttaaagttgaaataccaaatgaaacagagttattaccagagcaataccctatttctggatatagtcgatatgtaagagatagcttgaaaaatggattgcataaaatgtcagatgaacaactagaacgttttacaagcctattaattaaatatcataaagattcaatcattggtgataaatgggttaataaatacacgcactttatcgatgtggggtacataatatctgaactgcacaacaaaaacaaaacaataaatgacataaataaaattcaaaaaagaaatgttgatagatttttaaaaacagtaggcatcgatgaagatattgataccatagctagtaacgatgaactattaaaaaatgtatacgaaaagtttagatatgagttatttccagaatacgaaaaagaaaaacaattagagcgtgaacgtgaagaaaaagttatctcgaatgttaagactgatgtatatggtgcattagaaaaaacaaatattgttggtaaacagttgtattcgtttttatctcatgcacttggtaatgatgaacattttaatctttataacgtgaaaaatgctaaaaaggctagtgagtttttaaatagtatcggtataaaaggcatctactacgatggcgaacaagacggacgatgctatgtagtgttcgatgacaaggcaattaaagtcattgaaaagtacaaccaatctgttaatggcatgacagagattatgagtgatggtgaacgtattatcagcattttcaaaaccgcagatagaagtacattcttacacgaaattggccacgtattctttgatgatattcaaaaactagcatcaatggacaatgcacctagtcaacttgtaacggattggaacaagttgaaagagtggagtggttgggttgatggtgaaaacgtagataacaccaaagcacacgagaaattcgcacgaggttgggaaagctacttgcgaagtggtgaagcaccaacaaaaggactacaacgagtattccgtcaattctctaaatggttaactcgtatttatcgtagtgttcaacgattaggcggcgaagtaccatctgacattaaggatataatggcacgcatgatagcgacacaagatgatattgaaaactacgcacatgagcaagcattagagcaatttgaaaatacaaaattgtatcaacagttgagcgaaagcgaacaagcacgagtgcaagggtacattgctgacattaaagaaaaagctaaagagcgtgtaatgcgtaagtacatgaaagagttagacaatcgacctattaaagaatgggaagatgtaaaagatgatgtacaagctgaaatcgaaaaacgtttagtcgaagattttcctatctacaaagaacaccaacgatatatggtgtttggtgctgatgcgttgaaagatacacagtaccaaactattgaggggttagaaaaagcggaacgtgaggaagctggtagtacttacgatgaagcagtagcacaggaaatggaaaacgctagaaatgagtttgttaatgatccaaacgcaggcaaatctaaccaagaaatagccgaagaaatgctactatctaatcaaggtcaaatggaactcacacaagaagaggcacgtttaatcaaagcacatactaataaggaactagctaaaaactgggtattattggataagttgcaaaagctagatgtaaatagtgaaaacctagatgcagaactagcaccgattgagcaagaactaactaaagaacaattgctacgaaaggacaaagcaaaagttgataaagagttaggaagtgtttcaaaagaactagataaagctaatgatgaaatcgataacctaaaagcacagcaggagcaaatcaaagcacaggctaaagagcgtgagtttgatttaaaagataaaaataacgaattatctaaacgcttaacagcaatcacaaatcgtttagataaagtactagaacaaaaagaacgattacaagatcgtatgcaagaacgcatggacaataaagtattgtctaagcaagaacgaattgaaaagttaatggatacgttgcaagaacgtattgatgcggttcgtgcaattcgtgatggtggatttggtactattccaaaatacatggaacgtgctaagagagaattaggcgatttaactttgtctcaagctagtcagtacaaaaaataccaaaatcaagcagtacgagatggcaagaaagcagatagtgcattggctactggtaaagtggatgaagcattacgtgctaaacaatctcaaatgctaaaccaagcaagagcaagagtagcgtttgaaaattcaaaagctattaagaaattgcgtgttaaattgctagaccaattaaaccgcatgacacgtagccaaaatcctattatgattgaacctaatatgcgttatttctatacacatatggcatatcaaatgggattgactaagtacgatggcttgcaacctgttaatgggttcgatatgatggccgtgattaaagcacttgatgcagatgctgatattatgggtgataaagaagcgactgtacaacttgaaccatggatatacgaaatgttcgatgctacatcacctagaacgtttagtacccttaaaatgagcgaacttgaacagttagaggaactcatgacagggatgtacaaaaacggcagaactcaatatgagggaagtacgctaatcgatgaatacggaaataatgtatcgtttgaagatgcagtacatcaaatcatagtaaccgctagtgaaacatttggactagatacggccaatgtatttaacgagttaaacaaccgcagccgtgcagatgcattgtctaatacgttgaataactttaacttatcattgttaaaagcagaaacattcttacgcagattagatggcggaaagaacggccctgcagttagatatatctatgaaccgatttctaaagctactcagaaatttaacgagtacaaagaaattgcgatgcgtagattggcaaaagatgtaagtgcagtatattccaagaaacaactatttgatgttcgcaatgatcatctctataacgtaggcgaattacgcaacgttacaaaagagcaaattatcatgcttgcattaaactggggaacagaaaagaatagacaacgtgcattggaaactatccaaagtaatgaagttgaaatggaacgagcgttccaagaatacatgactgataaggattgggaatttgttatccgcacatgggaacatatcaattcattctatgaagaacgtagtaaagtacaagaagagttgtatggtaatcctttgaagaaagaaaaggggattacatttacaattggcggtagagaaattcaaggtcaatatttccctattgtgtacaatcctaaagtaagtgctaaagtatctgatttccaaacagaggatatagccaagacgatgattgctagtaatgcaatctttggtacaggcatgagtgcgactaaatcacgtttggatgtagtaaaaggtaaatccttaatgcttgatttcgatgttattcctaatgctattacggaatctattaaccacgttactatgagaaaagcagtaaccgatgtaaataagctagtaggcaatagccgtttccaagagtacatcgttgataaattcggaatggaaacataccaattcttgcgtacatgggttagggataattggaaagatgaagcggcaaaacttgatgcatggggtagattggttatgacactcaagaaaaatacctctaccgcagttatggctggccgtgtatccgtagcattacaaaatgcgttgaacattcctgttgccatgtatcgtattggtgtaggaaatacactcaaagcaattagtgatgcaggtatggggttctatggtgtaggtacagccaagtacaacgcaacacgtgattttgtattatctcgatctatattcatgagggaacgtgttcaaaccctagataaggatttgaaacaagggctatccattgagggtaaaggcttacgcattggtgatacaaatgttggcggttataaggctgaacaattagctaatatccgtgatgatattaaccaaatgggttttagattgttaacagaaactgattttgccttgtctattcctatatggaaatttgcatacgataagaaagtactagagttacaaagtgttgagggagtaacggcagaatttgtagaacaggaagctattagtgctggcgatagggacgtaagagatatattcggtagcggcgacacaaaagacagtgcaggcatccaacgttcaagaaatgcactcactcaactatttgtaccattctattcatacgctaatactttgtacaatatcatcgctgagggtaactatgcacggaaagaccaaggcaactatggacaattcgtgcgtatgctatggtggactttgaccgcacaagcactaggcatgatggtgtacaaggctatgacaaatggagatgatgatagccctgaagatttagcaaaatcctttggggaagaattggtatcacaagctactatgggtgtacctattgtgcgtgatatttccaatatggcgatgaagtatattctaggtgaaaaggtattcaataaagggaatacagtaatggccgcatcaatcgttgaaaaactatatgatgtaggcaatgcgattgtatcacctaataaaggcgctatggatgtaggtagaagcctatcacaagtatctaaccgaattacagggttcagtgatactgtaacagatggactatggacattagctaaatttgcactaacggacacggatgcaaaactagaagatgtcattatggctatcatgtttgatagacgattgaaagataaaaaatctaaaaaaggtaaacattaataaataaggactactcaattatgggtagtcctatttaattagaaaaggagtatatatgataccagaagtcaaaaaacctagtgtagtttatcaatgtgatggaattaacaaaaaatggatatggccgtatgacttttacatgattgaagatatagccttaatcatggtggatgcagacggcacagaaagcgtacaaacaggcaacatagattatgataaagaaaacaaaactttaacatatcctgctgatggtgatccattagacaatacgcacaagattattcttgaacgtagaacaccaattaaacaagatacagatttacctgatgagtaccctttccaaaatatcgaacacatgacagataaggttacattaattttgcaagaaatgcaggagaaaatgaaccgagccttattaatccgtgtaggtagcgatgaggatgcaacaacagttgcacgtaagattgtagatacatcgacaaaggcagcaaatgatgctattgatgcatatgaaaaaatcaaagcagaaagcgaaactatcaacgctaatgcagaaacgattaaaacgctaggcggtgaaattacagaattaagccgtacagtcgatgataaactagcgactagcaataccgcacttgatacatcgagttctaatgtagcaaaagcagaaaagctagtggcagatgcaaaagcatatgcaggacaaaccactgtagataagcgtgatattaatgagttggtgagccaagcccgaactttaaaaaccgacattgataataaacaaacatcaatcgcaagtaacgcaatcaaagcaacagatgcggcgaaacgtgcagaagttgcagcaagtaaagcagaacaaatcgccttgcctaatggcggtggtttgattaccaaaacagaagccgatacaaagtttattcctaaagatagcttatatggcatcgtatctgtcaaagactttggggcagtcggtgatggtgtagcagatgataccgcagcatttaaacgtgctaatgacaatcttaaaaataagatactgttaattcctaatggcatctataaagtgaatgaacacgtttcatttgatactgttgatagtgttatggatatgggtacatacaataacatcaagccgttttatcctactgaaacaccaatgttaaaaggtgcatccaacatcgcctttgttaaaaacatccaatatggtgatgaggttaatcaatgtcaaggctttacctacaacgataaaaagaatgtatttgtactagcatgtatcaatggtgatggaacaaaacaaaacctgtatgaactcaatccagatacatttgaaatcgtaggtacgtataaatttagcgacccagaacgtatggggcattgtaacactatgtgctacaacaaatatactaataagatttaccttgccaacggcttaaaaaatggtaacaacctatctgtattcaatgcggatactatgacatttgaaaagaccatcacattgaatgagcgtgtatttaatattggatatgatcctatcacacgaacttatgtgagcatcgtaccaattagtggtcagcaacgcttgcgtgaagtcaacttgtacaatgatgattttcaaaaaatgaaaacgtatcaaattgactaccaatacgatgatttcaacaacaatggggcattaatgcttaacggatgcatcatgagtgcaacgctcggtagtttggtagaatgtacaccatttggcacagttaaacagattatcgaaatcaatagaactactgaaattgaagatatagcatactgcaatggcaaattctattttgcggtgctaacagaaaagcctagtaaacggcatcaagtcgatatttatgtaggtaatccaaaccgagattatcaaaactcaattaatacggctcgattggcaagcctagactatttgaaactcacaggtggcacattaagtggcgcacttaaaatggctaacaatactttgattgagggttataaacctgatggtcatggtgttggtattgctaaagtatctactgctggcaacgtggaatttggcgatagctccgttaatacgtttgttaagggtaaggaatttaaacactatgacggcacagatagttacacagtaattactactaaacattacggcacggctatttatagtaagactaaagctgatgaagtgtttgtcaaaaaaggtgatgcaggttcatttggtttcccttattctaaattagataccgcaacagattggaatacactcacaacgcaagggtgctacgaaatcaatttcgatggtggtgctaataatccaccacgttcacataagcaaggtatgctaattgtatttaactttggagagggtaaattaatagaccatacattgcacacattaaatggtgaaacctatcatcgtactttcatggctaataaatggggttcttgggggagagtacaaacatcattgaatagtaagttgcagttgtggagcgcgaacggaacagtagaggtaggggtcaatggctaaacgattaatattgggaactgatgttattcaattgacagaaagccttaatgtagcaggtgataaaaatatagaaatcaaagctgatggcaaaaaatattatgctacgctatgggaaaaagggaaaagtgttgttaatgctgctagtattgggttggtaaaaataggcactaacaaatacggaatattaacatcgccagttagagggcaacaagaatcgcatgagtttttccctaattttaatggcagtacaacacaagagcgtaaaacattatttttaccaaaagggagttacgatctgtttcttggcacttatgttggtcgtggtagtagtgatagagcaacatttaacgtatcagacaatcaaggggagtttgtaactgtaatcgtagatttagaacgtaatgtaaaagcaacgtttactgtaatagggaataattcacggataacacgagataaaagttttgacggaatgacacaatatatttccgtaagttttgtgttatcagaaagagacgagggagacgaatagtggtagaaatctttattccaatatttaacgaggtgtttaacgtgagtgaggcggtacgcatatcattagctatattcacaacggttattcttgtgtttatagacacagttttacgagtgctagttgaagcaaggaattacaacctagcaacgaagagagaagttacaatcaaaaatactatactagctatcctatggagaggttgggctgtagtagaaattgacggaaaacctaaacgatttttagtaagtggcaagctacgagcggatatgactaagaaattagttaaatcctatccgtggctttttttgttagcgtttatcctactcaccttgccagatgtaatagtacctgtattaggccgtgtagatgtattcctatgcacgttgctatatttgatacctatatttatcgaattggcatcgtgtgtagagaatatgatagaactcgaattagtagaaacgaggtggttcaaacgtgcgatagggttatttaaacaggtaattgaatttgttaaatccgtaaaggaagcgattaaatgaagattaactatgaagatacgataacgctaattgccttggctggtgcgttaatcatgactatctatcttgaacaaaaggatttggcaagcgtgatagtcggtgtattgggcggttatattggcggtgctacaggtagtgctaaacgttcccaatacatgaataatgggggtagtgttgatgaaaaaaaggagtgcgaaaaatgaacgaattagggagtttaagtgcggtatatgaaagtaatggagaccctgcttgtgtatcaagtggggttaatgatgcaggcggtatttcttatggcacatatcaattagctagtaattgcggtagtgttgatgaatttctaggttggggtttgcggcaaggcggattttatacagactacgcaagagcattggtggatagtggtgaaatcaatagtgatgagtttatcgaccaatggaaagaactcggatcgattgatagacagggatttgcacagatgcaacatgactacatcaaggctaaatactatgatgtagcgtgtaagttattacaagacaatatgttccacgtagataagcactccgacacattgaaagatgtgatatggagtagaacagtacaatatggtgtaggcaatattgttgatatgtttcacgatgcattggagttaatggaaaaggccttaaatttagaattgcctaatttatcctacgttgatgataagaggttcgactatgacatcatcgcttgtatctatgatgtatgtatgactactgcatggaacaatagtgcgttacgtgataatttgaacgagcgtttcgccgatgaaaaatttagagcgttggaaatgctacaaaatgaattaaacgaggtgtaagccatgttaattagtaagttggtacaaactatcaaggaacactacaaactagccgtagcgattgccctatgcgtttttatcgctattgtaggcgtatggatatatcatcacaaacaaaagcagttagaaaagcctgtagtcattacacaggaacaggctaaatcacctacagaattgtcaaaagcaattcatattaccgaacaggaagcacaggaagttgtttccaaaaaggaaagaactcaaccaatagcaacgtattacacgcaagcacctacagttgaagttgcagcagaacaggtaaaacaggatattacacatagcaaccctaatgtacctaaagccgttactgaaaaatctgatagaaccgcagtagttgctaacaccgatgaacaaaaagtcgatgtgtacaaaatcaatctaaacaaaggacacaagataaaagctggtgttactttgattgataaacgagcctatgaaaccataggctatcaagcaggtaaatttgaagtgttaacacatttcaatggacaacatttagagggcgctagcgcactttacacagtaaaggaatggtgatctaaattatctccgagttgcacggattgcaacaatcaactgttagttgacagttggaaagtattactttataactgaaaggaataacacaatggcacaagtatttacattcaatggaaaaacacatcaattcgcagaagatattcaaccaaacaaagaggggttatatatggccactctaaaagatggcgataatgtaacgtgtgaaatgtggtttgtaaacggcgaactacaccgattaattgaattagactaaacgtattagagggtagcaattaagctaccctctttttttatttcgtcaaatattcgtcaaattctaattgtaaaatgtggtaaaatatgagaagtaatatttaccgcaactaagattaattgcaagtataataataattgtgaaataattgataatccatagtgaattggagtataatatattgatatgttatgaccatggaggagaaaaacatgaaacgggttttagtatccgtaaaaagtgtacaacgagacatagatggacaggataccgtggtagaattgatttctccaggtacttcgcatgaaaagaacggagtccaatatattcgctatgaagaatcgagcgtaacaggtcttgaaggggttaagacgaccatcaagatttatgaagattctattgttcttttgcgtactggtgcggttaatatgcgacatcaatacattcgtggtgaggaacgccagtccacatatgaaacgccattaggcgatcttcacatggccgtaaaaacacatgaattaacagtagactttcacaatggaacgggtcgtgttcatcttggatacgatatttccatagaaggtgaatggcaattttataatcagttagatatagacgtgcgggaggatacagagcatggaaatgaaggaaatcctgaaatcggggattgagcaggcattacaagaaacgattaagagtggtggcttaccagctggggaatatccagaaatcgttctcgaagtgccacctcaaaaggagttcggcgatttttctacgaacattgcgatgcaatccgctcgtgtagctcgtcaaaaccctcgtgctatcgcagaggttttgattagccatatgaattttgattggcttgaacgcgctgaggtagctggtgcaggttttatcaatttcttcttaaaatccgatatggtatatgatacgttgaaagctatcttaaatgctggtgaccaatacggcgttcaaccattgcgcgcgcgcgatacgattcaagtagaatacgtaagtgcgaatccaacaggtccattgcacgtaggtcatggtcgtggcgctgcgtatggtagtgctcttgtaaacttgttgcgtgctgcagggtacaatgtacaatctgagtactacatcaatgatgcaggtaaccaaatcgataatatggcgatttccatcgagtaccgtttccaagaattgcaaggcgctacattggtattctcgcctaaacgcaacgaagatggttccatgccagagttcgatgttccagaaggggctctcgtattccctgaaaatggctaccgtggtcctgatattatcgagactgcaaaagcgattgcagaacgcgaaggcttcgatacattaaatgctatgaacgaagctgatcgtgtagcattgtttaaagaagagggcttaaaagaaaaattagctcgcttagaggaaacattaagcaatttccgtgttactttcgataattggttctctgaacgtacggttcatgaaactgatgaaattcatcactccgtagaggctttgaaagctcttggcaaggtgtatgaaaagaatggcgctttgtggttgaaatccactgattatggcgatgataaagaccgcgtagtcatccgtgacaatggtgtgcctacgtatttggcagcagatattgcataccatcgcaataaatatgatcgtggctttaaagaaatgatcgatatttggggcgctgaccatcatggttatgtgtgtcgtgtaaaagcggctatggcagcctttggttatgacccagataaactaacagtattgttgttacaaatggtagcgttattccgcgatggacaactcgttaaattatctaaacgtagtggcgatagcgttacattagatgaattgattgaagaggttggcgtagatgcatctcgttacttcttcttgatgcgttctctagatagtcaacttgatttcgatattaacttggcaaaatcccgtagcaatgataatcctgtgtattatatccaatatgctcatgctcgtattcacagtatttataaccaagtgcgtgaagcaggcattgcatttggtgattatagtgagactgatttcacaacgcttacaagtgaaatggaattagaattaattaagaaattagctgaatatccagaagaggttgttcaatctgccgaacatcgtgcacctcatcgtattgctcgttacttatacgatttggcaagtatgttccactccttctatcgtcaaggtcgtatcattggcgtagatccatcattgcaacaagctcgtcttgggttaatcacagcgattgcccttgtacttcgtcaaggcttaggtattttaggtatttccgctccggaaaaaatgtagtaggtgggaggcatcatggcaactaagtatattttcgtaacaggcggcgtagtttcttccttgggaaaagggattacagctgcatctttgggccgattattgaaaaaccgtggttttaatgtaactattcaaaaatttgacccatatatcaatatcgatcctggtacaatgagtccttaccaacatggcgaagtatttgtaaccgatgatggtgctgaaacagacttggacttgggtcactatgaacgctttatcgatattaatcttagcaagcgttccaatattactgctggtaaagtatattggtccgttatcaataaagaacgtaagggtgactatttaggtagcactgtacaagttattcctcacgttacaaatgaaattaaacaaaatgtataccgcgtaggtaaagaagataatgctgatgtagttatcactgaaatcggtggtactgtcggcgatattgaaagcttgccatttatggaagcaattcgccaagtcaaaaaagatgtaggtcgtaacgatgtattgtatattcacgttacattagtaccatatatcaacgcagcaggtgaattaaaaacaaaacctacccaacatagcgtaaaagaattgcgcggtattggtattcaaccagatattttggtatgccgcagtgaaaaacatatttccgacgaaatgaaggaaaagttggcattgttctgcgatgtagaaccagcggctgtaattgaaaaccaaacgtgtgattctatctatgaagtaccattgatgatgcaagatcaaggccttgatgatattgtcattaagaaattgggccttgaagaacgtccttgcgatatgactgcatggaaagaaatggttcataaaattttgaatcctagcaaagatattacagtagctatcgtaggtaaatatgtagctttgcacgatgcgtatctttctgtagcagaagcattgagccatgctggtatcgagactgatactaaggtgaacattcgttggattgattccgaagaacttgatgatatttctgtagatcctaaagaagtatttgagggcattgatggtatcgttgttcctggtggctttggttcccgtggcgtagaaggaaaaatccgtactatcaattatgctcgtgaaaacaaagttccattcctcggtttatgccttggcatgcaatctgctgtaatggaatttgctcgtaatgtatgtgccatggaaggtgctacatctagcgaatttgatgaagatgcaaaatacaaagttatcgacttgatgagtgatcaagtggatgtagataaaaaaggtggcacaatgcgccttggcatctatccatgtaaattagaagcgggtacaaaagcgcgtgaagtatatggcgaagaccttgtatacgaacgtcatcgtcatcgttatgaattcaacaatgaataccgtcaacaattgaatgatgcaggccttgttatttctggtacatctccagatggtcgtcttgttgaaagtatcgaagttaaggaccatccattcttcgtaggtacacaagcgcatccagaattaaaatctcgtccgaataatgcacatccattattccgcggtttcgtagatgcgattttggaattaaaaaaatagattaaattgatgggatctattttatctattataggtttatttatattagctgcactcaaactagagcagttcgtatatggtaaatcggggaaaaaacaatctacaactggccatatggcacggcgtgggctcgctaatttagcaggattaatcgcgtttgattattctactgtgagtagtaagtctgttgtggtacgtaaaaagaaggaagatactcagaaatgagtatcttccttctttttttctgtatcgaaaaaacttgcaaaatatatcgatatatttaaaaataacacttgatattttaaatgattagtgttattatatagacaaagatagatatagatttgatgtaggtacatcaatagaacatatagtaatcgttatttagaaatataaaggaggacacaatgtctattattggtaagaaactccctgaatttacacttgatgctttcaagaaacctgaattggtaaaagtaagcactgcagacgtattaggtaaatggtctgtattcgtattctatccagcagattttacatttgtatgccctactgaattggaagacgtacaagaatcttatgcagagttaaaagaattgggttgcgaagtttactccgtatccactgattctgaatatgttcataaagcatggtctgatgcttctccaagtattaataaaatcgaatactacatgttggctgataagaagcacgaattagctgatttcttcgatgtattcgatcctgaatctgctatggcataccgcggtacattcgtaattgacccagaaggcattatccgcacagcggaaattcacgatatgggtattggccgttctgcagaagaacttgttcgtaaagtacaagcagctcaattcgtagctaaacatggcgaccaagtgtgtcctgcacgttggaaaccaggtaaagatacattaacaccaggtcttgacctagtaggtaaaatctaagagtattagatataccaacaacctcctcaaatgacaacatttgggcacggatcgtatctccaacgataccggtaagccccattacatggtgaaacactctccaattcactaatgtaaacctcatataacaaactacaaactatacgcaaaaagaccagccttttggctggtctttttgtcgcagtgtatccaattagtataggtaaatactgttattcgtaaaaccttttgacaaagtaggaaataaactcttgcatttttacagttagtattctataatgaaattaattcctagcgatgcacaaggttttatacattcgcataggaggtatataaactgtttgttcaagggacgctagcttttaaaaaggaaggcagtatacatgagaatttctacaaaaggaagatatgcattgatggttctcatcgatctagctgagcaaggtcagggaaaaccagtgtcattacgttctgttgcagaacgacaaggcatatctgagaaatatttagaaggtattgtggctcgattaggagcggccagtttagttgatagcattcgtggtaaatacggcggctatcgtttatctaaaaaacctagtgaatatacaatcattgaaattttgatggctacagaggaatcaatggctattatttcatctctagatgaaggtgtatctacggatgatgtcattaatgaacgcaccgttggattctgggcggggttacaaaattacattcacgattatctagaaagtgtgaccttacaagacgttatcgatggtacatacgcaaaactagatacaaaatatgataattgggatggctctatttaagaggcacataattatatattacataccatttatagtatccataatatccgaatataaggagtgttgattatgtctaaaatcgcaaaatcttttgttgaattaattggtaaaacaccattgttggcagctactcgttttggtgaaagcgtaggtgctgatgctaatattttagctaaacttgaatactttaacccaggtggttccgtaaaggatcgtatcgctgctgctatcattcaagctgctgttgcatctggtgaattacaaccaggcggtactatcgtagaagctacatctggtaatacaggtattggtttatctgctgtaggcgctgcgcttggttataaggttgttatcgtaatgcctgaaacaatgtctatcgaacgccgtaaattaatgcttggctatggtgcacaactcgtgttaactgatggtgcacttggtatgaaaggcgcgattgcaaaggcaaaagaaatcgtaacagctactgctggtgctgtagaagcaggccaattcgtaaaccaagctaatcctgcaattcactataaaactacaggccctgaaatctggggtgacacagatggtgctgtagatatcttcgtagctggtgttggtacaggtggtacattaactggtacaggtcgtttcttgaaagaacaaaatcctaatgttaaggttgtagctgtagaacctaaagactctgctgtattatctaacggtaaaccaggtcctcataaaatccaaggtttaggtgcaggttttattcctgaaacattggatactaaaatttatgatgaagttattcaagttgctaacgaagatgctttcaaaacagcacaagactttggtcatacacaaggtatcttggtaggtatttcctccggtgctgcattatgggccgctacagaattggcaaaacgccctgaaaacaaaggtaagaatatcgtagttattcttccagatacaggtgaacgttacttgtctactgctttattccctgaagattaataacatttcaatataatactagtaataaaggcgccctacttgtttaggacgcctttgttgtcgatataagataaaaataacaaacaagtctgtaatagcattatgtatggaggctattacagacttgttacgttatggaataagtttataatcgagatagattatctaccgttttttacaatagaatccatccagttaaataaatcttgtaaatcgtaatcgccagcgtgatccacaccaaatggtgtagccatgtctacactatatccgagattttgtgcacgagtgcctacgattaatgggatggcaacagatgtattgctatctgctgtaccatagcgaattcgataatatttagcgtttgttgcactaggagaaccaagatagttcatagggttcatcatagtaacgattttagcgttttctacatatacatcattattagtcgttgtatcatgtagtgccgctgtaatcgtgaagtgattagtatcgctagtgcttgtaccgaataagctgttttcaccagaatcattagatctagagtcaaatgcacctggtgccttagaacgactagtaaagctattataagcgtcccaatcaatatctttcaccagacctgtattcttatctaatattaagaaagaatagcgagacaaatcagtgccattagatttagctttattagcggcatcgatgatgaaagattttacatattgcttgaatgtgccattacctttcttatcgagttttaaaataacgccagttctatcacgtaattgtaagttgtttacatagtcagggaagtggctcttaagcaaatctgagtatgccacatcatcattcgttaagttcacacgttgtacattacgttgtattggtgctggtgcaccacctacattagcttgaggcaattcactttgtcccatagttactttattaaatgatgtgatgccgttatagctccattcgtaagccatatctgcagcatctaggtttgtaatcggtgcgtaagcagaggatgcatatacatcggtagatgcagtagcagcgccgagagcctgtagatatggttggtaatcagatgtattacctgttgcaccttgtaataaggaaacggcaccgcctgcactagtaccattcgtaataatacgttttgcgttacctggcatagtcgcatcattagcatgtaaataagctgtagccgcttgtaagtctacaatgactgcaggtgctttgccgatgaagttaccatcagaagctttatttgtacggccacgtgtagcaggggatgcaacaacataacctctagacaatgcatagagagcactatttggcttattattttctacctttggtgccataggttggcttggcatataaccgccaacattatttggcataaagattggtgctgtttgtgtattataaccatttacagtgccattattgaaatactcttcaggtatgtaaatgtttatgtactgctgatcaatatcgataggatttgatacatatgggatatattcaaatgcgcgatatttaatctctttattatccaccgttcccgtcattgactcgtaattattgatatcaaaggtgagggtaatctttgcagacgtatcagcttgtaatggtggatcaattggctgtgaaagtatatttttttcacctgttgtagtagaacctttggtagaagcttgattacgttcattaacatatgattcaggcaatttaggctcttgagcttgttttgcttccgctcgagcttttgcttcggcatcagctttagccttggcctcctgttccgctttagcttttgcttcttgctctgctttaattttagcctcttgtgctgcttttgcttgctctgccgcaatacgttcttgttcagctttgatggcagcttgacgttgagcttcagcagcggcttcggatcgagccttagcttctgcctcggcttgggctttcgcagcagcatctgcagctgcctttgctgccgctgcatctagacgagctctttctgcatccgcttcagcttgttctgccgcgatgcgttcttgttcagccttaatagcagcttggcgttgagcttcggcttgatctgccgcgatgcgttcttgttctgctttaatagcggcttgacgctgaacctcagcttgctctgccgcgatgcgatcttgttctgctttaatagcggcttgacgctgagcctcggcttgctctgccgcgatgcgatcttgttccgctttaatagcggcttgacgttgggcctcggcttgctctgccgcgatgcgatcttgttccgctttaatagcagcttgacgttgagcctcagcttgctctgccgcgatgcgatcttgttccgctttaatagcagcttggcgttgagcctcagcttgttgagctgcaatacgctcttgttccgctttgataacagcttggcgttgagcctcagcttgttgagctgcaatacgctcttgttccgctttgatagcagtttgacgttgagcttcttgttgctgagctaataactccgcttggcgctgtgcctcttgttgttgcgctaataatgcggcttggcgttgagcttcggcagctcgttcagctgccatttggcgcactgcttgcgcttgttcactgctttgttgttgcattgcttcttgttgtgcagcttgttcttccgctaatttagctaaacgctcacgttcagcacgttgaatatcgcgaattgttaatgtccgttttgcaataactgatttagtcgtggttgtattggcaactactaatggtgtagtagattgttcttgcacaatgatcggtgtacgttgtacttgcgttgtttgcatttgctgcttgccatctacttgtttttgaatggtaacaggctcagttttgcgttgtacgttgattaaactatgcatagccaatgtcggctccatcatagtattcgtttgtttattaacaacgtattgtggttgtgaaacggctctatattgttcctctaaagctttagccgtatctggaactggcactgggcgcacacgagggaccataggttgagtatccattggtcgtacgactggagtcgctacattattaatagtttctgtcgttgattcagaagtagttttagatcctactaaatcattcatgttaaggaccggagctgcgtgagcaacgccacccaatgctgctgctgcaaaaaacgcagcagtcacttgacgtttcttagatgatttcatgaattattctccgaactagatttcaaataataatttataattttaaaaattatttatatttatatagtttatcataaatgtggctaattgtacaatttccaaaaatataggctatatcaagtgaaaatggtattacaggaaattagaaatttagaattaaatttaaaatcatatgttatagaggcataatagctgattatagaaaacagaagagaaactaaatcatctaaatgttgagaagataaagtatatcaagtaatttggaataaggttaagactggttatgtagttatttctaaatttgtaaaaatagcggtaagaaaaaactgtagcagaaggtaatactactataataattgatggtaatacaggtattaatgctgacaatttgaagtcgagagactattagacttatgtatacatttctcaataaaatatggtatgctttgggtaatttaatcgagttttgtttttaaaggagcaaacatgtttacaaaattcctattagcatgtatggtgatggctacttttactatgcaaattcaagctatttcaattaatgaattaaatagctcatcgcagtttaaaaatgtgtatcaaaaatcgtatccttatgaaggcggttctatacaaaataagctgataagttatttaaatacatattctgtagagtctctagaatacgcagcaccgcactataaattaaaaggtactttttatgctgtttatgaaactcctcgaagtacatctattacagaatatgaattaactgctacgtacgatacgaattactcattagggtccttaatacaagctatgaatcttgtaaaaccatcaccatctatgtacgccgtgattaaggctgcacaggatgaatcagggatacaagtcgagttacaagaggtaaaacgatataatgtagacggtacagaggttattagtaaagttcctttagaacatcaattacgtccattagatcgtggacggtttgatgaagacttatttgctgtagcagacgctatgtttgctgtagcgtatcagcagcattttgatgacattgtagtgaaatgaggtgccttatgaaacattttgtatttcttgtggcgctggtatgtgttttgtgtgcttctttaaatcctgtgaaggctgtgtctaatactgagttgcaagatactagtcgttttgcacgaattatatctaaaggtgatacaggtggtggagatggtaaatatattgaattaagtactatcctagataattctacagatgcgcatacaaaaaatatagaggctaagatatatgttgtattgccttcatctgatttaattagggaatataaggttcgttatgactatgacttaaacctttcctttgctaatatggtagctaaggcaccagagctaaaaacaaggctaccagatttttctttacatgaactatggaatataaaaatgatggaatctggtattgtagggatggtattaaatcaacaggattacactcttaatggtgaaagtaaaccaacacaaccagctcttaaaggctatgagaatgttacattcttaacacctacggactttgattttgaaagctatcatgttgctaatcgcatatttaaaatggtatatggtacattttatgatgatgtaatccgataagcagatcgaagatataagttagaaatacaaacaccctatgtcagtattgtgacatagggtgttttgcatatattagttattggtcagtcatttataatgattaaactaaatagaccaattgtgatattattttttgagttttggttttacgatagccaagataatgcaagccacaacggaaccgattgcaatggatgcaaggtaaagaagtgggttgccgattgttggtactacgaagataccaccgtgaggtgcacgtaatgtacattcaaagaacatggataatgcaccagctgtaccagcaccgatgatgcaagaaggcaatacgcggataggatcggctgcggcaaatgggatagcaccttctgtgatgaaggaaagccccatgatgtaatttgtaataccagatttacgttctgcttctgtgaagcggctagggaagaatgatgtacaaagggcaatcgccaatggaggaaccataccaccagccataacagcggccataataccatattcaccagttgcaagagcacctgtaccgataacataggctgctttgttgacagggccacccatatcaacagacatcatagcaccgaagacaagacctaataatacgcggctagtagtgcccattgtttgcaaggaattcataagccattcgtttaaggcagatactggtggattgatgataaatgtaatcgcgataccaatgaataatacgcccagtacaggatagaagagcactggctttgtaccttctaatgctggaggtaatccggatacgagtttcttaactaacagtactaagtaacctgctgcaaagcctgcaatcaaggccccgaggaaaccagaaccaccttggtttgctagcaagcccccaacaaaaccagctacaagacctgaacggtctgcaatactcatagcgatgtaacctgctagaactggtaacataaatccaaaggaagcaccgccaattttcattagaaatgcggataatggtgtgccagaaccaaagtttttggcattagctggatcgaatgtgtcaaataggaatgcgagagcgattagaataccaccgccgataacaaatggcaacatgtgagatacgccattcatcaaatgcttgtagatttgtcggccaaagctatcttttgcatcgatagcagattcagcactatctttgtcagattgagaggcatggtataccggtgctgtaccagacatagcttcacgcaataattcttctgctttattaatgccgtttgccaccttagtttgaatcattggcttgccatcaaatcgagccatttcaacttggcggtcagaagcgacgatgatgcatttagcatgctcgatttcttctgctgtaagtgcatctttaatgccagaagcaccatttttttctacttttaaagaaatgcccatttccttagctttacgttccaaggattctgcagccatgtatgtatgagcaatgccagtaggacagcctgtaacagctaatacttcgtaatgtggattatctacagataccttagggactaccttttcgatagcctctgtagcttttgcttcgatagcatcggtaatgcttggtgctttttcatcttccgtcttgatatagccttctacagatggatcaaagttgccttcttctttggcagtgataagttctagaaaacggtcaactgtagcagattggatgagagcgtttttgaagtctggatcaattaccatagtggctaatttgctcaatacctctacatgagtatcagctgcgccttctggtgctgcaatcatgaagaataggcgggatggttgtccatcgagggcctcgaaatcaacaccgttaggaacgaccatagcagcaaggccagcttcctttacacctgctgatttagcatgtggtgtggcgataccgtcgccaaggccagtagaaccggattcttcgcgggcaaagacagcttttaagtattctgtcttgtcagataggttgccgcctttatccattaaatcacctagagtgtaaatggcatccgctttgttagttggtgatgcattcagcaggattgattggggctttaataaatcagtaatcttcatgtgtgtactccttactgtacatatataatgaataatataattaacgaatggtgttaagcaaggcgaggacctcgtccttggtggctagattcttcgaaaaggctgaagcagagcctgtggcaataccccaatagagggcttgttgtaaatcttgggtgttgaggtatccagtcatgaaaccagctaccatagaatcgccggcaccaacggagttaataagcgttcctttaggtgcaggacttgtatagactataccatcagcggataccaagatagcaccgtctccagccatagagatgagcacatgttgtgcaccttgggactgtaattttttagctgcagtgactaaatcatcttttgtagacaatgtacgtccgaagatttcgcttaattcgtgattgtttggtttgattaaaaatggtttgtatggcaatacacgagttaatagatccttagttgcgtctacgacgatacgaatatgtttattagctaagcgcttcataatgatttcgtacatatcacttgggaggctagacggaatgctgcctgctaagattaatgtatcttgctctgttaatgcatcaagttgggcgtataaggcctgtagttcatcatcggctatgataggaccacgaccgttgatttccgtttcttcatcggatgcttttactttgacattgatgcgggttaaaccctctctaagacggataaagctttcacgaacgccaaattcattgagctgacgtacaatttcgtcacctgtaaaaccagcgataaacccaagtgccgttgtatccatgcctaggttattgagtacgattgacacattgatgcccttgccaccgcccagcacatattcttgttccgtacgattgatagtaccaggtgttaagtggtctaagcgaacgatataatccaatgcaggattgaaagtaatcgtataaatcataagttttcctctatatttcgtaaaaaatagaatgtattaatggatttgttgctccttgcgtcgcaagcgataccagtagataagtggtactaagtataagaagaacgcaaatggtacgtaaccggcaggcgagacatccatcataatgacaggtacgagtgccgcgatattccatggttgtaaggctgcaataaggatgccgctgttttcaaagtctagcataacgtcttcgtcatgaatgcgttcttttgcataggtggtgcgcataatggaatgcgtcatgattaccgcaattgcttgactacaaccaagggcgcctgtaatgaatgcaatcagtacattcgacgcaaagagtttggcgcgacctgatacgtgttgtaaaaggctgcgaatatcattccaaaaaccaacgccttcaagcatgccggaaatggaacaagccatgaatatagatagggttggtatccacatcgtttgtaggcctccaccgtggataatatccgctagtgggttataatcaggtagatgaaaaccaactaaggtaaattgcaatatatccattacggtataattttgatggataattgcgaggatggctgctgccagtgcactaataccaataggccaacgtatagatagctttgttggtaacaaaccaataatgataagaactggtatccataatgtccaatggatattgaatacgaaatgaatcgtatccggtagataactgttagtgtagtctagtggataccatagggataagagtagatacaatatacagctgatgatgagagcaagtaagctatctttcaacatgattggtatattgctatttactttggtgtgcgttagagcagctacgagagaggcgctagaggatagaggtgagtttctgtctcctaaataggcgcctgccataatggcaccggctacaatatcaataggtagattaccagctttggcaattgtaattagtacaataccgatggtgcctactgttcctagcgatgtaccaagtaacatactcacgcaggatgtaattaaaaatgcgcagattatgaaaagatttggattaatcaattcaataccagacgcaataatcatgggaataatacccgatgcttgccacatggctatgagccagccgatgagcaaaaagatttgcataaccacgattgaggttttagcattcgtccaggacatgcggagtaagtcttttggattatatccttgtcgatatagagcgtaagcgaagcataaccatacgaggattaatgcgtagccgatggggacactaaacatgacagatgctagaataatgatgatagaaacgattaatgatatcaatagtcccatattatttggcatcatagtgcgcccttgtttatattttaggtatgcctgtaatagtaattgtaaccacttcatattattcgataggaagttctgtttcgaatacttcctcagcagggcccgtcataagaaccgtgccatcctccaaataactgatgtgtaatgtgccaagatataattctacatcgacctcgcgacctgtaaggcctttttcgtgggacatgatcgcagatgcgcaggaacctgtaccgcatgcaagcgtagcgccagcaccgcgttcccaagtgcggaccttaatatggtggtcgtttacgacctcgatatagttcacgtttgtattagatgggaatgcatcatgtttttcgagaattggaccttgtgttgtaaccggtgcttttgtgatgtcgtccacaaaaacctctgtgtgcggtacaccgagcagaacggaacttactgttactgtttcgccatttacatcgaggtccacatcgatgaccttatccatggttacattcatgggaatgtctttgctgttaaagaaaggtttgcccatgtctactgtcacttgtgtaacaatgccattttcaatggttaacattggtttcataacgcctgctaatgtttcgatggtgaaagtatcttttgtaatttcaccgtgttcataggcatatttggcaaagcaacgaatgccattaccacacatttctgcttcgctgccgtctgagttgatgatacgcatgcgtacatcgcatgtattagatggtacaacgattacaagaccatcggcgccgatacctgtacgacggtcgcagaggcggatggcgagatctgtataatctttattggccccttgtgagtcagaaaagaggataaaatcgttgccgaggccatgcatttttgttaatttcatacatactcctattcgatgtcacactagataaatgcgactattccttacaatagagtagactttcactatgatactcgtgaaagtctacggttaactatatataatataacattatatcacagaatagggtctctctttattgttcaatgtaaaaatgttaaaatataatgtaatgtagcttatcggatatagaaagaggaacacacatgcgaattcaagggatttctggatctcgaggcgttgctgttggcaatgtgtacaaatatatacaagaagaaatcgtgatacctgattatgaggtgactgatgaccaagtagaggctgaaattggcaaatttgctagcgctatggctgcaactcttaaacaattagatacgattcgtcaaaaagcattggttgatatgggggcagatgaggctgctatttttgaagctcatatgcaaatcgcacaagacccatccttgtctgatggtatcaagtcccttgtagaaaattcaaaaatgaacgtcgtagctgctacggcgcaaacgatagaaacctttgcggctattttcatcggcatggatgatccatatatgcgtgaacgtggtgcggatattaaagatattggcgatcgtttgatgcgtaacatgcttggcatgaaccctcgcggtttatctcatatttccggtgaggttatcatcgtggctcacgatttggctccatctgatacggcttcactagataaaaatgttgtaaaaggtatcgtaacagctgctggtggtccgacatctcatgcggctatcatggcgcgtaccttagaaattcctgccgttatgggcgttggtgatattgaaagctttactgacgatgtgcgtgctgttgtacttggcactgatggtgaagttattacagaaccatccgatgaagagtgggaacgttatacaaaagatgctgcagatttccaagacgaattgaaacgcttgaaggactctgccaatttagaagccgttacaaaggacggacatcatgttgatttattcggtaatattggtaaatccaaggatgcggaccatgcgttaaccatgggtgctcaaggcattggcctatatcgcaccgaattcctttacatggaaaacgatgaactgcctacagaagatgtacagtttgaacaatataaacaagtagcagaaagtatgaagggccaacctgtcatcatccgtaccatggatatcggcggtgataaggaattaaaatgcctagacttacctgaagaaatgaatccattcctcgggtatcgtgccattcgtatttccttgaaccgtccggatatttttaaggtccaattacgtgcactccttcgggctagttcgtttggcgacattcacatcatgtatcctatgattgcatctgtagaagaggttaaagcggcaaatgctatgctcgatgaatgcaagaaagaattgattactgaaggcatagctttcaatacagatatcaaagtaggtattatgattgaggtgccagcggcagccgttatttctccgattttggctaaatatgtagatttctttagtatcggtaccaatgacctttgccaatacacgttggcggttgaccgtatgaatgaggccatcggcaatttatatcaaccattgcatcccgctgtattacgccttatcaaacacgtaattgatgcgagtcacgaacaaggtaaatttaccggtatgtgtggtgagttggctggtgatccagttgcaactatgattttattgggattaggacttgatgaattctctatgactgcatcatccattccattgattaaaaatattttacgctctgttacaaaagcagaatgtgaagcatttgctcaaaaagcattgactatggatacagctgaagaaatcacagcctatgcaaaatcattactcgctgaaaaaggtttggcatagaccatagctttcataaaaacaaacttgaatttgataggggtaaactgatacaatacctatattaatagcaaagatattagcgtttttgtgcgctccgtagaaagaggtaactcatgaaagaagtaacagtagaaatcacaaacgaatctggtttacatgctcgtccagcgactgcatttacacaattggctgcaaaatttgcgtccaaattgacaatcgcagcaaatggtaaaaccgcagatgctaaatccattttgactgtattaacattgggtgcaacaaaaggcacatccgtagtattaactgctgatggtgctgatgaagatgatgcattagcagcacttagcgagttcttaacaacgaaccacgactaatacgcaaaagaggcaataccctgatcattaggatattgcctctttttattttcccatattggcaaagcgctctacagcaactgtaaagtcattaattgttttatctacatcaccatgttgtataccatcgcgtacacaatggttgatatgtccttcgaggaccacttggccaaccttatgcaacgcggatttggctgcattgatttgggctagtacatcttcacaaggaatgtcttcttcaatcattcgatcaatagcttgtacttgacctaaaattttacgcaatcgacgatgtagattgtctgaatccatacactgtttcataatactcctccaatttgggcatgcttcatcatcttatctattatacgacaatatggttaacaaatacaatacatacaagtatgctaaaaatagataacttatgatacaatacaatcaatatatgatagttgtattatagggatgttattagtgaaagtttatatacttagaagtctgctgtaaggtagatataggtgaatctatgtttatatttcgaatggtgcgccgattagttcttatcatttgcatagtactaggggctatatatgtgtatgatacatatcaaagctatcaaggaacaaatcgcgttagtaaggctcatacaactgtagaacagacaattgaagaaaatgaagatacattaagtcggtgggaacgcatgcatcgtatttttaccttccgagaaaaggttgaagccgcgcttcatcaacgtgtgccaagggataaatgggtgaaatctgaaaacattccagacaatgcgaaacgagctctagtggccattgaagataaacgctattacaagcatggtgctatcgatgtgctcggtgtaacacgcgctttttatgttaacagcgttgctggtgaaactgttgagggtggtagtactatcacacaacaattggtaaaaaatctatttctatcgtctaaacggacgatgtcccgtaaagcggaggaagctattctagcggtagagatggagcattactatagtaaagatgaaattttaaccatgtatttgaatacggtctattatggtcataattattatggtataaaagaggctgccgaagggtattttggtaccagccctagtcgattgaccttaggtcaatgtgcaatgttagcggcattgcccaatgcaccaacctatttggatccttatgaaaattataaaggtgctaaagctcggcaaaaattagttctcgctcaaatggtagatcaaggtatgatatctcaagcggaggcggactatgcatataagcaagaacttggtatagaataatatattcattaatatgacactacatagaaaacaatcatggtgctatacatactcgcatcatgattgtttttatttacatatattattcgtaaacgaaatatattatataattgaataaaatttctgcttgcatttataaatatgcagtgatatactaacacctgtagtcgataagacatgaagaattcataatgaattcgtagtataataataaatggtatgaatcatacctagtataatttagtttatgaggtgttatcatgggtaaagcaaataaagtagtactcgcatattctggtggtttagacacatccgttatcattccttggttaaaagaaaattatggcgctgaagttatcgcagtgtgcgtagacttgggccaacctgaggattatgatgcagttgagaaaaaagcaatcaaatccggcgcatctaaagcgtacatcgttgatgctaaagaagacttcgtaaaagattatgtatggccaacagtgaaagctggtgctgtttatgaaggcaagtatttattaggtacatccttcgctagacctttaatcggtaaaatccttgtagatattgctaaaaaagaaggcgctgatgctatcgctcacggtgcgactggtaaaggtaatgaccaagttcgttttgaacttgctatcaaagcattggctcctaatatgaaaatcatcgctccttggagagaatgggatttgaaatccagaacagactgcatggaatatgcagctaaacatgatattccagttgtagctacgaaatcccatccatattccatggaccaaaacgtatggcatttgtcccatgaaggcggcgatcttgaaaatccagcaaatgcgcctaaagatgatgtgtacttggtaacacatacgcctgaacaagctccagatgaagctggttatgtaactgtatccttcaaagatggcgtacctgtagcagtagatggccaagaaggtactccattacaattgttagaaaaactcaacgaaatcggtgcacactatggcgtaggcgttgtagatatcgttgaaaatagattagtaggcatgaaatcccgtggcgtttatgaaaacccaggtggatccatcatcatgtatgctcacagagaacttgaatacctttgccttgacagagctacataccactacaaagaacttattgctaacaaatacgctgaacttgtatacgatggcatgtggttcgcaccattgatgaacgctttgcaagcattcgttgatgaaactcaaaaaactgtaactggtgaagtaaaacttaaattgtacaaaggcaacattatttctgctggtgcaacttctccatactccttgtacagcgaagatttcgtaacattcgaagaagatgatgtatacaaccaagctgatgcggctggtttcatcaacttgttcggtttacctcttaaaattaatgcattaatgaaagaaaaggcaggtaaataatggctaaattgtggggcgggcgtttcacaaaaggcacagataaagcggtagaggattttacatcctctatcgcttttgatgcgcggatgtacgccgaagatattgcaggcagtaaagcacatgctacaatgctggcaaaacaaaatattatctccgacgcagatcgggacgctattgttgagggcttaacaaagataaaaggccaaatcgataaaggtgagttcccattctccgtggctcttgaagatattcatatgaatattgaaaagcgcctaaccgatgatattggtgaagcaggtggtcgtttacatacaggccgtagccgtaatgaccaatgcgcagttgatttacacatgtacgtgcgtaaagccgtagtagaaatgggcgagctcatcgtagatatgcaaaaagccctcatcgaaacggctgaaaaatacagcgatgttatcatgcctggctatacgcatttacaacgggcacaacctgtattgttcggtcatcatatgatggcatacttctctatgctagaacgcgactttgaccgtttgttgatggtcttcaaacacgcagacatcatgccacttggtgcaggggccttagctggttctacatacggtattgatcaaacctatacgcaaaagctactcggcttctctcgtatttacgaaaatagtatggatgccgtatccgaccgtgactatgtagttgaattcttgtcttttgcatctcttgtgatgatgcacttgagccgtcttagcgaagaattgattttgtggtctaccaatgagtttaacttcattgaactcgatgatgcgcattgcacaggctctagcattatgccacaaaagaaaaatcctgacgtatgtgaacttgttcgtggtaaaacaggtcgtacctatggtcatttgttgggtcttttgacaaccttgaaaggattgcctcttacctataataaggatatgcaagaggataaagagggtatttttgatgctatcgatacagtacactttgcattgtccattaatgcggcgatgattcgcggtatgaaggtcaatggggcgcatatgaaagctgtccttgatgatgacttctctaatgctacagatatggccgattaccttgcgaaaaaaggcgttccattccgtgaagcgcacgaaattgtaggcaatgctgtacatcattgtatcgaaaaaggttgtgtattgcttgacttatccgttgaggatttcaaagcaatttctccatattttgatgcggacattctagatgctatttccattgaagcttgtgtagcaggtcgtaacaactattctggtacggctccagaatgtgtgaaaagacaacgtaataatgggaagcaaattattgctaacgaagaagcacaaatcgatagctggaaatctatcgtaaactctgtacaagagtaaatcctttttattagaatcatagatgctttcttagtttataaaattggctccacctttaggtggggtcaatttttgtctatattgggtggactcgtagcggataatggtcttgtggaacaatactataatctgaatagatagtgatttttcacacatttaattgattaaactaaaataaaatgatactcttacattcatcataccgtttctaatcaaaaataatatataattactatatttttattcaattcgtgtaatatgctttgtccactaataaaatacttttaatttaccacctatggtgttattattaattcgaaaaacaaataaaaacggtaccttcacattcccgcccattacagcaggaactgaatgtacttagcggttttaatatagttacgtgaattatggacgagaaaaaattcaccttacgaaaggggattgatacatgaaaaccaccgctaaaaaaatgtctgtattccagctaaccacaatggtagcagccaatatgctaggagctgggatcattatgttaccaaccaatttggctcaagttggtactatttcagtgttatcttggctcgtgacggctgtgggtgcgcttttgctagcgtatatttttgctcaagcgggtatgttctctcaaattaaaggaggcatgggcggctatgcagaacaccgcttcggtaagactggacattttatggcgagctatgcttacagcatatctctcatcattgctaatatagctattgcagtgtctgcagttggctatggctcagaattctttggtgttgatttaaatgcaacgcaaacaagtcaagtaacaatcgttttgttatggtttgcagcgattttgaattttagaggaaatcgctttacaggtcagctcagcaatattacgatttggggttgtgttgtgccggttcttctaatcggtacaattggttggttctggtttagcccagatacgtatttggcggcatggaatccaaacgacttgccgttctttgaagcaattaaacaatctattgctttaacattgtggggattcctagggtttgaatctgcagcagcaaatgcggatgctgtagaaaatccaaagaaaaacgtgccaattgcaacatttgcaggtacattagcagtggcggtgatttacatcttgtccacgaatgttatggccggtatcgtgcctaacacagaattacttaattccaatgcaccatttggtctcacatttgcatacatgtttaatgacacaattgcaaatgttatcatggcgctcatgattatctcttgctgtggtgctttactttgctggcaatttacattgtctcgcgtattcaagaatgcagcagaggcaggttatttccctaaggtgtttgctcgtgtaaacagcaaggatgcacctgtgcgtggcgtatttatcttattagcgattgaaacaattcttacattgttcacagctaatgattctttacgcgatcaattcgagacattggtaaaccttgcggttgtaactaatgtagtgccttatattctctgcattcttgcagtaccaactatgatgtacatgtctggattggaaaaacgtcgtattgatcgtttctatttcgttgctgttgcaggtgttttatactgctcatatgcagtatatgcgtgcggtgtcgatgccatgctcggtagtgctgttgcagtaactattggcatttgcatttatatgatacgcaaaggttggttagcgtatcgtgcacaacgattccaacaaagtatcgattaattgaatactctctcgtcttatagaggctgtcacttcggtgatagcctcttttggttatatgtatagcaaaatgttttatatgtaaattaaattaaaatacaaatgtaaatatatacgtttatatacagaaaagaaaagtaaataaagtatttatttcaaaaaatggggcacaatatacgaattaatgcatgtaaatgataatgaatattgcttttatgaataaatatgattgattgacaaatatacagtagggggtatatgtattgctggagaattataaatatagtatatttataattaataaaagtgaataaactgagtgtcggttttaccgagcgtaaaagaggaaaatgggtgtaaatcctatactatgaaaatagctgtaatgaggagcgatatttcgtattagggtcactgggaaactgggaaggcagaaatattgtgatgaatcaaaagtcagaaagcctgctcaatcttgaggaacattgtgctagaacacggtgttttaatttaggttagtcaggtaggctaatctttttttatggttatttcatagatcttattatacagcatcatattatatgtttactttctatgtttattcactattatgtgtttttatttgaaaagggtataggaggtgcctatgggcaaacgctttgccaaacaactaggacagtttattgtcaccttgtttggcatcacatttttgacattttgtctcacctatttagctccaggggacccagttacgatgctactggaaacggcggataccatcgtgtctcaagaaacgattgatgaaactcgagcacaattaggcttggataagccgtttatcgtacagtatgcaaactgggtagtcaatgcagcacaaggtgacttaggaatgagttactctgctaaaaaaccggtagtagatcgcatgttagaagcattacctggtacgcttgcattggcaggaaccgcattggtatttacgattctctatgccttaccggcaggtatactgagtgcgtataatcggaataaatggatagactatgtgctgagaagcctttccttcataggcgtatctatgccgacattctggttaggccttgtattaatttacatctttggcttaaagctcggtttagttccaatcgcttcatctcgtataacggcgacaggtgttattttaccggctgttacattagcggttgttgtaggctctaaatacatgcgtcaggttcgactcgttatccttgaagagatgcaaaaggattacgttatcggtgcccgtgctcgtggcgtgagcgaaatgaaaattttattcggtcatattttgcctaatgccgtattgccattaatcaccattttaggtgttcttattggttggttattaggtggtgtagcggtagttgaaatggtattctcctggcctggcctcgggaatatggcaatctatgccatcaccatgcgtgactatccattgattgaaggttttgtgttatgggttgctattgcatacatgtgtatcaatgctttagttgatgcatcctatgttctattggaccctagattgaaaagggagagagcataatgaaagaatttattcagaaacataaattgttctctttctacactgcattgatgctcgtcatcgtattcattgctatctttgcaccatggcttgctccgggcgatgctttcacatcggatatgtccaaggcattacaagcacctagtgctcagcattggtttggtaccgacaaattgggccgtgacgtattgtctcgtatcatttatggtactcaattatccttgttcatgggtgtatccatcgtagtgattatggtgagcattggtacagtcatcggtgccgtagcaggttactttggtggcaaggttgaaatggttcttatgcgcttggcggatatcatgttatctttcccaggggtagtgctcgccattgccatcgccggtatcttaggtggtagtattgtaaataccatcttagcattatcggttgtaggatgggctaaatatgcgcgacttgtgcgttctatgacgttgaaagtacgcggtgaagaatatgtaacggctgccgttatgatgggggcctctacatggacgattttacgtcgtcatattattcctaatattttgccactcgttgtaactacaggtgctcttgatattggggctattatgattgaggtagcaggtttatccttccttggatttggtgcgcaaccacctacaccagaatgggggcttatgctaaatgaaggtcgtcaatacttgcaaacaagtccttggctcatggcattccctggtatgtctattttaatcgtagtagctgttttcaatctttggtctgattctttacgcgatgtagtggatcctaagaatcaaggttaatcttagtttttggaatctttattaggcctttgcggcataataatgatatataagctttgtatattgtgttaataaggagattttaaatgaaaaaatcttggaaaaaggctcttttagcaggtcttagcattgtaatgatgggttccttcatcgctggctgtggctctgataataatggtgctgctaataaggatgttttaaaagttggtgtaactaacttcgcatccacattagaacctacagaaaacttcttcgcatgggtcgttatgcgttatggtgtgggtgaaacattggctagatttgatgaacaaatgaagccacaaccttggattgcttctaaatgggaagtatctccagaccataaaacatggacgtttaccatcaacgataaggtaaagttctccaatggtaaaaaggttgatgcagcagctgtaaaagcatctatcgaacgggcatttgaaaaatctaaccgtgcaaaaacattcttcgaatatgattccatcgaagctaatggtcaacaattagttattcatacaacaaaagaatatcctaatatgcctggtcttttagctgacccattgttcctaatcgttgacgttcaagctgaaaaagatggccgtaactttgctaaagaaggtcctatcggtacaggcccatacgtagttaaatctttcacaaaagaacgtgctgaaatggcagccaacgaaaactactgggatggcacagtacctttcaaaactgtagaaattccttccatcgacgatcctaatacgcgtgctatgagcttgcaatctggtgatgttgatatggcggttaacatcggtgctggtgaaatgggcttattccaaaataacgataagttcaaggttgatgaaatcgcatctcttcgcgtagtattggctcgtattaaccaaaaaggtgttctcggtgatgataaagttcgtgcagctgttatttccgcaacagaccgcaaaaactatgcagatgtgttgcttaaaggtacattcatccctggttccgctccaattccaccatccatggactatggcttcaaagatttgaaagatcctaatgcatataatcctgatcgcgcaaaacaattgttagcagaagatggttggaaagatactgatggtgatggcatccttgataaagatggaaaaccattaacattcaatttcgttgtatataactctcgtgctgaattgccactttatgccgaagctgttcaagcagaccttaaaaaagtgggtatcgacatgaaaatcaaaacagttgactataacttgattgataaaatgggtcaagatggcgactatgatatgcttatctccaacatcgtaactgctaatacaggcgatccaatctggttcttagctaactactggcatactaatgacaatggttccaaccctcaaaacggttctggttactccaatccacaagttgaccaattgttagatgctgctgaaactgaattcgaccctgcaaaacgtcgtgactatgcaattcaaattcaacaattattgatgaatgacggtgctgcattattcttaggttaccctaaaactaatatcgttactggttcttacttgaaaggtgcagtcatgtatccaagtgattactactggattacaaataaaattactaaataataaggagctataatggcagaaaacgtactcacagtagaacatcttagtatcgcgtatcaaggcgtgcctgctgttatggatgtaaattttaccttggaacgcggcaaggtattgaccattgtaggggaatccggatccggtaagactaccgtgatccgcgccctcatggggttattaccagtcggtggtgaggttacagaagggacactgctatttaatggtaaagaccttcgaaatctttcaaaatccgaatggcgttccatacgtggtaaagatatggccatgattttccaagatagcggtagtgcactcgacccgattgtacgcattggtaaacaatttagagaactattcaaagctcacattgaaatctccaatgacgaatgtgatcgtcgtgctattgaattattagagtctgttgcgttacctaattgcgcagatatccttcgccgctatccacatgagctatctggcggtcaacgccaacgtgttggtattgccatggcattagccttagacccagcattactcatcggtgatgaaccaacatctgctctagacgtgacaacacaatctcaagttgttatgcaaatgatggaattatctaaagtgcataattccgctatcgttatggtaacccataaccttggtgtagcagcgtatatgtccgattacatcatcgttatgaaaaagggccgtgttgtagatgcaggtacgccacaagatatcttagaaaacccatctaatgaatacacaaaacaactaaaagatgcggtaccaacattgggaggaggtcgttacattgactaaatacgctgtagaaattaaaaatgtatacaaacgattccctcttccgactggcggagagctagaagcatgtaaagatatcaatattacccttgaaaaagggcagtctcttggtattgtaggtgaatctggttctggtaaaacaactctagttcgtatgattatgaagatgttacctattacagaaggtgaaatctacgttgatggtgttgaaattcaacacatgaatacagaacaaactagagaatatcgtcaaaaaattcaaatggtattccaagatccatcggcagcttttaatccgcgtatgaaggttaaggatattattcttgaaccactatataattttgggcttcttgaaaagggaaaagaagaacaaatcgctggggattaccttgaaatggtagatttaccgcgtgagtttatgcatcgattcccacatgaaatgtctggtggtcaacgtcaacgtgtagccattgctcgtgctatcgtattagaacctgaaatcctagtattagatgaagcaacaagtgctcttgacgtatccgtacaggattccatagcggacctattggctcgcttacaaaaaaagaaaaatttaacatacctatttattgctcatgatattgcgttcattcgtacaatgtgccacaaagtggttgttatgtacaaaggtgctatcgttgaagaattagatgcattccatttagctgatgcgaagcatccttatacaaaggttctattgagttctatctttgaaattggtcaagatcataaaccactttcattagaagaagctacattagaagcataatagtatatgcatgaggctcgctttaaaatgaattaaagtgtataggttaagtaaaaatagcagttagttgatgggctaactgctattttttcataatatacaggtatgaaaattattttagttgggccgttgtaagatatggtgtgggtgaaacacttatcaagtacgatgatcaaatgaaagcaaccccgtggcttgcatcttcttggaaacaaagtgatgataagttaagctggaccttcaaaattaatgacaaagtaaaattctcaaatggtaatcctttgacggcagaagctgtaaaatcttcattagaaagaacctttgccaagaataatcgtgcaaaaactttctttaactatacagaaatcaccgcaaatggtcaggagcttaccattaagacagacaagccatattataacttgccaagtttactaggggacccattattccttattgttgatgtgacgagcgaagcaaatggtcgcaattttgctaaagaaggacccattggtactggtccgtatgtagttgagtctttcacaaaagaacgtgcagaactcaaaagaaatgataattactgggatggcaaggtaggttttagtagggttgaaattccatccattaatgatgcgaatacacgggctatggcgttgcaatccggtgatgtggatatggcgattggcatcggacctggtgaatatgggattttccaaaatgataagaatttcactatctatgaagtggcatccttgcgtgatgtatttgttcggatgagtcaaaaaggcaagctgagcaatccaaatcttcgtgctgcacttttccttggatatcctaaaattaatatcgtaggcaataaacacatcgatggtattaagatgacaccatccgaatactatatgattacgaaagatttaaaacgaaaataatcgcatctgtaacaaattattcagcccagttataattatataaatagttctcatttgcttgactaaatactatagtttaaagtgtttttatattgatataataattcatttatttcgacaattattgaaaaagttaaacgtatagtaggaggttaacatggggcttaaaaagtattcattgtttggtgctttcatattattagtgggagctttaatcttttcaggatgtggaaaagatacaaataaagatacattaaaagtaggtgctatgtcctatgcagagactttagagcctacggagaattactttagttgggggattgttcgttatggaattggagaaaatctcgttaaatttgatgattctatgaaaccacaaccatggattgcgtcttcgtggtcagtcggagatgatcacaagacttggactttttctatcaatgataaggtaaaattctctaatggtcgtaaggttacggcacaagctgttaaggaatccttagagcgtacatttgaaaaaagtaaacgggcaaaatccttttttgcctatgactccatggaagcaaatgggcagactttaaccattcataccgataaggtgtatcctaatctacccggactactaggggatcctttatttttaattgtagatgttcaatcagaacgagatggccgtgattttagtaaagaaggccctattgctacgggcccttatgtgcctatatcttttactaaagaacgcattgagttagataagaacgaaaattattgggatggtgatgtgggatttaaacatgtagtggtagattctattaatgatgtaaatactcgtgctatggcgttgcaagcaggggatattgatatggctgttaatatcgccgctagtgagtatggattatttaaagataataaggattatattattgaagaaaccccatcattgcgtgttgttatggttcgaatgaatcataatggatatttgaacgatattaatgtaagacgtgctttagttgctggtgcagatcgtgaaaattatgctacaaaactttttaaggatacctttgtagcgggacgaactccattgccaccatccttgaattatggatataacgatatcaaaattcctgaaacgtataacccagaacgtgctaaaatgttgttggcacagtctggttgggtagatagcgatggagatggttatgtagataaggatggtaaaaagctacgtcttaatttttatacttatacagcaagacctgaggtaatcttatatgcagaagcattacaggttgattacaaaaaaattggtgttgatgtgaatgtagaaatcgttgattctagtgtagtggataaggtgacacgttctggtgattatgacttggcaataaccagtgtttcaactgctagcactggtagtcctgtatggttcttaaaacaatattgggggaccaacatagatggctcaaatccgaccaatgtgtccggttttagtaatcctaaatatgatgaattactagctttggctgaaactactgttgatgatacacaacgatataatgccattgttgaggcacaaaagattttgttagacgatagtgcatccttgttcttaggttatcctaagattaatatgatttgtaaaagctatataaaagggcttaagatttcacctagtgaatattacatcattacgaaagacttgaaaaaagaataaggtttactatttgtaatgcaataaaaggactagtctttggactagtcctttgtgctgtgcaaatattattttttactatctaccgcatcaagatcattcatatccacctcgttagcacggccaatcatgcgattatattttacatataattgcgtatatgcttcgccataggaggagttgataatgatgtaatttcttgcttctgcaataaattcttttacagcatcttgatattgtttaaccgcagcttgcgtttctggttttgtaccaggttgcaagtcattcaagcgttttgtaatttcttgtagattggtttcgaccttttgtgtatctgtattaccatcaggatcaataatatctatggtttgagataatagtatatttaattcaatgaaattaactgcattgactctgttttcatcagcgaattctttcatgcgttctgaatataattcgttattacgattttcaagtgctaaatcgtatgcattataggccgcattgaattgatctgctaatggtacatattggctagctaagttatcactacctacaaaattatctttttcaaaagttctatctgtgtagtagttttgaagttggtcggccacaggaattaattgcgataagatggtaagtaattcatccgtcgctttatttacatcctcatatggtgtggaactttcttctttagctgcttcaagctgagcttttaatttcttatagtcaggtaatgttacagacgtattatgtgtatgattgcgcaattcttcaagagttggttgtatttgataggtataggcaacactatttaaattaaatgtatcagctgcctcgatataaggtcgtaaggcattgatcttgtcctcaatagtagagcgatataatattgtagttgctttattggataggaaatgataagcgcaataaatcccaccaccaataacagcaatccctagaattacggctaagattaatttaatataaccctttttcaattgccaatactccttataaaacgtgtttgtgaaaaaatatctatactttatattctatacagttgatatcagtattattatagcatagattaaaggggcaaaaaagatacatataattgataattattaaataaatattaaatattataaagcgttaatagctatttgagtaagtaatatatttattgatatgcaatgcagtgtatgtttatttcatatttataagttggtataattaaattaacaaatgggaggtgattggaatggattttgaacgtcgctatgattctattgaagaagttttagatgtagcaaagtctgcagaaggtaagcttgtaaaggagtatgatgtaactaatcgacttgagacgaagaaaaataagggaggcataggtcagatcattgaagaaggcttatttcatatggctcctaatagtcgtgcagaagctgattttgctaacctaaatcttgaattaaaggttactggcataaaaacaaatgtaaaacagacatccttctcagcaaaggaaagattagtactcaatattattgattatatggaagagtataagcgtacttttgaagaatcatcgttgtggcataagaataaaaaaattttgcttatgttttataaatggattgatggtgtgaataaaggggaatttcctattcttaaatccgttatccatcaattttctgaatcggatttagctattgttaagcaagattggcaaattattatagataaaatcaaagcgggtaaggctcatgaaatttctgagggggataccatgtatcttgctgcttgtacaaaaggtgctaatgcaaagagcatgcgaaagcaacctttttctgatattcctgcaaaacagagagcctattcgttaaagaactcatatatgactacttatgtaagacgaattcttatgaatgaagacgtaatctcagttttcaaaccagaagagttaaagtctaaatcagttgatgagttattacatgaaagatttgcaccttatattgggcgtacattatatgaattaaagcgtcacattaactttgcagaaaacaagaataaagcgatgtatgcaaatctagtcagtgatctacttggtataaaaggcactagtcttgatgatactgaggaattcgctaaggcgaatatcaaatttaagactatccgtttagaaccaaatggtgttcctcgtgaacatatgtcatttgaacaaattgactttgatagatggctcaatgcatcttgggaagaatcccaagtatatgaaacatttgaaaatacaaagttcttatttgttgtatttcaatttactgagaccgaacgagagaaccctaacagagtaccttatttgaaaggcattaagctgtggaatatgccggagcaaattattgagaccgaattaaaaaatctatggcaaacagtgcatgacatattagcagttggtgttgaattaacacaaacgccaagaggtgtgaaaaataatttgccaggagttaagtttaatggtgtttgccatattagaccaaaagcttctaatgctgctgataaagttcaattaccagatggccaaatgattacaaagcagacatattggttaaatagagagtatattgcagaaatagtgagagagttataatttatggattatagtgagagaaccaaatataattttgaagatgatttgttgggagagcaggccgtaaataagtttttggttgattttctctatgaaaaattcaaagaaaaaggatatattatcgattttgaggtctctagagagttaaataagcagcatgcaggaagtgatactgttcttattcttaagagtggaaagaaaattgttgtagatgaaaaggccgctatccattatgcaaaaactaatttaaaggaaaaagctatgcctacattcgcctttgaagtgtcttatatgtataatgggcaattaaaagagggttggctgactaatccaaaatataatgaaacacagcgatatttattatgttggttatgggtacaggctgggaccaataaaagccgcttaaagtatgatgacattgtgcaaatagaagctatgttttttgaaaagaccgacattcaagaatacattataaatatagtcactgctgatacagatattgtaaagtttcatactgtagcttctgataaaagagcaagtttagaagaaaaaatcttgcaaaaagcacttgataaaattgatgaacctgtagggaaagagacatatcctaagtggtatttaactggtaggaatatattatctgagcaacctttaaatataatactttataggaatcaattagaagatttagctacatcgcattggttggtaacgagaaaagaacttataaatttagataagaaatagaaatttgatcttgatctcttctctagaatctgatataatatgttcgaagtattttattgataaggggttataatgaagatattttctatgtttgatggtgtaggtgggtttatagtaggccttgagaactcaagtaaagaggtctttcaaacactatattctaatcagtatgaaccatcgagaaagatacaagatgcttacgaagtaggtttatatagatttcctaatatggaacatatcgggaccgatgttgcactcattccaaatgagaagtttgaagagatgaagcaaaatggtgttgatatgattgtaggtggattcccatgtcaagattattctgtagcaagaagtaaaaagaatgaactcggtattgaaggtaaaaaaggggtccttttttgggaaataattcgtgctaccgaggttattaaaccaaaatatttagttctcgaaaatgtagatagactactaaaggctccatctagtcaacgaggaagagattttgcagttatgttagccgcgtttaatgaactaggttattctgttgaatggcgtgttattaatgctgctgattatggtcgtgcacagcgacgtcgtcgggttttcttctttgtatttagaaatgatacaaaatggggtaaacgtttacatacaacatatgaagcaaaattctctaaagatacaaatatagaagaacgattagcacagtatcaaaactatatttttaaagatggtttatttggtcgtcagttcccagtagaaggaacagctgttaaaaaacgaattcatgcgaatcagttagtaggcgatattgccgagatttccgaaactttcaatgatggtaaattttggaattctggattgatgactaatggatattactatactattgaaactaatccaattgttgagccaccgatcacaatggggaaaatcgtagttccagaagaaacagttgatgctaagtattatattactggagacaaacttgaaaagttcaaatatctcaggggacctaaaaagttaatacgtacctcagcagatggtcatgaatatacctatgcagagggagggatgagtgaatatgattccttggatttgccaggtcggacaatgcttacatcggaaggtagtgtcaatcgctcaacccatctattaaaaattgatgggaaatatcgtttgattacaccaattgaagcagagcgtttacaagattttccggatgattggacaaaattcaaactcaatgtaaagggtgaggttgaagaagtatcagatcggatgagaatgttctttatgggtaatgctttggtaacaggtatcgtaaagcgcattggcgatgagttacaaaaaatagataagatataatattaaagaggcttttatagcctcttttttgtataataaccgttgctgattgtattctatactcccctcgtatataatggtattaacagatttgtatttttcgatataatcacatgaaaggagtcattatgtctaatttcattactcctaacgaattattacctatcatggatgaggttatcatcctcgatgcaagagggtttcaagattataaacgaggtcatattaaaggcgcttttcccgtcgatatagataaggatttgaccggccctatcggtgaacatgggggacgtcatccattaccggatatggagcaattggcgaaaaccttcgagacatttggtattaatgaaaattctaaggtcgttgtctatgattcttggattttcttggctggtcgcctttggtggaccttgcgctacatggaccttaaagatgtacgcgttctatctggcggtattgaaagatgggtgaaagaaggtcatttgttgactaaggatcctacccctttgcctacagagccgacgacgttcaattatactctacaaagcgaaatgaccatgagtcgtaatgaggtattggaggcgagtaagtccggttctcatgttatcgtcgatgcccgcgcaccagaacgttatgatggttctgtagtcgatgttatggatggtatgacaggccatattccaggggctgttaatcatttttatgaaagtggttatacctcggaaggtccacggtctataaaggacttagagaatgagttctacaatgaaatctatcaacaaaaaccggtagttacctattgtggatctggcgttaccgcatgtaatgctctacttgttatgagtgaagcaggtcttaattcagctttatatgtaggtagttccagtgattgggtaacctacgatgaattcccaattcaaacgggggtcgaaacattatgagaatgttaaaccatattttatcggtcgttgcatttgcctatttatgctatcatctgtatacctacggccctggattgttcaacgtaacggtaatgattattttcctattatccgttgtggcgaattactttagatatcgtaaggaaaacgaaatgaaagccaatgaagcatcgcgacaagcacgcgctcaagctaagcatgatcgaaaacataaacatgctcgtgaaagctaactttcacaaataatattgtatataaatgccttataaggagtatcaatgaaattaatatcttggaatgtaaatggattgcgtgcagccgtaacaaaaggctttatcgattcctttaacgaattagatgcagatattttctgcttgcaagaaacaaaattacaaccccatcaaattgaattagaattaccaggttatgaacaattttggaatagcgcagtgaaaaaaggctatagtggaaccgctgtatttacacgtattaaaccgattgcagtgacaaatggtatcggcattgaagaacatgaccaagaaggccgtgtcattactgctgagtatgataatttttatctcgtttgctgctacacgccgaatagtcaacgtgaattggcgcgtttagactatcgtatgacttgggaagatgcgttccgtgcatatctattagaattggataagaagaaaccggttattctctgtggcgaccttaatgtggctcacaatgaaatcgatttgaaaaatcctaaaacaaatcgtaagaacgctggcttctccgatgaagaacgagccaagatgacagaattgttggaatctggttttaccgatacattccgctatctctatcctgatgcggttgatgaatatagctggtggtcctacatgggcaaggctcgcgatagaaacgtgggatggagaattgactactttattacatctaaacgcttggatgataagattaaagaggctaaaatccatcaacaagtatttggcagcgatcactgtccagtagaactcgatattgaattataatatgtgacatagtgaaagtataatttcatagatgtctaaattaactaacaaagcctcatctacggatgaggctttcataaggaggaacgatggcacaaaagcaaaaagctgtagtattgtttagcggtggcgtagatagcacaacatgtttggcgctcgccattgagcgatttggcaaagaaaacgtagtgcccttatccatacaatacggccaaaaacatagcaaggaattagaggcagcggccaacgtattagcatactatggcatagaaggaaaaacgatggatgtaacaaaattgtttgcatttagtaactcatccctattgaagcagtctacagaggacgtccctactggttcctacaaagaacaacaagacgaacatggggaaggacctgttagcacctatgtgccatttagaaatggtctgttcctatccgctgcggcatccttagcattatccctcgattgtggctatatctactatggcgctcatgccgatgatgcggccggcaatgcatacccagactgcactgaaaccttctacacttccatgggtgatgccatctttgaaggctccggcaaagaatgctccctcgaagcaccattcatcaatagcaacaaagccgacgtagtccgcgaaggcttacgccttggcgtgccataccaacttacctggtcctgctacgaaggcggcgaccacccatgcggccattgcggcacctgcatcgaccgccaagaagccttccgcgcaaatggtgtagaagacccgtcatattagttgagcgccgtttggcgggcggatgttaggttagcgtaaagaatgcaattgagcataaactgttatgctaaagaattgattgctttcacagagcgactttagtaggtcgaggccctatgcggaaaactcgtttattagttgagcgccgtttggcgggcggatgttaggttagcgtaaagaatgcaattgagcataaaccgttatgcagtagaattgattgctttcgcagagcgctttagtaggtcgaggccctcatccgaaaactcgtcaaattagtcgttcgccgtttgacgagcatatgttaacataacgtaaagaatgcaattgagcataaaccgttatgcaatagaattgattgctttcgcagagcgctttagtaggtcgaggccctcacccgaaaactcgtcaaattagtcgttcgccgtttgacggaccaatgttagcataacgtaaagaatgcaattgagcatataccgttatgcagtagaattgattgctttcgcagagcgactttagtaggtcgaggccctcggccgaagaccgttaagctagctggagtgggtgcgaaagcaatcaattctatcaggtaaagagtacattgccgtaattcataaagtatgctaatataattgtaccgccaaacggcgaacaactacataagacagtttgaaaccatcctgtctctaaacaaaactacggaaaacataagcacattcgagcatggtagttttgccatgctcttttttattgaaaaggaggtgagtgcatgatttctacacgaaaattaacgatttctgctatggtagtagcattgtatattgttcttatttatctaacccaaggaatttccttcggtgcgtaccaaattcgtatagctacatctttatatgcacttgcttatgcctttccgttcttaatcgttcctatgggcataggtaacctcatttctaatttcttgttcgggggccttggcatccttgatatggtagggggctttggtgttggtattttgacgactggtatcatcgtattgatgcgccgtgctggacttagcgcgtggtgggcgatgctgccaatcatcttagtacctgcattatgcgtgccattgtggcttagcccactcgtaggtgttccgtactgggcattggtgatcaatttattgattggtcaaacaatcccaggcatcgtaggtgctacattggtgaaagctctcgcgtctcgccgtacagtagccgctttgatgaacgccattaaataactacataacatataacataaaaggactgactttcacaatggaaagccagtccttttactatatgaaattgttggagaataaccttagcaattgtagccgcgaagtgttgtttcgatgacaagtcgttcgagggctaccatatatgcagctaggcgaggtgccacattgtatttttgttgcatttgccatactgcttcaaagctattttgcatatttctagtgaggcgttcatttacctcttcgagggaccagtagaagcctgctttgttttgtacccattcatagtaggatacaactacaccgccaccattagcgagcacgtcaggaatgacatcgatgcccttttcaaagaagtatttgtccgcatcattggtggttggcccattagcaccttctaagataatcttagcgcgtacattttccatattgtccttgttaagctgattttcaagggctgctagatagaggatatccacatcttgggctaacaattcttcaccggtaatggtagtcatgcctggctcggagtaaccaaccaaggaacgaccatgggaattagcatattcataagctttttcaacatcaaggccatttggattgtatagattaacagctacgtcgccgatagctacaaccttagcacccgcttctgcaatgaggcgagcaccaacggaccctacattaccgaatccttgaacggcgacagtcatgtttttaatatctaagccttttttagctaaatagcattgcaatgcgataaggcaaccgcggccggtagcttcattacggcctagggagccacctacttcgataggtttacctgtaacgatacctgggctccattcgccttttaatgtgctgtattcgtcaacaatccagctcatgatttgtgcatttgtatttacatctggagcaggaacgtcggtattaacgccgatgataggtgcaatgcgacgtacaaagttacgcgttaaccgttctaattcgcgagggttcaatgttttaggatcgaccttgatgccccctttaccaccaccataagggatattagcgatagcattttttatagtcatccaagccgctaatgcacgaacttcgttttcatcagaatctgggtgaaaacgaagaccgcccttggcactgccacgcaatgtggagtgttggcaacgatagccttcatatacgcggacttcgccattatctagttggagtggaacggatacctttagttcccgttctggatggcgtagtacttcataatcatttcttgtgtagccaagcttttcggccgctacatcaagtgtgtttaacatgttttcatagggattatagttttgcatataaaagtcctcctgataattcagaatcaatggatcgtttaaatgtcttgctatttattgtattcgacatggacgaatgaataccctacatacaatgttaactatattctatagttggatatgattgtaaatagttagagctttcacaaaaaatagggtccttattccaaagaataaagaccctaagaatcggtatatattatttttcgattgtatcttctacaggtgtagcaggtacagaggaatctgtagtttgaccttcgccccaccatacaacaccgaatgtatgattaagaacggaacggttaaatacaggtgtatcgataccggctttacgttgtttgatgtaatcatcaagcgcaagacctgcggtacgtcccatacgaacgatggagctaatgtttgttaacactaagaacgccatgaataagtcggctaagttccatacgagatcaagagaggcgatagagccgatgaatgtcattaggactacgccgatacggaataaatggagacaatattttttgtctgttaagtggctgatgttgatttcaccataatagtagttaccgataagggaactaaaggagaacattacgatgaatacagcaacagcagtaggtgcccaggaaccgagttcttgagctaggttatgttgcacaagtgctacaccagtaagacctgttgtgctatagtcgccaaccatgagaacgataaatgcagatgctgtacagataatgaatgtatcaaggaatacaccgaatgcttgaacaaggccttgttctacagggtgattaacagcggctgttgcagctgcgtttggtacagaaccttcaccggcttcgttggagaatagaccacgtttaataccgttcattacagtagcgcctaatagaccgccaccggctgcagatggttcaaatgcagatgtaacgattgtatagattacatgagggaattggctgatattggagatgactacgaataaggcagttgcaatgtaaagaacagccatgattggaacgatgatttcagatgctttggcaacgcggctgataccaccaaagatgataagaccaacaagtacggctacaacaacaccggtataggctacatcaaagttgaaaatttgaagggatgcagccaatgtgttggcttgtacagagttgtaaatccaaccataggtaatgctgattaaaatagcgaataaaacagctaggaatttgttgttaagaccgtagcggatatagtaggcaggaccaccgtagaaaccgcctttggcaacaggttccttgtaaatttgagcgagtgtactttcaataaagccagtagcagcaccgataagggcgataacccacatccagaacacggcaccaggaccgccaagtacaacggcgatagcgataccagcgatgttaccaacacctacgcgagatgcggtactaacgcagaatgcttggaatgaggatacatggttcttttctgttttagaaccagcgccagaagcgacaaggcgaaccatttccttaaacatgcggatttggacggcaccagtggtcatcgtaaagaagagaccagcaccgatgagaataaagatgatcaagtagttccacaggtaggtattgaccgtggagactgcatcattgagtagagcttccataaaactcacctttctttaataacactataaaatttgtatctattgtaccaaaaaatgaaatattcttctatagaatataacaaacacgcatacataaatacaatttatatctatgtatgcgtgtcgtatgcagtcatctaggagattctagtattatatatcctctgtactaaaggacttggcatcctccatgccttgtaataaggtttgttcagaatgttccatgtggatacgcgctagtttacgagcttgtaccgcgttatgggatgcgatggcttcgaccaagaggcgatgctcttcccacgttttgcgtaaccggcctggttggttcatggaaaagctgcggaatcggtatgtttgttcgcgcaagttgtggacgatatctgctaagcgttcattacgggaagccttgtagaggacctcatgaaatgctacgtctgcggctactacactatccatatctttgttttccatgtgatcgccgatttccacgagcatgcgctctagcgtttctatttcatcgcttgtaatgcgctctgctgcaaggccagcggctaattcttcaagggcggaacggatttcgaatacttgggtaatatcctttaacgaaatatttgccacataggtaccgcgacgtggaaccattacgacgaatccctcaagttcgagtttgcgaatagcttcgcggataggggttctgctcacaccgagttcttcggcgagaggaatttccatgaggcgctcgcccggtttaagggtgccgtcctgaatggctgagcgtaatgtttcactcactacttcgcttaatggtttataggcatctagacgtataggttgcaatcgttttgtcattgtacctcctcctgtgtgcaggtttttgtaattagtgaaagccagttatgaccagcttttttgatttcttcttgtaaggacaatgcttgagccggtttttctaataagacaaccatggtagggccactgccggtcatgatggttggatagtcacggctcgtaaagaactctttacacgtaatcagttcgtcgtgatcagggaataataattcttcaaatgtattagcgctatttgtgaaagccctatacatatcattttgttctaaatggtgtaatacattagtaattgtatctgatgtggcgttggactggccgttataacgaccataggctactgcagtagatacagaaatttcaggttttaccaataatagccaatgaggttcaggtgatggatgatagacgagttcttcgccgcgacctgtaccacgagccgtgccaccttttaataagaatggtacatcggagccgagtttagcacctaatgtcatcaactcatccatggtgaggcgcaaatcccaaaacttattgaggcctagtagcatcgctgctgcatctgcgctgccaccgccaagacctgccgccgcgggtacgcgtttcatgaggtgaatagcggcgcctgccttacatcctgtatacttttgtacttcgcgcaatgcttttaatgctaaattgcgttcatcataggggatgagatcttgaatgtattgtggtaactctggtgctacaccggagaatacaacggagtgatgtttggcaaagtagatggagtctgccaaacgaatggattgaaagatactatcgatgttgtgatagccgtcatcgcgtttgcccgtaatagcaaggccgatattgattttgctatggcctaattgttcgatactttttgacataaaatcctcgatattatatatgatttatacgaatttctatagcatttgcacatgtgattaaaagtgattgaaaataaacattaagtagtttatgatgaaactgtatatgtatgtaaatatatagtgataatgctatatattcaattaattaattatagaatatttatagtgaaatggcaatttagggaggcctatatgtggtctaaatataaagatgatatataccaatgtataatcgttgccattggctgtgctatttttggcgctggcatcgactcgtttgtgttaccacacaaattggtgagtaccggaattagtggtattggtcttatactctattacctcacaggactttctgttggcacatggaatgtgattttaaatattcctatattttgggcggcttggcactggctaggcaagcgcgtggtggtcaacacattgtacggtactgtcatgttgtcctggatggtggatgcctttgacttcttgcaatacaatatggtcatttctgatccgttgttgagttctatgatggctggtattacaacggggataggcctcggtatggtgtatcgcgttggcggtaatacaggtggccttgatccaattgcactgatagtccgaaaatactatggccttcaaatggggtctattaatagcgtcatcaacgcggctatcttagcggttgctgtgtttgtagtaggcttagaggccgtagcggttacactcgtatctttgtatgtatatacgattattactaacaaggtcgttattggctttaatcaacgaaaggtagctttcatcattacctatcgaacttatgaggtctgtgatgcggtcattagtaaggttggacgtggagcgacgattattaatggtatcggtgcgtatacgagaacaccgaaacagattgtaatggtagctgttaatttgctacaagttaataaattaaaagaagttatagaagaagtagataatgaggctttcattctcattacagatgcacaagaggttatcggtaaaggatttaccacacctgtcgtgccaacgccgatagaaaatctcgtcaaagaatgtaaggacaatgctcattatatagaacataaagattagaattaggaggttagcatggctcatgcattagcagggaaacctgttcaagaacaagatattatagatgtacagaccattgtagatgcgtattttgataatgttccagatatgacaaatcctacacaattggtttcattcggcacatctggtcatcgtggtacctccgtagatggtacatttacagaccttcatgtggcggctattacacaagccatttgtgatggtcgtaaacaatttggtgctactggtcctatattcgtaggccaagacacacatgcattatctcagccagcgcttgtgactgtgcttgaggtattagccggtaatggcgttacagctatggtagattgtgacatggatttcgtgccaacgccgtctgtgtcacgcgctattattcgatacaatgaagaacatgacgataaggcggacggtatcattattacaccgtctcacaatccgcctgataatggcggcattaaatataatacgattatcggtggtcctgctgatacggtggtgacaaaatggattgagatgcgtgccaacgggtatttgactgcctattgtgaaagcgaggactttaagcgcattagcattgataatattgaacctactgcacaagtgccatatgactataaaggcttatatgtggaagaattgggcgatgttattaatatggaggccattaaggcggccggtccaaaggtattggtggacacattaggtggtagcggtgccagctattggaatgctatcaaggaacgatatggtcttgatttaaccatcattcatgatgactatgacccgacctttagttttatgacctacgaccatgacggcaaagttcgcatggactgttcatcccctcatgtgatggcatcggttattaatcgaattggggattttgatttagccgttggtaatgatcctgattatgatcggtacggtattgttgtagccagtgggcttatatcggctaatacatttttaatgttagcagctcgctatttatttaccacacgcggatggaaagataagggtgttggtaaaactgtcgtatgtactacaatgattgataaatgggctgctagtgcagaaatccctgtgtttgaagtgcctgtgggctttaaatatttctcgcaacttttatttgatggaaccattggcataggtggtgaagagagtgcaggtgcatccttcttgaaaaaggatggcagagtatggactacggataaagatggcatgattatggctttgctcggtatggaaatcatggctgttatgggcaaatctgcgctaaaaatagctggcgaatctgttgagaaattcggcaatccaaaatttggccgtattgatgcaccatgtaaaaaagagcaaaaacaaattctaaaacaaatgagtgctgaactaattactgctactagtgttgatggagatccaattactaatattcgtaccacatcactgtataatgatatgccaatcgatggtgtacgcgtagaaactgataaagggtggttcgtagctagaccatctggtacagaagatttatacaaaatttatggtgaaagttacaaaggcaatttaggtcttgtggcactactcactgcaggtgaggaaattgtcaatgctgcattaaatggcactatagagactgaatgagcattctcataaagttttcacgctcttaatatgatatatgtgatataatatattaatatagtttatagaatgaatgaattttcatttacatagtttgtagtgagtcagaaaaggtgattgtatgaaattagtagttaccgtagttggtgtcgaccgtgtaggtatcattgctggtgtcagcagtattttggcagaccataaagtaaatatcttatctattaaccaaacgattctagatggtttgtttaatatgattatgatgtgtgaaaccgaaactaacgacgtaaaagatttaacatctattcaagatgctttatccgaactaggtaatacattaggcgtagaaattcgtgcgcaacatgctgatattttccttagcatgcaccgcgtaggataaggaggcgcacatgttatctattgacaatattcttgaaacgaatcagatgattcatgataacaagctcgatgtgcgtaccattacaatgggcattagcttgttagaatgtgcatctagctctggtaaagaactctgcaatcgcatttatgaccgtattaccaaagaagctgaacatttggttaaaaccggtgaggacattgagcgtgaatttggtgtgcctatcatcaataaacgtatttctgtaacaccgatttccttagtggctggtggcagtgatttgacatcttatgtaccaattgcagaagcgcttgaccgcgcagccaaaactgtgggtgttaattttatcggtggtttttctgcactcgttacaaaaggtgagactaaagctgaccgtattcttatcgattctattcctgaagcgttagccacaacagacatcgtttgtagttctgttggtgttggttccactaaaacaggtatcaacatggatgcagttcgtgatatgggtattatcgttaaaaagacggctgaccttactaaagataatgatgcacttggttgtgctaagctcgttattttctgtaatcctgtagaagataatccatttatggcaggtgctttcttcggtgtaaccgaaggtgatagcgctatttccgtaggtgtatctggcccaggtgttgtaaaacatgctcttgaagcagtgcgtggtgaaccttttgacgttgtggccgaaactattaaacgtacggcgttcaaaattacacgtgttggtcaattggtagcacaagaggcatctcgtcgccttggtaaaccatttggtatcatcgacttgtccttggcaccaacgcctgcagtaggtgactccgtagctcatgtacttgaagaaatgggcttatcttcttgtggttgtcatggcactacagcagcattagcattgttaaacgatgcggtgaaaaaaggtggtcttatggcatcctctcacgtaggcggtttaagtggtgctttcattccggtttctgaagatgcaggcatgattgatgctgtatcttgcggtagtctatcccttgataaattagaagctatgacttgtgtatgttccgtaggtctcgatatgattgctattcctggcgacacatcagcagatacaatctctgctattatcgccgacgaatctgctatcggcatgattaataataaaacaacagcagtccgcgttatcccagttcctggtaaaacagttggtgaagttgttgaatttggcggccttcttggctatgctccaattattgaagtaagtccatacagcgcagctgagtttattgctcgtggcggtcgtattccagcacctattcgcagcttaacaaactaagttgaaacctcgaatctgttgaattcgagttgttggaggtgtacttatgagtgagtatgtgcctgattatgtgtgggcctttgtgttggctctcgtcataacctttgcactaacccccttggttaagcgatttgctgttgccgtaggggccattgataaacctgatgctcgtaaagtgcatcatggtgctattccccgtcttggtggattggctattttccttggttatatgggatctgtgttatttaacaatagtattcctcatgaccataaattattcggcttcgtattggggactgttattctagtacttgttggtatttgggacgatattcgacaaattgagccgaagacgaaattgatggggcaaattattgctgctgccattcttgtggcctatgatattcgcgtagactttatcaacctcccttggggtggtgtagtttatttaaagtattgggccattccgttgaccatattctggattgtaggatttaccaatattgtcaatctaatcgatgggcttgatggcttggcagcagggatttcctttatcgcttgtattgccgtatgtgcgatgacattacaattaggtcaaattgatttagcttgtatcgcattggctcttgcaggtgctacggtcggtttcttgcggtacaattttaatcccgccaagatattcatgggggataccggttcgatgctccttggctataccttagcagctatatctgttatgggtgccgttaagacggcagctaccattgctttagtggtaccagctatcgttcttggtttacctatattagatacattgtttgctatcgtacgccgtaagattagtggacgacctatctttaaaccagataaaggtcatgtacaccatcgtttattggcacaaggcttatctcaaaaacaagcagtattgatgatgtatgccgttaccgctctcttcggtggtgtttcggttatcgttgcagaggttaatgcttggattggttgcgtactagtcttagccattttcctatgtagtatctatgtggctcgtcgcttgggtgttattacacatagtgatgcggcgggacatcccttaccacgccctacaattgaacgtagcgatttagatgaaactatttcgtttgatcgcaaagaattggcaaaagcattagagcattcagatgatgactctaaaaaagagtaaccaatgtaggggcgcaatgcgccccttttttattagactctgtggaggatgagtaaatgttgaaagtaatgactatctttggtacaagaccagaggcaatcaaaatggctccgctagtaaaagccttagaagcggcaccagatatggagccaattgtaactgtaacagcacaacatagagatatgctcgaccaagtgttgcgcctgtttgacattacgcctgattatgatttgaatatcatgagccaaggtcaaacgttgtacgatgtgacaaatcgtgcattgatgggattaaaatccgttttagaagaagcaaaacctgatgtagtactcgttcatggtgatacgacaacaacctttgcaggtgcgttggcatccttttaccaagaaatcccagtaggtcatgtggaggcaggccttcgtacaggcgatatttactctccattcccagaagagatgaaccgcaaattaacaggttccttggcaacatatcattttgcacctaccgctagttctgaagcgaatttaaaacgagaaaatattaatactgatcacctttatgttactggtaatactgtaattgatgcactagatacaacggtaaaagataattatgtctttgatgatgcggctattaatgcactggatccaaataagcgtacagttcttgttaccacacatcgtcgtgaaaaccttggtgaacctatgcgccatgtatatcaagccattcgtgatttattgaatgattttgatgatattcaagtggtattcccagtgcataaaaatcctaaagttcgtcaagtagttcgagaggaactaggggatgttgaccgtgttacacttatcgatcctcttgattatgagccatttgcaaacttgatggctaagtcctatttaattcttacagattctggcggaattcaagaagaggcccctgctctcggtaaaccagttctcgtattgcgtgatactacagaacgcccagaagctgttgatgctggtacagtacgccttgtaggtactgataaagaggcggtatataaagctgctcatgagctattacatgatgcagcagcgtataagacgatgtcaaattccgttaacccttatggtgatggcaaagcatctgaacgtattttacaagcgttgcgtcacgagttcttaggcgatgctaatcgaccagaacgatttggtaaataatatggataaggatatggtgaaagctctggcgatggctacatcggcagggctgacccttctattttgtatcggtggatttatctggataggatataaactggatacatggatggatactatgccactatgcatggttattctaggcttagtcggtgccgtaacaggcttttatatgttatataaacagatacaataatatcataaagccggtaaatatacgtatttaccggctttatttatttacagattgttttaaattttttaaaatcaactctgttgctcaaccgttgctcaaccgttgctcaacttttggcgaaagttaaagacacataatcctcgcctaaaaggctatccttatcgggtagtttgtttactgccgccactaattcagacacgtctttatgaatgtatacttgatttgttacatccgaatgtcgatgacctaatatagtttttgtcgtagcttcagatataccaatatgaattaatagagtagcgcatgtatgccttccgtcgtgcgggaggtgcccagggaaatgtttgtttaagtaggtgcgaatggctactaataaatgcttaggagtatcttttggaagtaaatattcgtgtcgttggaagctactcaacttataccattctttaataaaaggcagaatcgtttctgcaattggtatgatacgatttttacctgctgcagttttactgccgccaatcatatacctatctttgatatagacatcttttagtttaatgctttggatttcacctggccgcattcctgagtatatgtacaccaataatatgcgagcgtcccgatctgcttttgccagttcccataaacgagatatctcaacaggtgtaaaaggcttatggatttcagactttaccttttggggaagcgttacaagcgcagcatagttcttatcaacgatatcattttttatggcagcgtcaaaagttgctttcatagcagttttaatttgtactaaagttgtatggcttttatctgcatacctgtcaatgacgtcttgcatatgtgcaagtcttatgtccttgataggtatttttagtagatgctcaaccttctttttattgtaaagatagccgcctttttctaaaataacccctttacggatcttatcttcaatcatccattcccaacattggccaaaggtcgtatccttggcctcgtattgcggggcgttagcgtcataagttgataatgcattatacgcttctttttgcgatgcaaaggtgcctatggatttccgtaagggtttaccctcagaattatatccgagagtcaccacggctcgatatggcttacgtagggccttgtgtttcatcttatatacggtgccagtaccgttggcgcgtttcatggccataatttcatatccttcctatagctctaagcccctatctgagtagtatcggataggggcttactgttattaatcatttgtcttattgactaatttattttctttgtccataatttctgctaatttatcagcgttaataggtatttcaattttatcgccatttccattaataaatttaatagtatacggcgggttcataattatttgtttaggtattgcatagtagacaagggcatagctatgcggcatcatatcataaattttggtatccatcgctactgggattatatactgattgtccttttctataagtaatcgttgtgatggtagttgaggcattaccgtgcccgctaatggatttttaagatgaagtgcatatgtagctatgtatacataatcattactgtttagtatggctttcttaaaagattcgtctggaaaaatcagacgatcgtctttggaatatgatacatatttagtgattgtagctggggtaattaataccgcagcgccaccagctccactccgaagttcaactccataattaattgggctttcaagtttacgatcagttttataattttgcccggtgctccagattttatcatacgtttctggggttacatcaataaattgtgcaaatgaagaactagcaactgttgcaaataatgccgcgatagataaaattttatagaatttcattgtttatctcccttattaatctcccatattaatctcttacaaagtcacattgtacataacgaccttaccgatcaggtataaatcatctgtattctcgtaactaaatatgatgtcccgaaatgccatatccgagctatcaggtttaaatacaaattctttatgctgtttgtcattgtagaatcttttaactgtatagtcccctccattcttaataactacaatatctccgtcatggatatctggtagttctatatttgttaagatggcaataacggatccattttggataacattattcatactttcaccgttgacagtcataagtaatatatttttattgcctgcgtaacgacccatcatgaaatcagggatagatatagtaggcatgaagttaatggcgtctatcgtggttaacgcgcccgctgatacagatgcaggtacgtagtgataggaattcgtgttcactgttaacttttcttcagcatctaaattgtcctttagcaggtccatgatactgacatgtagtatatctgccagttcatataatttacctactggtggctcggccattcctgtttcccatttctgaatagtagtaaatgatttatacccgagccgtttagcaatctcatcctgtgataagtttcttaatttcctaaagtacctaatattatctgaaagtttcataatatcctcctctcgatctcccaaacttatatactaattatataatgcatttgaattaaattcaattatattttatattttttatcgtaaacttgaaaaaaaatcaaattcgttattgacacttgaatttaattcatgttattatgaggtcacgataaggaggtggtagtaatgccaaacaaattttatatttccgagttgagggctcggaaaggggcaacacaggcacaagttgccgccgatcttggcatatctgttgccacgtataatgcgtgggaaaaggatatatccaatgtggccattagtaaagtagtggcattggcggagtacttcggctgtacggttgaccaaatttttttgactagaaacttgaattaaaatcaagtaaaaggagggacagtgcgcatgattagaaaagtaatttcggtcgctcaaatgtcgaccgtgctcggcgttagcctaacagctatccgagagggaatcgcaagagaccgatttccgtttgcatatgcctggcagtcgccaggtaagaaatcccgtagctttgttattgacaaagaggggtttagaacattccttgtcaattcgctaggctgggatgtgaaagtagttgatgcggagtttaaatccgcaggaattcattaggaggaactaatcatgaaatggagtaatacatcctaccattacacagtatccgtaattaaaggaatcgtaggtggatttcagtatagcctagacagaaaatgtaatacaaaatgatgggcgctgatggagcttgaagagttaggtacatcgaattggggattttctaacttaaaaacgcgattaattgacaacgccatccggaaggccatcaaacatgttaaaagtactgacatgtcaaactgtcaggtatcaacactatgccattctggattcaggcacgttcctggttattttaaaggtttaaaggagatgtaaatcatgacatggattgacgcaggaatgcatttaagctttgctactgctgcagtagcatctattttatcaatgatgatgttataggagaaacataattatgaaagctatcccagtaaatgaaacagcaatggctgcacatctaaaagcaatcgaatctaatcgtattttaaatcacatcaatagcaatattatggatgcagcatatgagttgcaagattttatgtgtgattatgatgagtcggaaatccgtattatcgtcactacagatggcattacggctgaacgaatctaggaggatgaataatgagttatatgttgtttggggcatttttggtcgtaggttctatgggagccttagaagttgaccatatcggatgggaacagtttttactacaatcgttcattggcttcgccctatcactttttggcttttacaaagataaagccgaaatggatgccgaggaacgtgaaggcgttgcgtataccactaaagtaagaaaatgcggcgaatactgccgtaatccatatcacaactaaaggcatataaggaggtgattaaattgcgagactgtagcaaatgtccaaaacgagactactgcattcctgatgaatgcgaggatttgggcataaaaaatgagcctgatgatgctgcaacatcaacaagctcaaattagaaaaatattattctacgttgattatatcacagaaaggacaacttatggaattcctattagttacttacgataccagtgattattactggcaaaataacacacctattcataacccagatgaattttggtttagatattacgaatccgatacaaatgttccaatcgataacattggtgttggtgattgggttgttgttaaatcaagaaacggcttaggtcttgctcgtgttttgaaaaaagcaaaagacctcgataccgttcggatgcaaggttttaaagggatcattgttaagcaggttatcgctgttgttgatacttctaaatgtgataaacgcgaaagtgatcgagctaagctggaggacatcgaaaataaactcgagcaaaaggctaagaacgctgagcgtttgaccatgtatcggttgcttgcaaaagataatccagaattctcggcattacttactgagtatgaatctgtgaaggcgtctgtcgatgaattataacgctttcatcaactccaagtctaaaatgtcagaatctcatggatttgttattgacgcaggtatgttaaacaaacatttatttgacttccaacgagatatcgttaaatgggccttggcaaaaggtaaagctgccatattcgcagattgcggattgggtaaaactttaatgcagctgtcctgggcgtatgagatttatctacatacaggtggatccgtacttattttagcaccactagctgtggccgctcaaacacagtccgaaggtgaacgtttcgatattcctgtgactatatgcgaatctgatgatgacattgtgccaggcgttaatattacgaattatgagaaattgggacgattcaataccgataatttgataggtgtcgtgcttgatgaatcgagtatcctaaagtcatttactggtaaagtacgtacggatttaataaatcgattcagtaatacaccatatcggttggcatgtacggcaacacctgcaccgaatgactatatggagcttggcaatcatgcggagttccttggtattatgagccgtaatgagatgttatctatgtatttcacgcacgatggtagcgataccgctaaatggcgattaaaaggtcacgcagaaaagaccttttgggaatggatggcattatgggcagtcgtgctagataacccggcagccctgggatatgaagatgatggctatgaattgcctgagttacacgtacatgaaatcgtagttgataaaactggcgaagatgtccctactttatcattattggaacgccgcagagcacgcaaagcatctcttgaatcaagatgtcgagcggccgctgatttagtcaatgcatctaatgagcaatggctagtgtggtgcgaccttaacgatgaatcgactactctgaaagaaatgattgatctcgcagaggacgtcaaaggtagtgataaggcgactcgaaaacagggcatgatgttaggttttggttctggcttcctaaaatgtttggtgacaaaaccaagtatcgccggattcggaatgaactggcaaaactgccacaatatgatatttgttgggctatccgatagttatgaacagtattatcaagcgcttcgccgatgctggcgatttggccagaagcatgaggtgaacgcctatatcgtaatttccgaaaaggaaggcgcggttaaagcgaacatcgaacgtaaggaagcggatgctataaaaatgagggacgctatgattgcgctaacccgtgacgctgttcgtactgaattatctaaaactagacgggaatcaacggaatacaatccgtgtgtgccgatggtgttacctaactgggcagaaatgagggctgttatatgactaaaatttacgttagccatccattcggaggattggctaaaaacaaaaagaatgctgactctgtattaaagtggctgcaggacgatatgggcgtatttccgataaaggaaccttttggcactgatacgcataatatattcctatcacctatacatatgtttgggcatttatataacaaggttgattatgataccggcataggctggtgtattgaccttctaagtggttgtgatgcaatcataatgtgcaacggctgggagaactcaaccgggtgcaatttggagctagcttatgctaaggctcataacataagagtcatccacatcaatgaattaaaagcagccagattaactagattatctgttgatgcaggtatggataaagctatagctgccctagctggatttgcaatgctgcaaacgctaaataagaaagcaaaggaggacctacaacgtgaacgtgctaaatcagttaattgagtcccgatttgcaatttataacggcgactcagtagaagtgctgaaagggctgcctgatgatagcgttcattactccatatttagccctccatttagtagcttgtatgtttactcaaattccgatagggatatgggaaactcatctactgatagtgagttttggcagcacttcaagtacttgatcgcagaactataccgcgtaataatgcctgggcgattagtatcagtccattgtatggatttacctctcacgaaatctagggacggtgttatcggaatgaaagattttcccggtgatattattcgagcctttcaggatgctggattcgtgatgcattcccgggtcacgatttggaaagatcctcttgttgaggctactcggacaaaggcgctagggcttttacacaagcagattgtaaaagattctgccatgtgtagaatgggggcacctgattacatcgtgacattgcgtaagcctggtgacaatccggagcccatcgcgcatccggaaggatttactcagttttttggtcaagaggaacctgagggcatcaaaggagttgaaagacctgcgcccgatccagagttgtttgataaaaagcagaaatataatacggagcctatgtatagtcatcaagtatggcgccgatatgctaatcctgtatgggccgacatccgccaaacacatacgctgaattataaagcagctcgtgacaataaggatgaacgtcatatttgcccgctgcagctagatactgtggcacgttgtatagaattgtggagtaatccaaatgatatcgtacttgatccgtttgccggtatcggtactgtaccagttatggcacttcgtatggggcgtagggctttaggttttgaattaaaagaatcgtattacaaccaatcaattattaatattcaggaggatttaaacaatgattaaagttgaagttcaaggagttaatgtactagatgtatataatcagctaaaagctgcgttaaatcaattcaaaagttttgtagataacgacagagcaatggatgataaagcccctggcatagtagatacagtggtatctacagtagcaacaccgtccgtgtgcgtatctaatcttacaccacaagatacaaatcaaggtgtacctactacaacagtagctgtgcaaccaaactccatatccatgacggcacctaatgcagctgtacaagttactcctactcaagtagctattacagcaccaactgtcaacgtggcaactgatgcccaagtacaaacagttaccgcacctgtgcaaacacctgttactgctccagtatctcaggaagttaagaaatatacattgcctgaaattcaagcggcgcttgcaccattacttgacgctggaaaagctgtagaattgcaacaattaatggcacaattcggtgttcaatatttgggtgaagtacctgaggacagataccccgaattagtaaatgcgattagaggattgggggcaagaatctaatggcatctcgatcacatgcattattaaacgcatcggggtcacaccggtggctgcattgtacagccgcccctcttctagaggagaactttcccgatagtacatctgtgtatgcaaaggaaggaaccctggcacacgaactgtgtgagttaaaactacagaagtataccacggccatggcgaaatccacatacactcgcaagttcaacaaaatcaaaaaagatgaattgtggcaaccagaaatggacgatacctcggaaacatacctcgaatatgtcaaaggcgttatgttaggctgtacggcaactcctgtagtggccattgaaaaacgcgttgattttagccgttatgtacccgatggattcggcacagctgactgtattatcctatccggtgacaccttgcatatcgttgattataagcacggaaaaggggtagtcgttgatgcggaacacaatccgcaaatgatgttatatgctcttggcgcgattgatgcgtatagattactctatatgtttaatacggtcaaaatgactatcgtgcagcctcgtgttaataatatcagcgaatgggaaatccctacgctagaactactggaatggggtaatacatttgtcaaatctcgtgcagatgaggctatgtccggcaatggtaaatttgaacccggcgactggtgcagattctgcagagcgaaacaacagtgcaaagcccgatatgaggcaaacgactcattgcacagtgcgctagttgctaatcatgatcctcggcttatctcgatgacagaactcggtgaataccttcgtcgagggaaagacgtcgctgcttggcttgaagatatgaaagactacgcgctcggtgaatctcttaatggagtgacagtcccgggctggaaagccgtagagggtcgtggtagtcgagctttccaagacaccgatgctgctatagatactttaatcaaagctggcatcgatgaaagcattctgtatgaacgtaagacattaacattggcacagatggaaaagaccatcggtaaaacccaatttaatgatatggtaggcgacatgatagttaagaaagcaggcaagcctaccctagttgaggaatccgataagcgccctcggattaccaatcaacctactgcggcgcaaatatttaatgtatctaatgataataatggaggtaattaattatgtcattcgttccacaaccaactgaagtattattgcaaaatgttcgtgtatcctactgccatctattagaaccttgggctaattccacacagcctggtgctaaacctagatattcagctactattcttttacctaaaactgatgtagctcaacaccaagctctcatgaatgctatcgaagctgctatccaagcagcacgtactaaatttggcgcacgtgttccagcacagcctaaagtaccaattcatgacggtgatggctacacacaatccggtaaggagtttggtcctgaatgtaaaggtcattgggtatttacggcagcgcaagacgctagctataaagttgaagtagtagatcttcaaggtaatcctctcacaaatcctacacaagtatactccggcatgtatgtcaatgtactcgttcgattcttcttctactccaatcaatccactggtatcggatgtggtttaggtcctgttcaaaaagtacgcgatggtgaagcattgggcagcatgcctgttgcagcatcctctgtatttggtgcacctcaaggtagtgcagcaaatgtatatactggtgctccagtagcaggtcaacctgcgcaacaacaagcacctcaacaaggttatgtacaaccggcatatgctacgacacctcagcaatctgtacaacaagctcctgtagggattaaccctgtaactggtcaaccttactaataggtgcctgatatgaggcatctaagtattgatatagaaacatattcatcgactgatatctcattcggagtgtacaaatatactgaatcgcctgatttcgacatattactatttgcgtattcctacgactttggacctgttgaagtcgtagacttagcgcagggaggggtaattccttactatgtaattcgtgatttattgaacccagatgtaatcaagcacgcttacaatgcacaatttgaaattacgtgtctaaatcgtgcaggtttactcacatctgttgatcagtggcagtgcacgatgattcacggtgcctacttaggataccctatgggcctagccttactcggcaaggccctggggttacctcaggataagaaaaaggacacatcaggcaaagcacttatcaagtacttttgtacaccatgcaagcctactaaacgtaatgggggccgtacccgtaatctacctagacacgatatggataaatggaatgcttttatcgagtacaaccgccaggacgttgtgactgagatggaatgttatcacagattagcctctttccctgtacctgatgatacgtggaaagattggtatcttgatatccaaatcaatagtagaggtgtacgcattgaccatgaattggttgagggtgccttatacattgatgaggaaaatcgagaaatgttgatgaatgaggcttaccaaatcacgggacttagtaaccctaacagccggaatcaattacttgattggttaaacaataatactaatgtcagtcttgagaagttaactaaggacactgtggccgatgctctgacggatgctgatgatattgccgcaaaagtacttatgattcggaagaaactcgcgaagtcatcggtatctaaatacaccatgatggatggtgctatgggcgctgatcttcgtctcagaggaacgttacagttctatggggctaaccgtactggacgctgggcgggtcgtcttattcaggtgcaaaacctaccgagaaattacatcgagaatctcgatacggctcggcatctcgttaagaccaaaaaccgtcaagggttagaacttctatacggtgatgtatcggatacgctatctcaattaattcgtacctcaattatcgccgaaaaggacaatacattatgtgtggccgacttttcagccatagaggctcgagtcattgcatggttatcgggagaacattggcgccaacgtgtattcgctgagggaggagacatatactgtgcttccgcatcatcgatgtttggtgttcccgttgttaaacatggcgagaatgggcatcttagacagaaaggtaaagtcgctgaattggcactcggctatcaaggcggagtgaatgcattaaaagccatgggagctcttgatatgggactccatgaggaggaattacctgaaatcgtaaacttgtggcgtaatgcgtcgcctagaatacgagatttatggtatgccgttgagaatgcggccgtgtacaccgttactaccgggaatcctataggccttgaccacggcattatgttccgtttggaaattgatccaatatacggttaccgttatatgacgattgaactacctagcggacgtaagctattttatcctaacccaagcattaagcaaaatgcattcggtaaggatgctgtacattttaagactaaagtaaatgctgcatgggttactgaaagcacttatggaggcaaattagtcgaaaacatcacacaagcagtcgctcgagattgcttagcattgacgctgcgccgattggaggatgtaggatatcaaattatcatgcacatccatgacgaagctgtacttgaaatcaataagcataacgcagaatcaatactggatgatgttaatgctatattctcaatcgccataccttgggcagacgggctgctattatcatccgcaggatttactaacgactattatatgaaagattaggaggggttacacttgcaaaacgataaactgattaccatcagtatcggtgcgagtcgcacatcaaagcaatggacccgtacagagatgttgtggtccgagttttgtgaacgcctcaaaatccccgttcgtacaacagaaaccgtggacgaataccacagattaccaaaatctgagaaaagcaagctaaaggacataggcggctttgttggtggtactttaaacggtctacaacgtaaagctattaacgtgtctggacgtgacctgattactcttgatatggatgccatatcgcctggggaaactgagaacgtcgctagcacgattgacagtctaggcatggcttatgtcatctactcaacccgttctcatacggtgcatcgtccacggttacgtgttatcgtccctactgatagaacgatgacacctgatgagtatgagcctattgctcgtaagctggcagagctcatcggcattggtatgatggatggaactacgttcgaagcttctcggctcatgtattggccatcatgcccgaacgatgcacagtatgtatattacgtaggcgataaggcattcttatctgctgacggtatgctcggccaatacactgattggcgagatgtgcgttcttggccacaagtaccaggtaaggaagcatcgcagcatgaaaagcagctacttgcaaagcaagctgatccgagagaaaaaccaggtatcgtaggtgccttttgtcgaatatatggtatccgtgaggcgattgataaattcatacctcatgcatatgtcgatgttgacggcagcgaggaccgcttaacgttcgttactggctcaacggtagccggggcggttatctatgatgacgatacattcctgttcagtcaccataatactgacccgtgtagtggtcaattagttaatgcctttgaccttatccggctacataagttccacagcttagacgagactgctaaggatgggacacctgggcataagctgccatcttacatggctatgtctaaactagctatgcaagatacagtagtcgttaatgaactcaacatggcccgtgcccgagaatcggcatcaaatgtatttgctgatattatcacgaatgtatcggctcacgctgagacatccgaccttgaccctaatgcgttaacgaacgtcgactggatgaaaagttcgactttaaagtacgacgagaatggtcgacctaagaacacattagataacatgcttaaaatcatgcaccatgatccggcgcttgtcggtagacttgcctatgatagatttggttcgagatacgtggcaaaaggggccctaccatggaacccaacaccaggacttcgcatatggacagacgcagatgatgcgggcttacggtggtacctagaaaataaatatgatattaccggcaaagataaaatcatggatgccctcatcatgtgtgctgaacaaaatggatttaatgaagtactagattaccttaacgggttatcctgggatggcattgcccgattagataccatattcatcgactacttaggggctgaggataatgtgtatactcgtgcagccgctagaaagtcatttacggcggcagtagcgcgagcgtttgagcccggatgcaagtatgatacgatgccaattcttatcggcggtcagggtatcggtaaaagtacccttatccgcacgatgggtaagaagtggtatgctgatggcttaaatacctttgaaggtaaagaagctgcagaaggtattcaaggtaaatggatcatagaagccggtgaaatggctgggtattcgagggctgaagaaaatgcatctaagcaatttctaagtcgtcaagtagatgtatttcgtcaagcctatggccgacgtacgcaagagtatccacggcagtgtgtgttctttggtagcacgaatcaatatgagttcctaaaagatattacaggcaatcgccgattttggcctattgatcttgaaatgacgactccgcgaaagaacatatttgttaatcttccgggagaagttgaccagttatgggcggaggccttgtatcgttataaaagcggggaaagcctcattatcgaggatgacccgaacgtactaaaactggctgatgcggctagagatgcgcatatggaatcaaacaccaaagcaggactgattaatgagtttttattaattaaggtacctttaaattggaatgtgatgagtcggagcgccaggaggacgtatcttagcatgaatgctaaacctgccgagggtcaagagttagtatatcgtgatcgtatttgtgcggcagaggtatggtgggaatgtttcggtaacgacccaagtcgcatgaagaaaatcgagaccagggaaattaatcaaatactggcggactccccatatacattgggcggaagtcagttaatgagatttggtgaatatggacatcaaagagggttcagaatcaacgagtcaaaactgaaattatagcgttaacattctcaattaagcgttaacattctcagtatttttgttaacattagaatgttaacgaattcggagaatgttaacgtaccatgttaacgcataaagtcagtatttatctatattcatatatgtttgttagcaatgttaacattatatactggtaaatatcaaaacaaagagttttaagaaaaaatacgccctttacagccttaatttgaaccctcatatacgcgtatgtaaacatgttaacgtttaaaaatttcagaggtgagaaatgttagaaaaggatatcgagagaaaattagttgcaggcgtcaaacacgcgggaggtaaagcttataagtttgtatcccctggtaatatcggtgtgcctgatcgaatcgtcatatggccgaatggcgttattcatttcgtagaattgaagacatccaaaggcgtactttcacgattgcagggagtccaagcccgcgaactacaaaagttaaatcaaaaagtatttgtgttaaaaggtgcagatgctgtggctggttatctggatcaattcacagaagaattcggggtgaaagcgtaatgcagtttattccacatgcgtatcaacgatattgtatcgacaagaccgttaatcaaaataagatagggttatttctggatatgggtttagggaaaactattatcacgttatccgctatatacgaattgaagtactcccgattcgccattcgtaaagtgctaatcatagcgcctaagaaagtggcggaggctacatggcaacgcgaagcacgaaaatgggatggcgtaggtatattaaggatatctactgtattaggtagtctgacaaagcgcattaaggcgttaaacacacctgccgacatctacatcatcaatcgtgagaatgtaacgtggctagttgattactataagaatgcgtggccatttgacatggtagttgtggatgaatctagttcttttaaaaaccacacagctaagcgttttaagtcattagcctatatgcataaccacatcaagcgcatggtgttgttaacaggtacaccagcccctaacggattaatcgacctatgggcgcaagtgtatttattagaccgtggtgagtcgttaggaaaaacgtacacaggatttagagattactatttcgagccagatcagaggtcacgcgaaatggtgtattcctataagcctaaatccgattcgaatgacagtatcatggcggcaatatctgggctgtgtatatccatgaaagccgatgactatttagagttaccaccagtcatcaacgatattaaatatgtgcagttagattcgaaagccaaaaaggcctatgaagatatggaacgtacatctgtattagaattgattgaagctggcgaagatatcactgctttgagcgcagcagcattatctaccaagctacaacagttagcgaacggagctgtatatgatggcgataggaacgttcacgagatacatggctgtaagattgaggcttttatggaacttgtagaacagttaaacggtaagcccgcattagtgttttacaacttcaagcatgactgtgaacgactaaaagcagcattagctaagactaaattacgagtctgtgagttaaaaggtgccgatgatgagatagcgtggaatgctggagagattgatattctattagcacatccggcaagtacggcatacgggcttaacttacaggacggcgggaaccacgtaatatggttcgggttaaactggagtcttgaactatatcaacaagctaataagcggctacatcgccaaggtcaaatggagaaggtaattatccatcatttaatatgtgaaggaactcgtgatgaggatatgatggacgcactagcccaaaaagaccgggcacaggaatatgtgctgcaaagcttaaaggcgagaattgataaatacagaaaggatgattaacatggatcaatttataatggcgggattattcggagctattgtaataatagtgtgttacacgactattcaaattatagatatcgttgataaacgaaaatacaagactgtatacgggttaaccccaggtagattgtatgagcgaccaaataatcccccgccacctactaggatatcagctagtgaagagctaagtcgttacatagcgaatgaagagttgagacgttttggagaagcaacgaatcgatttggtataaatatgggaagaaatatactagatagacctcatagaccttccagacctcctgaacctcctagacacatagataagcaatgtgatgatatcaaccatcctagtcactatacacaaggcgatatcgaggttatcgattacatcgaagacaagaaactaggatatcgattaggtaatgttgtgaagtatgtatcccgagctggtcataaggacgatgctattaaggatttgaaaaaagcccgttggtatctaaatcgggaaattgcaaagagggaagaacatgacaaaagtcgagcgactactaattaacaaagggcactatctagatgacacgtatcatcttgtcatggatatagttaaagttgtagataatctcaaagataatgttgccgagagattagatgacgacctaagtgatgatgcatacgccatgtgtgatgagatgttcactgctgtcgagcaatgcaaagcagatatggtagaagccatcgaggatattgtcgaacgtatggaggtaaaggatgcaaaagcgtaggagtagggcagatgtgattgtaggtgccatacagtcagatttaagtcttgccatcgtacgagcccgtaatagacaactgagatcacctatgctagatgatagaattcgtgaaagcggatacattgacggattactacgagcacagatgattatcagtaaatatggggactatcgcatatgatggatatagaagaactacaagctgtccgccatactgagcagcgaatgcgtgcgttagagattcagctagctgcgattaaccgagatttacattcagaagctatacagatatgtgaatcgggagatgatatgccacgaatcagtaagcacttacaagaatgtagggaggagctgaacagagaatgggatgaattgattgattctcgaaacaaggtcaagcatgtcatcaaccagataactgacggacaatacagagatgtactgaatctcagatacatcaatgcattgccatgggagcagatagctgtcgaactagggtattcgtggcgacaagttcacagacttcacaagaaagcaatagctgaatttgaaaagatggcatagaatggcacactcttaatttaatataatgtaaatgtagtagatagcaggcagtgtctggcccgcacaatatgtctgcctgctgcactgccccggggtagaccttacttagttgaggtctaccctttttcttgttgagtatcaatgataatacctaattgagaaaataaaaatttggaaaaggtactccgcgggcgaaaaatggccgctggtcgcccccgcgcgatggtcctctctctgtgagaaaaattttcctgttgaatgtagaaagacgaatttagaaaggagtacacctatggcggacgcaaaaccgagagtgaaatttgatgctgcaggcaatctgctcgtatccagcactcaactatgtgacctcttgcgggtcactccggaaattatttctcgacatcataaagcagggatgcctaaagcctctgtaggttggtggaatctccgggaagtcctcgtgtatttaggacaggcgaaaggcgataacactaaaagcaaatccgcatcaactcgtaagctagaagccgaagctgattataaggaagcaaaggctgcgcgtgaaaagaaaatgctagatgtgctaaatggcgaatatgtccctcgtgccgatgtggcacaggcatgggctaaccgaatattggaattaaagacatcgtttaccaaattaggtaagcgtatcggaagtgagttcacggatcctgaggaacgtgctcttgtagaaaaggtggtgaatggccttgtcgaagaatacctcgaaagctacgcacgcgaaggcgagtacacgccgaaagtcaaagccacgggaaaagcaaagaccaaaggttgactggttccctgaggaactggaagcatttaagccacctgaaagatacaccgtttcggaatgggcggataagtacagggtactgactaatatatctgctgaacctggacgatggcgtacagcgcggacaccttatctcaaggaacttatggacaaattcacggaccctcttattgaaagcatctcgttatgtttcggggcgcagataggtaagacggaagccgaactcaatatgatcggatatgcgttacatcaaaccgcatcaccagtcatgatggtgtatccaacagacactatcgcgaaattcgctagtgataaacgtgtacaaccgatgattaggagtgtagagccgcttgcgaatatgtatgacgaaggcagtaaactgctggagctagacttcgttaatgggaactacatggtacttgtcggggcgaactcaccaagcagcttatcaagtcggtcaattaagtacttattcttcgatgaaattgataagtatccagctttttctggtaaggaagcaaatccgattaagttggctgaggaacgtactaagacattcgttgataagaagattgtaaaggtgtcaactcctacgattgaaagtggcaatatttggcagtcctatatggacgcaaatgaacgtaagcagtattacgtgccatgtccgcattgcggggtgtcgcagaccctcaaattcaaacagataaaatggccggaggaacaccatggcaatgcggatatgatacgtgataccgcatattatgagtgcgaacattgtaagcaccgtattgatgataagcacaagatggatatgctccggcaaggcgaatggcggactgtgaatgaatcgcaagtccgagttgtccggtcggtagcctatcatctgtcatccctttattctccatgggtcacattcggggatgtagcgtatgagtttgtcaaatcaaaggatacaccaagcgagttgatgaactttatcaactcgtggctagcagaaccgtggaaatctgctaaaactaaaagcacacaaaatctcgtgtttacacaatcagaagttcctcgtggtgttgtgccacagcatgcaccattactcattgcatccgtcgacgtgcagcaagatcatttctggtgggaagttagagcctacgctcatggcgtatcaagctacctagtcgattatggtcaagcaagtagttggggagatttaactgagatacttattgatagagaatatccatcagagtatggtgaggcccgtaagattgtgagggctggtatcgatagcggctaccgaacagacgaagtatatcagtactgtgcgcagtacccagaagtatgtgtgccagttaagggtgattcatcgcacagtcctctagcgcctccttataaaatgagcagcatcgagaagggcgtcattggaggtatgaagctgtatgtagtgaataccgactattggaaggactttatatttgcacgtatggtacgcccggccaatgagcctggtacaatccatctatttaaggattgccctgaggaatattcggagcaccttcggtcggaggaaaagcaggaaatccgaaacgtgaaaacgggggcagtaactgtgcaatggaaaccattaaccagtcatccaacaaaccacttattggatacatgtgtatacaacgccatggtggcggattcggtaggcgttaaatacttacccgaatatgatcgggatactgatgaggaggaagacgatacggatgacgaagactttaatgcagatagcagaggttggtttagttaagaaggaggtgagaccatgagcgcaagagaagacttggagcgtattcgaacgataatcgaggaaatcgagacgaatggatacgccgagatgtctgtaggcggtaagcgttttaagacacatgacctaccgacattatacgcccgtgaacgtgagttaatggctcgcgttgatgatgaggaaggtaataacacgacatcctacgtgtcatgggagcgacgatgaatattcttgataaggtaatagcctatttcaatccagagcgtgctgcccggagagcgtatttccgtagttcacttgaacgtggatatgatgcggcttcaacagaccgattaagcggcgactggatgcctgtatttggtacagccgaacaggtagcatctggccaacgtgatttgatccgtggtcgtgcacgagcagcagaacttaatagtgacctcgctgaaagtgttgtattggcattactacggaatgtagtaggtaccggaataaaaccgcagtgcaaaatcaagacccgcgcaggaaagctaaatgaaagactcaataagaaaattgaggaggcttgggctgactgggtggataaagaaaacgcggatatccgaggaatatctacgttctatgaattgcaggaaatggccttacgccgaatggtctatgatggagaaatcctagtcaacatgacctccgaaggtgcagatataccgctatcattacagtttatcgagggcgagaatatcggagccgtatcggtaagcgagaatggcaacagtattgttaatggcgtggaagttaataaatacggaagaccaatagcatatcacgtattccaaacagatccattaggaatacggtcgtttaacgaggcaaggctgccaagtaatagggcttttctattacataagcctcgcagacctagtgaactgcgcggggttagtatgttagccctcgtattaaagcgtattcatgacgtagatgaatacatggatgccgaccttatagcggctcgtgtagccgcttgtttcggcgcgttcgtaacaagtaattctgggggcaacccgatggttgcgaataagattgatagtaaaggcaagaaagttcgttcaatggcgccagggattatccaacatctacgtgcaggtgaatcaatttcatttgcggaacctaagcgaaatgcaggaaccgcatcagaatactcagcgacacaaacaagacgcatagcgtcaggtatgggtctaagtgcggacatagtgacgcgcaatattagtggtaacttctccgcagctcggcagaatatgctggaggatcagcaatcattcaagcagatgcagcgttttataattgagcatttttgtatgccagtatggcgtgccttcattgaagcatgctacctaaagggaattatcccggccaatgactatgcagctaacccaaaactttataagaaagtagcgtggttagctccaggctggtcttggattgaccctgttaaggaagttaatgctaacaaggaagccattaaggcaggactcacaacgctcgaagacgtatgtagtgcatctggtaaggactgggaagaagtacttgaacagcggaagctggaacaggaccgcattaaggaattgggtgttgcccttgatatgaatggggacataacgaatctagcggatgataacaccactgatatgaaaggagatgatagctagtggggaaatttgcaaagcagctcttaggtaaatatgcccgagaggcgcaaattacaaacatcgaagcgaacgaagaccgtaccgtcgaattatccttttcttctgaagaaccatatgaaagatggttcggaacagagatattgtgtcatgacgatggatgcattaacctagaccgctttaataatggtttgggtacagtgttattcaatcacgaccgtgatgccgtagtcggacacatcgagaatgtgtggattgaagacaatcgcggcaaagcgatcgttaaattcgacgaggatgatgagtctgaaaagatttatcagaaagtgttaaaaggcacgctacagggcgtgagtgtcgggtattccataagccgatacgaggaattaattgattccgattctaaaagttccaatggccggtttacaggcccagcatacgtaattacatattgggagccattggagattagtgttgtgtccgtccctgcagatccgactgtaggggtaggcagaagtgtagaagataatgaggaggaacctatgaaaggtgatgcaaaagcaaaaggcactgagcaaaacgtgccacaagtagtaccggaagtaccagagtccggagttaaaggttttaatgcagatgacgctaagaagttgattgcggcagaacgtgaacgtgtatccacaatcacaagtttatgccgcgactttgaagttgacggtgtagatgaatttatcaaatccggcaaatctgttgccgaagttcgcgaggctgtaatggacgcgttacgtgaacgcaataaaccagtatccgttaaagtcggtgaagcagattctgataagttccgcatggctatgcaggacgctttgatgatgtctattggcatcccagtcgcaaatcctgcaccaggtgcagatgaacttcgttctatgtccttgatggaattagcacgtgagtctatagctcgtgaaggcctaactgttaattactccgatcgattggaattagctcgtgaagctatcaactctacatcctctttcccaatcgcgttgtctaatgtagcaaataaggccttgatgcaaggttatgaaactgcaccatccacatttgcaacatgggctggaaaaggcagtaaccgtgacttcaaaccagcaaaacgtattttgctttccgaagcagccgaattgaaacttgtccctgagggcggacaattcaaggattcccaaatgagcgaagccggtacgaatgttagtgtattgacattcggacgtacgttcagcttaactcgacaagctcttattaatgacgatttgggtgtatttaacgatatttcttctaaattcggtcgtgcagcaaaaaataaaatcaataacatggtatatgaccttttaagcggcaatactgtgttagaagatggaaaggccttgtttagtgcagaccgtaagaacttggcaactacaggctccgagttaagtgttgtatctttagctgcaggtgtagcggctatgcgtcgtcaaaaacacattggtgaaaatcgtaatttgaatatctcacctacgtatttgattgttccacctgagctcgaagcattagcatatcaagtagttaaatctgtggtagaccctgctcgtagcaatgatacagtcaacccattcagtggtcgattcactatcgttgtagatgcagcattaacggatccgcatgcttggtatttggcatcccgtcctacagatgttcaaactatcgaagtaacgtacttaaatggcgttgaaacacctcgtttagaaacgcaaacaggcttcaaggttgacggcatcgagtacaaagtagcaatcgattgcaacgcaacagcaatcgacttccgcggcttgtacaagaaccctggtaaataattagtaattgattaggaggtaaatagatatggctaaattcattcaagaactagaccgcgtcgattttaagaatacaacatccgaaatgattgaagtaggggacattgtgcctattggtaaaatgcacggtgtggcaattacaaatatcggccctaatacaatcggtgcagttaaggtaactggctgttttgaagtaacggcattaacatctgattcttttgcagtaggtgataccgtgtatttcgacaaagatcaaaagcgagcatctaagacggacactaatccagtattaggcgtggctcttacagaaaaacgcccaggtaccacagtgttggaagtcgctcttgtgcctaatgtagaaaagtaaagtaatgtaaggcgggcatatgcccgtctactccataggaggtaatgcactatgaaattaggatacaagcctaatgcactgctttctgtattcggtgaacgaattacttacaaaggccaagatatcaaagcgagtgtggaaattggcgaatatgacggcaagggttccggatttgttgataaagcactagccgataaggctcaaatttgggtgcgtgttaaggatgttcccgaacctcgaccaaaagacgaggtgtatatcaatggtgctaaatggtacgttgatcacatttccaactttgacggcacgatgtattgtttggaagttgtccataacgtgagggcggtgagaccgtaatgagtaatgaacctattacgattacagacacagccactccgtatctgaatttcattgcagaaacaaaaccggactggatgcgtaaagcgttaaagtcaacaggttggatgatgcaaaaggaaattaagcaaggcattcggtcgggtgcacctggtggacgtaaatatcctaacttcatggcaccagcacggcgggctgcatttgagtcagcattcggtgcgaaacttcgcaaagtttaccaaagtggaggacgtgcagaacgagaagcctggggctcgaaatcgcgaaatgccttactcgatatgggcattagcgccaggacaatcggctatagcccactcggtaagttatcaaatgcagttggataccagtatgacaagggcaagcaatccgtccgagttgggtggttatctaattcggctaaacggttaggtgaacgtatcgaggaaggatacaccaagcagattacggagcctatgcgcaagaagttatttgctgcaggcgtaccattgcctaagggtaaatcgatgttcaaaattcagccacgtcatacttatggacctatgaaagcagcgttacagcctaaattgaaaccttatatcgaaaataagataggcgactacgctatttatggtccagctgcacaatccgcatctcgacgtagctataaggtaaggtgatttgatgcaacagacaattccactgtcgcgcatcgttgaacgttgggctgaagccctagcgaatgatgaagcgttgactaaattttgcaatgacaaatacggaaagccggcgcaactgtatgtcggctacgacgatgttgatgcaccgctcgaagaagattgcccttgcatcatattactaccgagtaataagaacgaagggcttgctgatacctacacatactcgttaatgattgtatggggtatcgtccataaaggtgcaactcgcgttaagaatattattcgatacgacggagcgctagaatcggataacctaggacagttaatcatcgaatgcatttgtaaggtaaatccagcgtttccggtaatcggcattgattatgaattagactcaatgaattggcgcccagtattcactggacgtttaacagctactatagaaattccgcatgtaatcggcgggaatattgaatattaaaggaggaaatgcatatggcaacagcaaaacgtgcacagggctctcagtcccatgtggcgattgcgtttgaggcggattttggtacaacgccatccactggcggtgtaatcacgccaatcatatctagctccgtgaaagctagtcaaaacttaaatgactccactgtgatacgtggtgatcgtaatcctgcagcgccattccgtggcaacattgatacgtccggtagtttaaccgtgcctgttggtgttattgacatcggatactggttaaaggctgcatttgggcaaccgacttctaatacaactggccaggcgccaaataagaagtctgagcacgtgtttaaaattggtaatacaatgccatcgctaactattgaacagggataccctgatgttaacgtattccagcaattcgctggggttcgagttagtaaattaggctttaagtttggcggtgactccgaacttacggcatctgtggatgtaatgggctgtaaggaaacattagcggccactacattcgatgctgcagctaaggcagttaatttcttaccattccaaaaccttaacgcaaccattaaagaaggcggcgttactgtggccaatattctaagttgcgatatcaactttgactttggcttggatggtgattcttatgctatcggcggtaaagggtttagaacgtatatcgacccaggtattgtgtcaatttccgggacaattaaagcgttcttccaaaataaggacctcttgaataaagcggtcaatggtacagaatctagcttggaaatacaacttacgcaagatgactggtcgcttacattcaagttgcctgagctggtatacgaacgacaatctccaggtattgacggtcctcgtggcgtcaatattgaactaccgtttaaggcgtactaccgtgcagattctggtcgttctgcatccatcattacattagttaataatcaagaacaatactaggaggtgcccatatggcatttgaagatattcaagtaagaggattaacattcgctgaacgtggcgaattaattaaatccggtttagacccattgtatactccagttccggaggaagcaccggacacagaacgtctattgcgttctcgtgagcttgcacaatggattatgcagcacatttacggtctaactgaagatgaaatcaacgcagcgccagacaatgatcttatggaaattgcgcttgataccatgcggtttactcacgaaaaaaaagctgaaatcgaaaaaaactaattgatgcgtggagttggctcaactccgataagccgaaatactgctctgattgtatcaagatgcaacgtgagactaaacagcattttgactgttcggagtgtgagttcaattccccgcatcaattagatggaacgagacaggcaatgcgagtatacaatgccagccgaatgcagcgacgttggcatccaggtggcattgcaggattcgatatgcctgcggtgttagaagtggcgagggcttacggcatcgaaccactgccgcaccttattgatttgcttatactacttgaagccaaagaactggaggtggcgcacaagaatggccaataatttaattgatattgtcgttcaacttaccgataagaatacggaagcaggactcaagaaaattacggcaagtgccgaaggcgccaaatccgcccttggcaaaatgaagaatgacctcatggcgataggtgccggtgtcggtgttgtaggtatcggtgccaaacttgctaaggaggctattcaatgggatgtagccgttaagaagttatccggtatcactggtgctacggcaaaagaaaccagtgaactattagcagtggccaattatatgggcgttgctatggaagatagtgctggcgcatttgctaagttctctaagaacgtcggagcggccaaagaaaaaatggaagtcgctcgggcagaggggaaacttggtactgatatatttagtaaattaggctacacgcttgaagacattcaagataagaataccgttgaagtgtttaagatgatacaggaacgtctaagagggatgaaggacggggctgaaaagactcgtgtcgaaatggaactcttcggtcgtacgggctaccaaatgcacgccatgctaaacatgtccgctgagcagatggacaaagtggctgaacgtgccaaagcaatggggcttatcatcgacgacgagactgcagctaaatctgcaaagctaaatcgggaattaaaagatttagagaatacagggaaaaggcttgcggtatctatcggccatgagttagttcctgtgtttaatgactacgcaaaaggcgtgttagacgttgctaaagaattcgagtcgatgaccgccgagcaaaaggaagctatcggaggcattgtcaaattcggtgcagaagctggggctgtaatcatagtaatgcgatcactaacaagtgcacttggattcatgaggttagctacaattgctgcagccgggccttgggtaacattagctatggtagcagggctcgcagccaagaacatatatgatgcagtgtatgcatctaaaacagctggttcttatctaaatgttgaagttgacggtaaacgtattcacaagaatacgaactcaacagcaggaatgtctgataagtttagggaatcacatgatgcacgttattggatagaagactcagctttattcggattcattaaaaatgaccgcttagctacaaaagaagaaggcgctagaattgacgcagctcttaaagaaaaggaggctgcagacgaggctaggaagaaagctgatgaagaactcgcaaaagcgaaagaggaccttgctaatggcggattaacgaataccgaggctatcaataaggcgaatgaggaagccgcaaaagcggccaaagcgcaagagcaggctgctaaaaaagctcaacaagcggctgagaagttgacgagtgcggtggaacgcatggccgatttgtatcgctcacttaccttgcaaagcctgcaaattgatggcagtcaatacgaaattgataagctaacagctaagaaccagtatgaatctaacaataagaatattcgtgatatcatccgttctgtttctggattgagcggaggcgttactggagaagccgtgagtgtgctagacgcagccaatgaacaactcggtaaggcatacgagttaggcgcagatggtacatgggcaacggattgcggaaagctattctctgattcggtattacaggcattcggtaaagatgtaccaagatatgttccatctatcatggatgctgcaagagcggccggtgcatggcacgatgagggcgatggatacactcctaaagccggagatggtgttgtcgtacttggcgacaatcatatcgtcattagcgacggaaatggcgggtataccggtgccaattcaagtactggcgttgttagtaagccaagcgtatcgggtgattttggtgctatcacggggtatgtagacactagcttattagccggtgctacatcgagcgtctctgccgacacagctggtagtgcagcaaatgctaagaagcttgctgagtcaaatctaaccgcccaagttagagctaagaatgaagagctgtatcaaaagcgacttgctgaagctgaacgcaatcaagctatccgtgttcgcaagatgaacgaggatattaagaagctcgatcttgaacgtacaggcgaccgattgcaattactcaaagcggaagctgaagcacaaaaagctcaaattgatgacaatgtacgtgagtatacaaaggctgtaggcgataaggaactcgctgaaaagaaagctcaagcagagcgcttaaaagtggcgtctgatactgagcagaaaatcagagagttagcctacactcaaacgagtgaaaccgttgaccacttaaccaatatggttgcgcttggtcgattgtctcgtagtgatgcggacgcactacttgctgaagagttaaagacctatattgactatgcacggagtgaagtgaatgaggcccagttaacggctactcaaaggctgcagattgaaaagaacctgttagagtcccagcagaagctatgggaacttgccggtcgcagtctgaaaacgagcctacaagaagccgctcgccagtataagcaagagactaccaattatgctgatttagcaaagtctacttttgatagtacgatgagctctatcaattcagcatggacaaataatctcgagactatgacaacaggaacgaagtcattcagtaaaggcattaaggacatattcaaggatatgacaaatgccattattaagatgatgattcagttaacgttccaacaatacatcatgcctaagttgcaaggattatttggtggtgcagtaagtggtattggctcactaggtgctgcaaaagggacatcgtcctttgctggtggtggttcgtttagttctgcatttaccggtaatcgattcgctgccggaggaaaaacgaatccaggacttatgttggttggtgaaaacggacctgaactattacagtcctctggatcccatcgtatttacacagcaagcgaaacccgtagattaatgggtggcgctacaagcaacaatgtagttgttaacattgttaatcagtctggccaagaactcgaaagcaagcaacagaactctcggtttgatggtgagaattatgttatcgatgtagtagttcgtgctatggaatcaaacaaaggaggtatgcgtgacgccatcaaggcatccgcagtataactatggcagtatttccagatattcgatggccgatatacccaattcaggagactactccagatatttcgtataaaggccaagttgaaaacatgacgctaatcaccaggaaaaagacgacaaagactcggcggacatattccgtagggtacaagttaccaacagctgattattataaacttcggtcattcttcgatgaagtcaactgctctggtatatttgcttgggttcatccggaaacacgggaaacactaaatgtacgatttgctgatcagttagactttgcggcgaatgattacggagtgtggatgggaaccgtgaaattacaggaggtataacatgttaccgctctcaacggcatcgattttagagaaaaaccaaatatcggccacaggtgtgtggttaatgctgttagaaatatcctataaaggggatacgattcgattggtatacaatacggagaatatccaatttcaaggcaatacctatatcgcatttccatttaccattcaagatgtcaccgagaacgcaacggatttgcctaatattaagttatctgtatctaacgttactcggacaatccagcgtatggcagagtctaataatggattcactggagccaatgtcatcattcgtgtagtgaatacgaacatacctgatgtgtgcgagcaagaggagcatttcgtaattacgggaactcatgcaaacgcagaatggatggagtttacactgggtactgactttagctttactcgacgcttcccattaatccgtgtgatgaaggatttctgtccgttcaaatttaaaggggttcagtgtggatataagggtcacgaaaatcaatgcaataaaaccctagcgcgatgtcgtgaattggggaacagtacacgatttggcggagaacctactatcccgcaaggaggactgtatgcatccaataagtgatttgactgatatgataggtaccccattctcggaaatgaaatgctgggatgtagttgttgaggtatatcggcgtagtggaatatcactacccgaatatacccaaatccaaatggatgaatggcgcgaggttcgtgagccaatgccagggagtgttttggtatttgcgctatatggtaaaaatctcgatcatgtaggggtttatcttggtgaaggtaaatttatacacgctactgaacacagtggcacctgtatagagcatatatcaaaatacgtgcctcgattgaagcacatttatgaaaggaaggagtagcagatggttaatgtaatcattgtaaataatccgttcaagccagagcaacgggatacaaaatatttgccatttaaacagggcaagtctatcagctattacttcagtgcacctggtgaatgggcgtactcagtaaatggacatgaagcagcgcctgatacagttgtgaacgatgaagactacattgtagtaatgccccgagttgagggtaaattctttggtgttcttctatcaatcgggatggctgtatttaccggtggtatcgcttcgggtgctatctttggtatacaaagcttaatttggcggtcagtaattgctatggcggtagggatgataggtaatgctatcatttcaaagttaactgcccctaaggttgaccgttcgaattccgaacagtcaaatacatatggctggggaggtactgaaactgttaccggacaaggttaccctttagccgttacgtatggccgaatgaaaagcgctgggttattattatcccgccatgtaattagtgatggtgaaaagcaatatcttaatctcttatactgtgccggtgagggcgagttatcaaagatagaagatattcgtataaacgctaacccaatcagtaattataaagatgtgcaggtggatatcagaaagggcacaaatgaccaaacagttatccaaaatttcaatgataactttgcggatcaatccctaaactatgaattgactgaatcatggaatacgcaacaggtacaaggcgatgcgtgtgacgcgatagagttaactgttggattcccaaacggattatattattcaaatgatagcggcggcgctgaccgtacgtctgtcacgttgaaagcagaaatccgtaaggtaggcgatgagtcctggcaggcattacctttagcaaatcaaaaaggcatggccggtcacattaagcgtcgggatgcgtggaactttattaagtcagacaatagcgtgacgaatacatctgattacgcaggacgaattgaagaggcgacaaataatgcgttttatcgtgtatttcgattcgacaatctcgaaaaggctcgctacgaaattcgtatgcgatgcagtgcgaaagatgggaaaagcctgcgtcatgttaataaggtctactgggtacaactaactcaaattatatatgacgatttcgtgcatccagggaaagccctcattggaattaaggctttggccacatctcaactaagtggaactgatccaaaagtgacatggattcaagaacgttcagaggtgtatgtgttcaatccgtatatcaataagtacgaagctcaaccagcggataatccggcatgggctgcatatgatttaatccacatctgccgtaagattggcggtgaatatattgtattcggacagccccatatgcgccttgactataacgcatttaaggcatgggcggataagtgtaaaacgaatgggtttacattcaattatatatacgacaccgctatgcgattatgggatgcgttaaagtatccagaggcagtaggtcgagggaaggtaattcctgtaggaaccaggttcacatgcgttagcgattatcaatctacaccggtacagttgtttactgtagccaatataaaacacggcagctttactgaagagtttcaaggtgtggaggctagggctaactctgttgaaatatcgttccttaacaaggataaggattatgagcgagacgtcattccagtatatggggatacttatgatgagttggatacgctaacaaatccggcacaagttgaactcatggggtgcactagtcttgagcaggcctataaacacggtaagcatttcttgcgatgtaataaatatgaaatacgtactgtgacaatagaggcgtttacggatgccatagcgtgcacggtaggagatattattttaattcagcacgacatacctgaatggggcgagggcggtcgtgtggttgcggtaagtggccagacgattacacttgacaaggaagtgtcggtacaaccagggaagaattatcagttgctaattcgtagcaactctacggatatcgtctctacgtttaacgtagtaaatgtatcaggtctcaatgtgattgttaaagaggctataccggtgcagcctgatgcggtatatgcattcggagaggtctctaaatcggctaagccatttcgtgtgttggctattacaaagacactatcagaaatgactcgtaagatccaatgcatggaatattatccagaactttacgtatcggatgatggcacggtgccaagtattgattatacgaatcacggtgcatctgatattcaatcagtagggttagtgagcgatgtctatggtgctaatggcatcatgtattcacgcataggtgtaatgtggcagttacctcgtgatggaaaagtctcaaacgtagtcgtgaattaccgaaacgtaaaaagcgatacgtggacatatatcggaaactacccagcgtccacaaatactaccacaatatccgatgtgctgctaggcgggacctatgaggtgcgggtacaggctattaatgagttaggacagttaactactggcataacaaaatctatagccatacctaagatgcaaatgccagaggatgttcagaatttacacgttataagtcggtacaatcaaacggctgataaaagtgtttactacgacttacaagtgctatttgacccgcctagtaatcccgccaacttcgatgtagcggaggtttggtatcttttaaaatcgaaaagcggaaaacctgtaacgggacaagaatggcagtatgctggcagtagtaatagtcaggttattatcaaatcattaggcccaggtgaggagtatcgaatcaaagcaatctcggttgaccgatttggcaaccgagcagaaacagcccaaacggttgatgtgatagtcaaaccgatggatgcgatacctgacatgcctagtaattttggtattacgttcggtagaaatgccaccgcatcatggaatgaggtgctgaatgctgacgtcgactattacgaattacgtaccgataataatcctggtaaagatacgaaggctttattggcaagagttaaaggtacatctgctgtacttaccctatctaaacgagcagatactgtttatctttatgctcgcagcacgttgggcaaatactcgactgcagcaacgtacgagtataacgttccgcagttggcagcgcctgagtttgtagtaaaaagccagttagggggatttaatctttatttctcaactaagccagcacaagcatacgcaatcagatgccacgtgatcggagatgaacgtactgatgattttgaaactactagcaccatgctgacgtattcgaactcagccggaatatatcggatacgttgctcgtttgtggatgtgttcggagatggactcgttaacgagaagcaagtcgtgattaagacacaaattgatgctagcttgctagaccttgagtctcttgggctgaataaagttgatgaacgaattaaggaacttgataagaaattcaataagaattctgaagagaccactagaagaattacgaatttggcgtcacatacggaatctcgcattactgagttagctggtagcatcgatttacaagttaaaaaaagtattggcgagattgatggtggtgagttggtgtctcgcattaacctcagtcagtccggtgtatacattgcggggaaattgattcacatcaccggagcgactaagttcgatgataacgtcattgttaataagatgattcaggctaacgcagttactgccgacaaattacatgttgatagtttatcggcggtgtccggtacaatcgggttacttcgttcgagagagaccggtgctcgtgttgagattcaggataatcttattacaggttttgatgatgataataaccctcggattaaacttggatgctggtaggaggtattatggaaccgcatgtattagcttatgatgctaacggcaatatcatactaaatctcaaggaaaggctcacacgtattgaggggcggatgtatgtatctgacatcccaaatcggcgccaacaaattactgtgaatggattgcagcctgggcaacatgtctgggctgcagccatgggacagtacttagtggcagaggttaggggcaatatcataacatattattttgcagtatcccaggatgaatataatatcaatcgtcaatttaagaatcttacgtatgaagggtggctggcgtatggaatttattaacatccagaataaagaaggtgtcacgattataaacgatacctatgacaatctagtatatctcagtttccctaaacaaaaagatgcggttctctacaccggggcgatgagggggataacgccaacggttcaaatcccactcaaacaagtagcttacgcacctatgttggtgcctacaagtaaataccaatacggatatattgcgggggaggctaatgtaatccaggtcttttatgccactaattacgcatatcatggtgacgcacctcttatagcagtatcagttccacaaggatatgaattcgcggctcagtgggttcataaacgtcgtgagcagttaatggtactagtagtggatgtaattaaaccaggcgaaaaggtaacacaagcaatggttgatgaagtcaaagctggtattaaattctattgttttggttacttcgaggacgttgtgaccaatgcgaatgcacctcgtatcagattcgttgataaggtaggaggtagcaaacctaatatagccctgcaagttttaggaaagcacaaatttttcaaagcaagctgggaggataacaatttcaagaatgacgtgatatatgatagccgcatcagatacctacgcataatcgatcactatgcgcatgattggtataaccagttatcaaattacgttccagatacttttacagacatggctcgtgatccaaagtcatatggcgtcaaggttgcaattatacccatgtccgtaatcgatgcatccgtttggggaccaaatattaataatggagataaaaagtcacacacggggcgagtgtggcaaatgttcagatttcacgatgagagtaccgtatcgctgaaatcgtatcagttcattgattggaatacagtcaccacgtatcctgtaggttgctcgggtaagactacatctcagtatttggtagtcgatgtgactgggtacgacaaacaaggtatgattccattcaattaagggagatgataagtaatgaatgtaaaagatatagacctcaatattggcgaggattttgggatagtttacgcagttcaagatgacaatgtagatttgacagggttcaagtcagtattcgccatacgaaagcgagcaagtggtccgcttgttattaaagtgcaaggggtagcatctgggaagattgcgactttcaatatttccggaaaggataccctagaaattaagtcctttggtgagcatgtgtatgatgcttttgcatataaggaatcggagcctagccgatattacaaactgggtatgggggtagtcaacataattcaggatgtggccatgcatgattagaggaggaatgtattatgcaaaacaaagcgttaccagtaagacttgaaggtccaattaaagtagaggcggaagtaaaagcaaccatggtaggcgataatgggaaaagtgcttatgaaattgctttagcacatggattcgtaggaaccgaggaggagtggttggaatccttaaaagcgaaaatgcctaacttatcaggcgttgtttcagcacttcaaggtaagaacattcttattaatagtggtacccttgaagcgatattaactgctattgttcacgcattggcgaatcaaccttatgcgccacttacctttagggagccaagaaaaggggatacggaaatccgagtatctggacaagatggctttaaagttcgagtgcgcggtgaggaggaagctgttgaaatccaatccgggagtgcaacaattagaattcagccttatggcgcagatgatatttatcttgaatatcttaacttaattgagcacgtcgttgatactgttaaaatcaaaggtcttattgaatttaatccggaaacggccacagagattctgcctaagcagttctatggccgtagtgacttagagggtgaacttacctgtccaaacgttgttaaggttggtgcattagcattcgttggaaccgatcacaacattatcaatttgccgaaggccactgatattgatagggatgctttcgctaacagttctcttgccgtaatcaatatccccgcatttgtatgggcagatgataaccttgatttaaaatcttatgacctcattagggttaataaaatgactgttagcgaggaatctcatccgccacgaaatgttatgatgcaaaaaatttcattagaggtctacaatccggaccatactaaaaaatggaatcattataacgagaaatgggagaaagcggaggcctaaatggacgaaattagattattgctaatggacttcggaattccggcctactttgcagatattggattttgggtgaccctcttgggggtcatctgggccgcccttaggggttcgtttcgtgcgatggtgtggtttttagaacatacctcactagctgcagttaagcaagaattagatgaccatttggctagacgcatggataagcagcgtaaggactatgatgataagttatccgatgctatcaatagtatcgctgatttaacaaaaagcaatcaggaaatactaaagcaattagtcaagctggaagaacgagatgcagcgaaatttcaccggcttaataaccttgaaaccacagttcagagtctgagtactgaactgatgcatatccaagttctaaacaatatgccgataggaagaagtatcacacttaacacggatgatataggaggtgactgataatgaaatatcaaatcatgaaccgactgaaatccgcatatagtgctgttcgtgttgctaacattagacctactggagtactagcgacaagaattctagtacttgttatgctaattcctatttggctagtcataacagagtatgttatggcatttgctaggggctatgtatcaagtgaaactaataagttgattgatgttggactcaatattattgaccatatattcattcctagtgtattgacagccgtagtaggcttcctaggactttggttggatagaaacaataatggggtccctgataaattagaaggaggtagttgtaatgacgaaaatatttataaatccaggtcatgatattgacctggactctggagcagtaaatcctaacacaggacgtcgtgaatgcgacgttgctcgtgatgctggtaagttattggcttgttatttacaaacagcaggatgcgaagtgcgcactctgcagaatgatgatttaggtcttgtatgtgctgagtccaatgaatggggagcagatatatttgtgtctctgcactgtaacgcattcaatacacaggcacgtggaacagaaactctttataagtctttcaacggccaacgcttggcgaatgacatccaatcgcaaattatccgtagtattaatacggttgatcgtggtgtgaaagaacggcaagatttatgggtgttaaacggcacggatgcaacagccgttcttgttgagatggcattcatcgataatgatgaagacctagcactacttaataatgatttagacaccatagtgcgtgctatcgcaaggggcattacggattatgcaacaggaggggaataatgtatgacaaaatcaaaattttacttaatcaccctacttaccgctatattattatcggtggtattgggttcatcttcatcctttgcctcggatacatcttctaccaaccaagcggaaccgactatcagcgtgcccgtgagtcagtggaacgaattgaaaagcatcaacgcgaaagcgttgagcttaatcgaagcatccagcgttccattgacagaagcacagactatagccgtgaagcagcgacaagaattgaacgaagctcacaatacaatcaacaaattggagaacgaattaatgcaagccaaacttcaatcaatgaagcaagaaattgtcttgtccgaaatgcagaactctttgacagagttgaaagggcaaatcgacaacgacaagagaacaatcaaacgcttacgaatgcaacgcaacctatcccaaatactgggagcgggtgcgacaatcggagtagtaattcatcgatgactgagaggtgatccatacatctcctgagcatgagcaggtggactcatggattgactgtaataatgtaaaaggccttactgggaatatgtcctggtaaggtcttttttgtgtaaaaaaaaattaaaaaaagtacttgcaaatacatcgtattcgatgtataataaagacaaagataagggagttattaaaaggagtacctatcatgagcaagtatggtgaatttttaaaaagcgtaaaagaatctcaattgactaagttcttcggcgaagtgaaacacacttctaacaaatatttcaaattcaatcatgttattagcgacgatgaaatcatcatcgtaactaacaatgtgaagttcataaaaggtaaccctgttttagtgatcgataataacaaagttgtatacctaaaggaatggaatgttgcagaggttcgcaactataataaagaactttacgcatttgcagttaaattaaaccgtaaatactggaaggaatatactttcaaaaatgattttgatgatatgtgtttcgagcaagctgacacatttgatagcttgaaagcagtagcggaaatgcaaaatgacacagaaatcgcattaggttggggaaaataaggaggtatttatgaaattcaatgacgttatgacctccgcagaagctgcggaacgttggaagataagtcctgttacagtgaagcaggcgtgctccggtcaacggaacacgccaccacgattcacatctgaggagtgcagaaaggcaaaaggaacctggctagtatctcgccagggtatggaacgattgtatggggaggaacctaaaatgttaaaagtatatagcttaaatgcaaagaaaccttggttcatgggaaccgcagaaacatataaggaagcatgggacatgatatatgagcgcgagatgcgccaatctccttgcattggcaagtgggacaaggccgcatgggatgaaggcgatatggaagaagaatttcctgatttcgtatggccggaaggtgttgattacgtttggacggctgactggatagctgaagtcattctcgatccgaaagaatacaacgaagaaggtgtaagaggtcttatcgacgatttgatgctatcttacaaaattgaagaaatagcggattaagctcgttataattcgtttaaaattaaaatagttgctcaactgttgctcaacttttagaagttgagtatgtggatatgttaataaaatagggggtttatataattttatggatatgttatataaacaggttaaatagtgaggtatttatgaatcaatatattaaattcatacgtcatgtgctatgggcctgtttttttgttacctttttaggcctacttgtccaatatattgtgggctggaatcagtacgtgctcggttggttatggggcatgttgactatgatggtttatttagtactgttaggtctacataataaagggctagcatatggcaatccacaccaggctgtagctaaggcgcgacgtcaaatgatgtggcgattggctctgattggcgccttcgtagttataggattgcaaatacctggtgtacgagctgagagcttattgatttcagttgtacttatacagcctgtattgtatatcgtgttttggcgattaagtaagtaataaaatttattgcattgggcgataggactaaatcgcatgaaataaggattaattacattcctatcatgaattttaaatgcataaaatgcatttttaatatgtaaatcacgaattgtttactctagaagtgttgattatatacctataaagaggtatgataatacatagatatatattatatggatatatataaaatttatattgctacgtgagaaaggggttgagtctgtggaactgcatgcgggtcaccatcaagtagtacagtggctaggtttatcgtttaacatcgatacattaattgctacgtggattacgatggcgatcgtcatcatcatttccgtgcttgctacgcgaaatcgagctttagtgccttcgggtgttcaaaatgtagtggaaactatattggaagcattagaaggtcaattatcgccaacgcttgggaaacactggccgatggtgagttcattgttattcacattcttcttatttatctttgttggtaatgagcttggtttattgccaacgctacatgctgttacttcgcctacggcggatattaatacaacagcggcactcgcattgtgcagtagctttatagtttggggaatggggattaaagtaaaaggcttatcttattttaatcatttcttacagccttataaggctatgctagttctaaacatatttgaagaaatagcaaaacctatcacattagctttccgtctatttggtaatattgtagctggcgaaattttattggaaatcctttataatttgccttggttcgtacctgtaccatgggtttggattgcttttagtttatttattggtatcattcaagcttttatttttacagttctaacagccaactatttaggtatggcattaagtgaagaacactaattttaatggaggatttattatggaagttcaaggtttattcgcattagctgcggcaatcgcagtaggttgtggtgctatcgcggcaggtattggtgacggcatggtagctagtaaagttattgaaggtattacacgtcaacctgaattgcgcggtcaattaatgtccacaatgttcgtagctatcggcttaatcgaagctatgcctatcatcggcgtagtagttgctttcattttattgttcagataatagcgaggaggaacgaccttggtagatttaacgctagggacaattcttgctcaaatgctaaacttttttatattagtttggattttggcccgttttgcatataaaccattggtttctatgatgcaagagcgtaaagaacgcattgctaaggacttagcagatgctcaagctgctcgtaatgaagcggaacaattcaaagctgattatgctgcgcaaatagcgaatgcacgtcaagaggctcaacaaatcgttgaaaaggcagtgcaacaagcagaagcgactacgcgtgaacaattggcagcggctcgtgaacaaattgaacgtgaaaaagaacgagctcgtcaagatatcgtaaacgaacgtgatcgtgctatgaataatttgcgtaacgaagttatttccttatctgttgcaatggcgactaaggttgtggcaaaagatatggacagcgaaactaatacaaaattaattgaagacgctattgcgaaacttgatagtaaaacgatagggttgtgatattatgagcacagaaattgtagcagataaatacagttcagctatgttagagctagctcaagaacaaggtaatttagtaactacagaagaaaatcttttatatgtggcctctgttcttaatgaacaaccagaattggtagggtttattaataatcctattgtggaagcagatgcaaagatttctctacttggaaaggtctttggcactgctgtagaaaagacagtacttcatttcatgtatgtcatggttaaacgtggcagatatcgttatttgcaagatacaattagagctttcataaaaaaatctcgcgaagcacgaggtattttagaagcaattgtaactgtagcagaaccattaactgatacattgcgtgatgatgtacaagctaaattacaagcgatgaccggcaaggatgtcattgtatcggtgcgtcaagaccctagaatcatgggtggtattatcattcaaatcggtgataaacgcattgatggatcgattgcacgtcgcttagacgaattgaaaaaaacgttagtacgaactgactctattagattggggtgaatgggtatatatgaaaatgaagcctgaagaaatcactgctataatcaaacagcagattcaggactatgatgttgaccttaatgtcgatgacgtgggtactgtcctcgacgtaggggatggcatcgcccatatttatggtcttgaaagagccatggccggtgaattgttagaattaccacacggcgtatatggcctggttttgaacttagaattagacaatgttggtgccgtactacttggtgacgacttcttgattaaagaaggcgatgaagtacgccgtaccggcaaaatcatggacgtaccagtaggggatgcccttattggtcgcgtagttaatccgttggggcaacctatcgatggcaagggtgctattcaagcgacagaacgtcgtcctgtagaacatccagcacctggtattgcggatcgtcaatctgtaaacgaacctttgcaaacaggtttgaaggctatcgatgcgatggtaccaattggtcgtggtcaacgtgagcttatcattggtgaccgtggtacaggtaaaactgcaattgctcttgatacaatcatcaaccaaaagggtaaagatgtaatttgtatctatgtagcgattggtcaaaaagaatctaccgtagctcgtgtagtacaaaaattagaagaaacaggcgcattggattacacaatcgtcgtttctgcgagtgcttccacaggcgctccacttcaatacattgctccatatgcaggtgttgcaatgggcgaatactttatgtacaaaggaaaacatgtactctgcgtatatgatgatttaacaaaacaagcggctgcatatcgcgctatgtctctattattacgtcgtccaccagggcgtgaagcgtatccaggggacgtattctacttacatagccgtctattggaacgtgctgctaaactttcaccagaacttggtggcggctctattacagcgttgccaatcattgaaacgcaagctggtgacgtatctgcttatatcccaacaaacgtaatttccattactgatggtcaaattttcttgggcacagatatgttctactccggtatccgtcctgctgttgacgtaggtttgtccgtatctcgtgtaggtggtagtgcacaaactaaagcgatgaaacaagtagctggtcaattgcgtttggaccttgcacaatatcgtgaattagcagcatttgctcagttcggttctgatcttgatgcagccacaaaagcacaattagatcgtggtgaacgattgactgaaatgttgaaacaaggtcaatatgagccaatgagtgtagctgaaatggttattaacctatatgctggtactaagggatacttagctagcattcaagtagctgatgtgttggcatttgaagcggaattattacgttttattcgtgcaaattatcctgaaattatcagcaatattgaaagcacaaataaacttgatgaagcaacagaaaacttgttaaaacaagctattccagaatgtgtagaagcctttggtgctacacatacattagtttcccgtaaggaggcgtaatgtatggctagtgcacaagatttgcgaaagcgtataaagagtgttactaatacgcaacaaattacaaaagcgatgaagatggtagcttctgctcgtcttcgtagggctcaagcaaaagctgatgcaacgcggccatacgcagaaaaaatagggcaaatcttgcgtcatatctccactagtgatttacgagattatgtaagtcctctacttgaaagtagacctgtaaaacggacttgttatatcgttatcggtgctgacaagggccttgcaggcgcctattcgtctaatgtattaaaattggcaatagaacaaatcggtcaaaaaacacctgatgaatattgcctcattacagctgggcgaaaaccaaaggatagtttaaaatctcgtcactatcatattgatcaatcgtacagtggtttttccgataaaccgagttacgaacatgcgcgacatattatggatcatgcactttcattatatgaacgtcatgaagttgacgaagttatcatgatttatacgcgctttgtaaattctatgacgcaaattgcacaggcagagtgcattctaccgttagagcaaccagatgatgaagtaaagggcgaagagtatgaatttatgccggaccctgcagcagttctggatgcattattaccaaaatatttagaaattaccgtatataatggattattacaagcggcggcaagtgaattaggtgctcgtatgacagctatgacatctgctactgataatgctggggatctcatcagttccttagggcttgaatataataaattacgtcaatccagtattacgaatgaaatttctgaaattgttggcggtgccaatgccttgcaatagataaggagagacctcttaatgagtaataatattgggaaagtggtgcaggtcatcggcccagttgtagacgtgcgttttgaagctggtcatttaccagctatctataacgccattcacatctaccatgaccataaagcgcacgatagacaaaaaattgtagtagaagttatgcaacacttaggggacgatatggttcgttgcgttgctatgagttctactgatggtatgacccgtggtatggaagcagaagacactggtgctgcaatctccgtaccggttggtgaaggcgtattgggtcgtatctttaatgtgttgggtgaaaccgtagaccatgattcagctcctgtagtagcagatgaaatgtggcctatccatcgtccagcacctaaatttgatgacctttcaccagatacacaaattcttgaaacgggtatcaaagtcgtagacttgatcgcaccatacgtaaaaggtggtaaaatcggtttgttcggcggtgccggcgtagggaaaactgtattgattatggaattgattcacaatgttgccacagaacatggtggctattccgtattctctggcgtaggtgaacgtactcgtgaaggtaatgacctttggaacgaaatgaaggaatccggcgttattaataaaacagccttggtatatggacaaatgaatgagccaccaggggctcgtatgcgcgttggtttgacaggtcttacaatggctgaatatttccgtgatgtgaagaaacaagacgtgctcttgtttatcgataacatcttccgttttattcaagctggttccgaagtatctgctcttttaggtcgtatgccatctgctgtaggttatcaacctacattggcaaatgacgtaggtgctttacaagaacgtattacatctacaaaagaaggttccattacgtctgtacaagccgtatacgtacctgccgatgacttgactgaccctgcaccagcagctacatttgctcacttggatgcaacaacagtattgtctcgttccatcgcggaacttggtatttatcctgccgtagatccacttgattctacaagccgtattttggaccctcatgtacttggggatgaacattataacgtggctcgtggcgttcaagaagtgttgcaaaaatatcgcgacttacaagatatcatcgcaattctaggtatggaagaattatctgatgaagataagttaactgtatctcgagctcgtaaaatccaacgtttcttgagtcaaccattcttcgtagcagaagtatttaccggttctcctggtaaatatgtaccattgcaagaaacattgcgtggctttaaagaaatccttgatggtaaacatgatgatttaccagaaggcgcattctatatggttggtaccattgatgaagccgttgcaaaagcaaaggaaatgcaagagaagggggaataatccatggcggaacctatgaccctaacgataataacacctgatgcgattgtatatgatggtaaggctgactttttcgtagggcatgctatcgatggcgaatttggtgtattgcctaatcatgcacctatgattattgccctcgatatagcccctttacgtgtcgataatcctgatggacaacagcatacatttgctgttttcgggggctttgttgaaattgaacacaacaaggtgagcattgtaacacctaattgtgaaagcccagaaaccatcgatatcgatcgcgcgaaacgagcaaaagaacgcgctgaaggccgtttgtctaatcctacacctgatatagatgtagagcgtgctgaactcgccttagctcgggcattacttcgtttaaaggtaacacaacgcatatagtagttatacattgatatagccttggtaaataaggagtactcttgtagtactccttatttgcttgtatacgcaaaaagggtgtcacccatgtgggtggcacccttttgctgttgcattgttttgaattataatacactaacaccttttagagagtaagctgtattttttggttgttctacttgaaattcatagtctggaactactggcatttctgcattaataccaggagcttgataacgatctcgatctgttggaacacgtttatatggtaattgttcaagtaagtcttttatgactttattccatatggatttatgtgttggcatagtcaaggtatcatcgatttggttaaaaccactacggatggtgtgaacgataccttcattcgtatcgtagaaataaatcatagcagatactttagcttgaatgtgaatgtcgtcgctatcatcatgatagtattggctgagataggacgttggtaattgtacatatatgtcttgcattggcacaggcataatgacaatttcggaatgttgtgatgctgccacttcggctaaatcaacggctgtgatttgtgctaatggtgtgttggtgcttactacggttgtatcgtagtatggatagcgcaagacatttgccactgaatcggataaatatttaccaaaggcagccgtattttcattacgcaatgttgttggcactacaagtgttaccttgcgagatgggaaattatctaaatggccatcgtagttagcctttcccactgtagatggtgtatttgacgtggtcgaagtaatttgaatcggcgacgttttgatagtgccaggatcagggatgatctttactggcgcaatagggatagaacgggcttttgtagtttgagcatctacatttgctgcattagcgattgtgaaagttgaaacaaaagctaaggcgagacaaaaactgatacgcatggttgcttctctaaagttcatattcgactctccttgatataaatataatcaaaactatatcttacagtataccatagttgcaataaaaaagaagcaagcgtcagcttgcttctttctgtggtggacgatgacaggatcgaactgccgacatcctgcttgtaaggcaggcgctctcccagctgagctaatcgtccatgtggtgacccgtccgggaatcgaacccgggataccgccgtgaaagggcggtgtcttaaccgcttgaccaacgggccaatattggctccccgagtaggactcgaacctacgaccgatcggttaacagccgattgctctaccaactgagctatcgaggaataatatagtgattattataaaggaacatatcgataatagcaaggggaaatgttataaatagttaaaaatttttagcatatgctataactaaaacacataatagacagagcttgaggaatgataaaataatttgatgagatagtcataaaaaacgataattatatatattggtgagaaatccactaattaagcgtgtttttgtgtatatgaactccttgatgaataggggagttagtaaattaattgtattgaagataatcgttatacatactcataattaaaatctttttatataaaaatgatagataatctcattaaagaaagcaatatattttatggttagaacacatattgattggaaacgaaccatatacaataatataatgtgatatttattacagttatatagccttttattagagttaagctactatttttaatattatcaaagtgcataaaaaaggtataattaatcattgaaaataattatcaaatcgataaatttcattgagaaaactgtataggtaaagcgttgaaaggccttcggtagtgtgctagtatggagtcatagagttaatcttagcttaacactttgagaataaatgtatctcattgtattagagttaatatctaattattttcctgaggagggattatcttgcgcgagattcaagtatctgaaatcacaaaaacagtccgtcaaatgtgtatggacgcagcttaccacttgccaaaagacatctatgaaggcttgaaaaaaggccgtgaaacagaagagtctccagttggttgcatcgttctcgatcaaatcatcaaaaatgcagaaattgctgatgctgaagatcgtccatactgccaagatactggtatgacattagtattcgtagaagtaggtcaagatgttcatttcgttggtggcgatcttaaagaagctatcaatgaaggtgttgctcaaggttatgtagaaggttaccttcgtaaatccgttgtagcagagcctttgttcaaccgtaaaaacactcaaaacaacacacctgcaatcatctacatcgacatcgttcctggcgataaagtagaaatcaacgtagaacttaaaggtttcggttctgaaaataaatctgacgtagctatgttggtacctgcagatggcgttgaaggcgttaaaaatgcagttcttgaaatcgtaaaacatgctggccctaacccatgccctccaatcgtacttggcgttggtattggtggtactatggaccaagcagcagttatgtccaaaaaagcgttgcttcgtgacattagcgtacctcataaagatgcagactatgcaaaattagaagaagaaatcatggaaatggttaacaaaactggtattggaccacaattgggtggcactacaacttgtatcggtgtaaacatcgaatggggtgcaactcacatcgcaggtcttcctgttgcagttactatcatgtgccatgctgctcgtcatgctcacgtagtactttaatcgataggaggtaaaaacaatggctgaatcaattcgcattaatactgaagaatataatgaagagttttcccgcaaattaaaagttggtgatagcgttcttatcactggtaaaatttactccgctcgtgacgctgctcataaagttatgactgaagctttagcgcgtggtgaaaaattaccaatcgactggacaaataaattcgtttattatcttggaccaacacctgcaaaacctggtgatccaattggttccgctggtcctacaacttccggtcgtatggatgcttacacaccaacaatgcttgaccaaggtatcaaaggcatgattggtaaaggttcccgtaaaccagaagtagttgaatccatgaagaaaaatggttgcacatacttcgcagcagttggtggcgctgcagcattgattgcaaaatccatcaaaaaatacgaagtacttgcttatggtgaacttggtccagaagctttggctgaattgacagttgaagatttcccttgcatcgtagttggcgatactgaaggtaacaacttctacgaacaaggccaaaaaccttacagaaaaatctaatatcaccactgagtgattggaagaggcttgctttagcgagcctcttttttgtatttcaaactagtaacatatacaatagattaatttatcataagaatttcacgcatatgtcctatagtttggtctataaaagacatataatttatgataatatatttatagatttgaatattaaaaaggggcgatatcatgcattctattgaaacaattagacaagaagtacatactgctatggaagaactcttaacagtagcaaaggtacacgaaggacagctatttgtagtgggatgttctacaagtgagatttgtggtaaaaagattggcactgattctcatgaggatgtagcagctgttgtatttgatgagatttataaagccgttagcgaacgaggtttatatcttgctgtacaatgttgtgaacatttaaatagagcccttgtaatggaacgtgaggctatgacttgggaagaggaatgtaatgttgttcctcaattgcatgctggtggcgctatggctatgacggcgtataaccgctttaaggatcctgtaattgttgaatttatacaagcagatgcgggaatcgatataggagatacttttattggtatgcatatgaaacatgtaacggttcctgtacgcttaagcttaaaagaaattggggaagctcatgtgacagcttgtcgtgttcgccctaagagtatcggcggtatccgtgcggtatataatgacgcattattataagaggagaatgtaatgtcaacgtttatcccatatgtcgtattggccgttgtcgtacttggtttctttggagtatgctatgcggtatttaataaaagtgaaagtaacagtgaagcgcattccgtaatatcaaagccttcaaaaacatcacgtccagggcgtttgtatgaacaagagaaggtacatataacacctcgggaaacacatgatggtgttgatgtatacgaggctcatgttgatgaacgaacatctgttagtaagggtgctattcaattacataatcctgtagaacaacatgattttgagaattctgttaccgcagaacctattgttacagaacccgttgttgcagcacctattgatgcagtgactgatacagaaaaaacgatggaaattcctgctgttgaatcttctacagaggatactattgcattaggtgagtctcctgatgtaatggacgaaacacgatgctttgatgctgatgcaacgcagatgtttggcagtgaaaatagtgaagttgtaaatccacaaggtccatctgcattagaagaaacacgcatgtttaatgccgatgaaattaatgaacatttatccaacaaagaagaggatgagccagaaccaattggtccatgggcacaggctgcacaagaggataaacgcgtagcccttgcaattgaaccatttgctcatgctttcggtgtcgttcatggtgatgctatgcaattcgttgcagatattacgcgggatgcattagccgttttaggcattacgaaattaagcgaagtcaaattactattgcaaaatatcgtaattcaagaagcattattggctatgcaaaaagcctatgcaggatctccaacgacttggatgaaaacagctgcgctagaagccttttccgatgtggttcaatcgcctaagtcgagtacaccgtacttagtagcttttgatgcattgcgcgttttgccccatcttacattaggacactttcaagtgatggcgttaacattattattacaatactctcgtaattctaataactatggacgtattcatttccaacattatgtggaaaaatatatcgaaccatttatttcggatttgcctcatgactcatcgttttatcgtcagctagattatttacgttgtactcagcaagaacgtgagtccgtaacattgacgcaattattgagtaattcctatccgtttgtatttaactatcgtggctttacaaaggaagagttattccgtgctactgatggccgcggcgtagatccacgatttgtggtgcgcagcctaaactctaatctttataaattggctgtcgtcgatgaatccttggcacaacgcttctttagagaggctcgtatctctgatccaatggtgcaacgtgatctcatagctttgatgaagagtaaacctactgcatttagaggggaagaggctcgtcaaatcatggacgatattagtccggttctttctgatttggctcgcgtctatgatgaaagtcctatgtgttctatttctcttacattacttggtctctatttaggtcgagctcatgtgaaagcaaccattggggaagaatttgatttatctcattggttctaattctatacatatatacaataaaccgcctaaggctatgcctaggcggttttgtgttgcgtacacgctgtatttaattgttaaatccaaattctacaatttgttgagggtctaataatgtcacatggcggccattgatttcaatgataccctcgtcgcgcaatcttccaagttcacggcttaacgcagtacgtgaaacgttgagggcttccgccatttgttcgcgattatgaggtaacaccagtttttcactgtgttgcatcgtgtatatatctgtaagatatgcgtaaattttttcacgcatgccctttaatgttaaataatgaacttttttggtaagaagcaatgctttttccgataaatcctctaatagattagaaaggattttggtttggcattgatggcaatccggtaatgtttcgataaatgtttcgagtggtataaacataatttttgttggctttaatgcttttatggtggctggccaaagtggatgcttactaaatagcaaggcttccccaaaaatagaggatgcctctaaattggccatgataactcgttggcctagcacattttcacgcgtaagaagagcactgccttccaagataacgccaattccttccataggatctcctgaaatagcgataaagtcgttctttttataattctttataattacttttgcattatgtaagtagctcgttaattctggtatacccaatgtattgaatagagggcaagctgttaagattggtaagtattgtttgataatgtcatcggatagaacttgtttaatcatgtgtgcctcctaatatagtatatagctattttagcccgaattatacatcgtatagtgtgatgctttttataggtaatttgtaatgagtattgtaaaataattatatatgctcttgtgagcagcctgttccaaaagaagagtcaggaaatttttgaaaaagtttttttattgttgctcaagctacagaaattgtatcacctttacgttatactttcaatgtaatcaatcagatacctgataattcatcagtgtaatgtataggttttatattatctagcttgaatgcgaggaagtctcgcaaaggaggatttttaaatgagcatgttctgttatcaatgcgaacaatctgcagcaccaggcggctgtactgtacaaggtgtatgtggtaaaactgcaccagttgctaatttacaagacgaattaactgctgctttagttggtttagcacgcgctttagacgtaaaaggccaaactaaagaaggcgttgactatttaatgcgcggtttgttcatgtgtgtaacaaacgtaaacttctctgaagaccgcgttcaagaattcatcgacgaagtaaacgcttatcatgcaaaaattgatagtgcagctcaaaacttcgattgggaacaattgtggaaaggtgaagaagatatcgtatcccttcgttccacattattgttaggtatgcgtggtatggctgcttatgcatggcatgctgcacgccttggtttccatgatccagaagttgatgcttggttcatcaaaggcatggtagaattcgctaaagaccatagcgctgaagaatggttgaacttgttgatggaattcggccaaatcaacttgaaatgcatggctattcttgataaagctaacactgaaacatatggtactccagtaccaactacagtacctttgactgtagaaccaggtcctttcatcgttgtaactggtcatgaccttcacgacttgaaccaattgttggaacaaacagatggtaaaggcgtaaacatctatactcatggtgaaatgttaccttgccacgcttaccctgaattgaaaaaacatcctcaattgaaaggtaacttcggtactgcatggcaaaaccaacaaaaagaattcgttgacgttcctggcgcattcttgttcactacaaactgcattatgccaccaaaagaaaactacagagctaatatcttcactacagatatggtaggtttcgacggctgtgcacacgtagaagaaaaagctgatggcactaaagacttctccgctgttattgaacgcgcaatcgaattgggcggctacaaagaagctcaagaattcactggcatcaacggtggtcacgaagtaactactggtttcggtcatggtacagtattgggtattgctgataaagtaatcgacgctgtaaaagctggcgcaatcaaacacttcttcttagttggtggttgtgacggtgctaaagtaggccgtaactactacacagaattcgtaaaacaaactccagatgatactgtagtattgacattggcttgtggtaaattccgcttcaacgaccttaacatcggtgaaatcggtggtatccctcgtatccttgatatgggtcaatgtaacgatgcttactccgctattcaagtagcagtagctttggctggtgcatttgaatgtgacgtaaacgacttgccattaacattggtattgtcctggtacgaacaaaaagcagtatgtatcttgttaacattattggcattgggtatccgcaacatctacatcggaccttccttgcctaaattcttctccagcaatgtattgaacattttggtagaaaaattccaattacatccaattacaactccagaagctgatatgaaagctatcttgggctaatcggattaatacctgataacagcggccctaatcccctctctcttatatgattcgggctgttgctatataaattaggctatgccatctttggatggtatagccttttttgtcgtaaaaataaatacgacatatggtattggactatgggtattcgctattatttttttagctgagttatattaatagttaattaatggaatagaggtatgtttgccaacagtggacaaacatacctctattgtgcatatagacaagcctcgatattgattgctatactatagataagaattagattatatctttatttatatatgcatagaggttcattatgaacagtatttttgatattatcggcccggttatgattggcccatctagttcgcataccgctggtgcagcacggcttggcaagatggctcgttgtatatttgggaatacgccgaagaaggttgaaatgactttgtatgggtcgtttgcaaaaacatataaagggcatggtacagatcgtgccttattaggtggtttattaggttttaaagaggatgataaacgcatccgtaatgcgaaggaactcgctgatgaagcaggtttagactatactttcatcgaatcacccctcgatataggccatccgaatgtagttaagtttgatttatacggcgaccataatcgtcatatgtccgttgtaggtcgttcgattggtggtggtcaaattatgatcaccgaggttgatggcaatgatatgtccattacgggcgatgaatttacccttgttgtattccatgaggatagaccaggtgcgatttctctcattagtcaggccttgagtgaatcagatatcaacattgcgtccatgcgcgtgtttagaaagggtaaatacaaagacgcggttatggtaattactacagattccgttgtaaaccctattacagtacaatttatgcgtgaatgcccaggtattcaagatgtgatgacctttgaggccctataggaggatatgatgagttatgaatatgaaacgatagctgatattatccgacttagcgaagagaataacatatcttttggtgatgtggtaatgcgcagtgagctagaacagtatgatcgtagtgaaaaggaaatcgttaaagaaattaagcatcgattaagtatttttgaggcctctattcatgatggtatgcgtcatttacagcggactcaatccaatatgtctggtggagatgcggctcgtttaatgaaacgaaaaccattattcatgagtgaaactgcttataaggcgatgtcttatgctattgcggtcaacgaagctaatgcgaaaatgttcagaattgtggcttgtccaacggcggggtcttgtggcgttatgcctggcgccattcaggccgtggctgagcaatacaaactagatagagatgtcttggtgaaaggattccttgccgcatcaggcgtagggaatgtggttgctaatcgcgcttgtgtagccggtgcggtcggtggctgtcaagctgagattggtacagctgcatgtatggcggcagctgccattgtagaaatgatgggcggtactgcttgtcaggtcgggcatgccgtgtcattgtgtatgaaaaatttactaggccttgcgtgtgatcctgtggcaggtcttgttgaggtgccctgtgtgaaacggaatggcgtgtatgccgttcatgccattacagcggctgaacttgccttagctggtattgaaagccaaattcctaccgatgaggtaattgaggctatgaataatattggccgcgctatgcctgcagcccttcgcgaaacaagtgatggtggtttagccgtcactcaaacaggtcttgccatagcggagaaagtttgttcactataattacatatatacaaaaggttcactattatgagcataatctgcaatgtgcttatagtatgtgagccttttttcataaccctatttgtagtacaataaaaagataaatagaagggagggtagatgtatggaacaagctatacgtttgctgacaattttagaagaagcgggctttgaggctttcattattggcggcgctgtgcgagatatgctcatgcatgtaaagccacacgattttgatatcgttacatctgcccgacctgaacaggtcatctctgttttaggtgatgcgaatattgaaactacaggcatcataggtaagtccttcggtgtggtagtggccattgtagatggaaaacattatgaagtggctacgtatcgcaaggaacgatatggggcagatagccatcgccctgaagaagtcatctatgcagatacgctcgaagaagatgtaaaacgtcgcgattttaccgttaatggtatggcgatgaatcgctataaagaggttatcgacctcgtcggtggacgccgagatattaagcataaggttttgcgcaccatcgggaatccaacggaacggttccaagaggatgcactgcgattatttagagcttgccgattcgttgcaaaactcgattttcttccggataaatccctattagaggccatgccaaaagcattccaccgtgtatcggggctttcactagaacgagtgcgcaatgaattagaccggttattattggaaccagcagttgcaaaagggctagatgtactcgtccaatcgcgcttggcagaatgttcgtgccgcgtcgttgaaaatggggcaattaaagaggttcctatattgccagagctatatcatttggtgggattgcctcaagaaaaggtgtttcacgaatttgatggatggtatcatacattggctgtcgtttcggaaacggaacctgatttaacccttcgttggggcgccctattacatgatgtggcaaagggaatgcctaccattaggcaagttatcaatggacgctacaccgaccgaggccatgataatctaggcgcagagatggcctatgacctattgattcgtctcggctataataagaaatttgctagtcgcgtttcgtggattgttaaaaatcacatgcgctttcatttcttcgtgcaaaatgaagaggcagatgagaaaaaatggatgcgcaaggaaattcgaagtggcgagtttagagatagtcaaagtatgcgggaagcatggttgcaattggcgaaggtttgtgcggccgacgtccttggttgtggtaagccatattccgttactgatggtacattggcgttcggtgaatgcatggctgatttaagcctagaaatgcctgtacatacaaaagatttgaactatgacaaccgcgttctagaagcctgtggcgataatgtggcgaaagggttacaatatttgatgcaacaggtgcaaaatggtgtcgttaacaatacaccggatgatttatatgaagcgcttatccataagctgcagaggtcatcgaagtaatatattgagtgggagaccataatgaatatttcagggaatgataataagcgaattgaatatacggtacgcgtattactgtgtattgctgtcgtattagtggggcgcttattctttttacaaataatagataagtctgatttgcaggcgaagaacttgagccaagtgcaagtggatagaaaattacaatctccgcgcggtacgatttatgaccgcaatggaagaccattggctatgagtgtggttacaaaatccctatatgcggatcctaagatgattaagcaatcgcctagtgaagttgctgaacttatagagccatatgtgacgatgtcaaaagaggacattgtgaaatcattacaagaggatactgcgttcgtatggattgaccgtatgatggaaccagaaaagtcgaaagcggtagcccaattgattgaggataaaaatttagaaggtcttaattttgtagaagagtctaaacgatattatcctaatggtaatttggccgcacaagtgctcggctttgtcggtaccgatgataaaggccttgatggtcttgaaatggtgctagatgatgaattgaagggcggtatccaaaaggaactagttgcaacagatagaaaggggaatgccatctttggctccgtactatctaaatatttacctgataagggtaagagtgtgacactaacgattgatgcaagtattcaatttatagcagaacgtgctctcgataaagccatggaagatacaggcgctaaacatgctagcgttattgttatggatcctaaaacgggtgaaatcttggcgatggcgaaccgcccaacctatgacccaaatcattatagtcaaggttcagaggaagattttaagaatattgcagtaacaaatttgtatgaaccaggttctacatttaagccgattattgcatctgctgcattggcatcaggtaaatggaaactagaccaagtgtataacgacaaaggttcctttgcggccaatggacatgttatgcaaaactggaatggtgaaggctatggtcctgttcgattgatcgatattttgaagttctccatcaatacaggtatggcagaaattggtaccactacaggcgcggatatattatctaaatatgttcgtaactatggatttggttctaaaacaggtattgaattgcctggtgaaggtgatggtatcttatataatcctgatgatatgagtaagcttgatgtagcaaccatgtccatcggtcaaggtattgcggttacaccattacaaatggttcgcgcctttggtgcactttctaatggtggggctatgatgaaaccacatatcatcaagtcttatagtaactctcaaggcgatgttacaagtacgactgaaacatctgttgtgggacaaccagttccggcggaaaccgctaaaaccattgtagatattctagaaaaagaagtatccgaaggtggcggtacaaaagcgatggtagaaggttatcacttcggcggtaaaactggtacggcgcaaaaactagataccaaacatggcggttatctcgacggacaatacattgcgtcctttattggctttggccctgtagaggatccaaaatttgtagttcttgtcgttattgatgacccacaaaagggttcttattatggtagtcaaattgtagcccctgtatttaaggatatcgtgtctcaattagtgcggtattaccaaatgtcaccttctgttaaggatggcgctactgtggcggctgtaccagcggccaaacttccagcagtaaaacctaatggtgatggcagtgtagtattgccagactttagaggctatacatttggagaggtacgtgattggttgcatactgcgggtttatactttaaaccagatggtactggtaaggcgatttcacaggaacaattaccgggaaccgtagtatctcctggtacacctattgtggttcaatttagtcattagtcgcaggataggtaactgcaactatagacaaaacgttatataatagaataagagaaaactaaaggtgcctctataggcacctttttacatgaatttatatgaggtttatccttgagataatgaatggagatatacatgatagaattacgtggtaaagcggtggctgatgcacataaagagattttacaagagaagatgaccggtctagagtccggcacaattacaatggctgtattgctcgttggtgatgatcatggcgctaacatgtacgcggacttcatggagaaaacggccaaaaattttggctatggtttcgtgcgtaagcaactaccaagtacagctacgcatcaagaggtatacgatgcattgatggctttgaataatgatgatgcggtgcatggcatattgccactcatgccgatgccaaaacaaattgatacggagcaattaatcgatgcattgaatcctaagaaggatatcgatggtcttactacttataacatcggtcttgttacagctggtaaaggtggttttgcaccttgtactgcgaaggcatgcctagcaatcttggatcattatggtattcctttagaaggtaaacatgtggtcgttgttggtcgtagccaagtgattggcaaaccggtagcgttgatggtgcttgaacgtcatgctacggtttctatttgccattctcgtacggctgatttagcaaaccatgtacaacaagctgatatcgtgattgctgctgcgggccgagcacatatgattacagctaatatggtgaaagctggcgctgttgttatcgatgtaggcattaatgaattagacggaaaaacagtaggggatgttgattatgatgcggtgagcacggtagtttcggctatcacacctgtaccaggtggtgtgggctctgttacgactacgatgatgttagaagctgtttatgaggcgtaccatgcacgaaatgtcaatcgctgagggtatattagatattgccttagagaccatgaaaaacaatgatgcgtctatcgttcattctgtgcaactcgatttggggttgatgagtggtgtagaacctgatgcacttttattctgctgggatgctgttacaaagaaaacgccggcagagcattcaaaaatagatattcatacgattcctattaaagggcaatgcttagattgtgatacgatatttgatgtacaagattacaaattcatctgccctcattgtgaaagccattttgtaaatactataggtggtcgcgaactacaagtgacatctattgatatagattgaggtatatatgcaagtagaagtaaaaacaaatgtgttggcgaaaaatgatgccattgcatcatcgttacaacaagtatttaaagaaaaaaatatatttgtctttaatctaatgggctctccaggggccggaaagacctccttgctagaagcaacacttcaagatttagttaaagactataaattagctgttatcgaaggtgatttatttacatctaaggatgcagaacgtattcatgccctaggtgtgcctgttatacaaattaataccgttgggggttgccatttagatgctaatatgattcaagatgctataactgatttagatcttgatgaactcgatatgattattatcgagaacgtaggtaatctagtatgccctgctgagttcgatattggtgaggcgatgaaggttaccgttttatctgttacagaaggtgaagataagcctttgaaatatcctcttatttttaaggaatcaaaagctatattgctcaataagattgacttattgccatatgtgccattcgataaagataaagccattaaagatattcgtaatttaaatcctcaaggctatatatttgaaattagctgtactgctaaggatggattggcgccttggttaacatggattagagaacaaatggagaaacgttaatgaaacatatgttatctcgtactgcattgatgatggcagtgttaagtgctttaggaaccgcatcggtgggggccgttgatgcaggaccaacaataccggaagtaaaaaatgcagtagctgttgtgaaagctcctgctgctgatgaatcttcgaaaacaggttggttagcagaacagttggctgtcactgcttttggtgattccttacagtattggcaagctgctagtgaaaatgatggtgttatgccacaagattcaaaaaataatctagcagatatcggacgttcttacacgtctaataatttaccagcgcttggtgatgaggatgactatagtttggctcaaaagcccgagtctgaagatggtacaagtattggacctgtttatcgcattggtgatgtgtatgtacctagtccatctgctcaaaagacggtgaagggtgtattcacaacgtatcatgaaaaagatatagatataactgtgtatacaggcccagataaatcgcgtttagtagataatcagttgcgtggacaaggtgcgacctatttattccctgttggtactattactaatcttcatactactgataaaggattggttacaattcgtgatatcggcgtaggcagttctcgtatggaaatgattttctcctatggtagccccaatgcgatgtggcggaaccagactgatgagtcatatatcttcttatatgaagggcattccgaaaattcatggtcagaaaaaaaggaattttcttcttccgtagcgaatacaaataataatagccaattaccagaaactattcaaaatggaaagttctatgtggctttcaccattaaaaataatacggtagaggctgttgatattttggatggtcaagtatggtctcgatttggattgcctaaggcgcctatgtattccttccatgccggtcagttgactgaggatgactttgtactacgcggattgcatttgaatcagcattttgtgaatgatgcaaatggtgaatggcgtacacagggaatgctgtttgggtctacgttcataggctataatgaatatggtgttagtgttgacggtaattcgcttattaatcgcgttttattaaatgtctacacaccaacacgtcgtggtatcgctatgggtgatactaaatatttattgctctttgtatatggtatgccgacacgtattgctgaatctacaactagtacgggaacggctacggtatatgaatataaaaatccaaggtcgaataattcctatttgcagttcgccttagatgataaaaatcaatatatcaaatcagtgatgttgtctgacagacccgttaaataggtcatcttatgtgaggaggcaaggatatggttactgtacaagatgtgaaagaacggtgggaacaaattcaaaataatgatgaacgcatattgtttatcgttggtggtcctggttctggtaaaagtttattgattcgtgaattatctgaacaaaaagggtggaagtacttagaggcaaaacaacttattgaagaagagtttttgttagtacctcgtgatgaaagaccacaacttgcagaagaagtaattcgtcgtgcattaagtcgcagtgatacagaagttgttcttatcgatggtattaatgtattgtttgcaccgatattaaatttaaatcctcttgaactattaaagactattagtaaaacatatccgattgttgtaggttggcgtggtcatctcgaaggtgatcaattgtacttagaacacaataatgatcccaaacatgcggtagtgacaatcactaaacctgagcgtgttatggttattgattaattagcgttacattaattaatgagggcattatatattgccatgcgttgtgaccacattttgaaagaaggtgaatgacatggaacaatatgtaatagccctcattttaggtgttatagaaggtataacagaatgtattcctgtatcgagtacaggtcatatgattattattgggcatatgctcaattttgaaggcacacatgctgatgtatttgaagtgtttattcagataggtgccgtccttgctatttatacacattatagacgtacatttaacggctttttgaaacggaaaaattggataaaaacacgcggcgtatctttgctacatattagtgcgggcatgttacccgtattaatggctggatatcttttgcaatacattataaaagagtatttatttggacccattcccgttatagtaggccttattataggtgctatatttatgatttatgctgaaaaaagaacagtatctgggcgattggtggattctgtaaataatttgactatatatcaatgctttcaaattggtctatatcaaatgctttgtctatggcctggattttcgcgctctggcgcaaccattgcaggggggatgcttatcggctgtacacggagggccgcagctgatttttcatttatcatggctgtgcctgttatgattatcgtgtgtgtgtatgatttagtgcgtgtcatacatgcattggacttaaatgatattattatgtttatcattggcaccgtcgtatcatatatagttggatatataacggtaaaaggttttttgtggtatctaaatagatcctcgttggcgtcgtttggatattatcgaattatagttgctattctagcaataatctatttatatatgtgagttcctatgaggcaaaaatgaagttggaaaaattctaaaaaaatacttgcgtcagaaaaactttcatgatatattgatatagcactaagggtgactgcgaagaacgaacaaaactttcaaaaaagtttcaaaaagttcttgacacttagtgtggcagatgatacaatacatcttgtcgtaatgatgctggcgtagctcaataggtagagcagctgacttgtaatcagcaggttgtgggttcaattcctatcgccagctccattttatttatggagggattcccgagcggccaaagggagcagactgtaaatctgccgtcttcgacttcgaaggttcgaatccttctccctccaccatttatagcggggtggagcagttggtagctcgtcgggctcataacccgaaggtcgcaggttcaagtcctgtccccgcaaccataatttcacagtgaagtgaacgttcattgtgctggtgtagctcagtcggcagagcgtatccttggtaaggataaggtcaccggttcaatcccggtcactagctccatacatggcggcatagctcagttggctagagcaatcggttcatacccggtgtgtccgcggttcaaatccgtgtgccgccaccattaaacctcacattggtggggatttttttgtatctactataaaaatataattataactcattacatccctcgaaataggatgtaattttttatttattgacatttgtgtattatggtataataatctgtaggaatgtatattccgttgattaaattaggttattatattatagtaatactataaaagtattttgtttttgtgaaggaggatataatcctaatggcaaaagaaaaatttgaacgtacgaaaccgcatgttaacattggtactatcggtcacgttgaccatggtaaaactactttgactgctgcaatcactaaagtattggctgaaaaaggccaagctgatttccaagattacagcatgatcgataaagctccagaagaacgtgaacgtggtatcacaatcaacactgcacacgttgaatacgaaactgaaaaccgtcactatgcacacgttgactgcccaggccatgctgactatgttaaaaacatgatcactggtgcggctcaaatggacggtgctatcttggtatgttccgcagctgacggccctatgcctcaaactcgcgaacacatcttgttggctcgccaagttggtgttcctgcaatcgtagtattcttgaacaaagctgacatggttgacgacgaagaattgatcgaattagtagaaatggaagttcgtgaacttctttcctcctacgaattccctggcgacgaagtacctatcgttgtaggttccgctttgaaagctttggaaggcgacgctcaatatgtagctaaaatcgacgaattgatggcagctgtagactcctacatcccaacaccagttcgtgatactgacaaacctttcttgatgcctgtggaagacgtattcacaatcactggtcgtggtacagtagcaactggccgtgttgaacgtggtcaagtaaacgtaggcgacacagtagaagttgtaggcttgaaagaaaaagctgaacaatacgttgtaactggtcttgaaatgttccgcaaaactttggactctgcagtagcaggcgacaacgttggtgcattgcttcgtggtgttgaccgtaaagacatcgaacgtggtcaagtattggctaaaccaggttctatcaacccacatacaaaattcaaagcagaagtatacgtattgactaaagaagaaggtggccgtcatactccattcttctccaactaccgtccacaattctacttccgtacaacagacgtaacaggtgttgtaaaccttcctgaaggtgtagaaatgtgtatgcctggcgataacgtaacaatgaatatcgaattgattactccaatcgctatcgaagaaggtcttcgtttcgcgatccgcgaaggtggccatacagtaggcgctggcgttgtaactgaaatcgaaggttaattagtagcctttgtaataaataggactccgtaaggggtcctatttttgtgtaaagttctagacaaggaacgccattttttgttatactattcctgtcaggtacatgtgcctggcttttttgagttgcttaaaatcttgacattgctagacacatatgatactattcattagtatgtagtcgagcgttttcgagtacaagagacttattagtaaatataaagcgaggtgtgtccggatgcgtaatgccattactttagcttgcacagattgcaaacaacgtaattaccaaacgaacaagaataagaaaaacaatcctgatcgtattgaaatgatgaaatattgcaaattctgcggtaaacatacattacaccgtgaaacgaaataattcttatcattcattacctgttgatttgaggatgtgaacaaatggcaaagtctaactcagcagtacaacaacgtggcggatttggtaaattcttccgcggcgtaaaggctgaactgaaaaaagtagtctggccaacaagaaaagagctcattaattacacaattgtagtatttttggtaactatatttatcgctttactcatttatgtatttgatgcgatttttgctcaacttattaatatgttgttgcggattgttggatagggggccattacatggaagcagataagaagtggtatgtaattcatacctattcaggctacgaaaataaagttaaaaccactttagaacttaaggttcaatctatgggcttacaagatgttattagtcgaattctagtacctcttgaagatgaaatagatgaaaaagatggggttaaaaaagtagtaaaacgtaaaatatttcctgggtacgtattggttgaaatggaagttaacgaccgttcttggtatgttgtgcgcaacacaccaggtgtaacaggtttcgttggctctgccactaaaccagttccactttctgattccgaagtagaacatatacttaagtctcagggcttggataagaaaccaacaatcaacgtcgatgtagaggttggtgaaacggtacgcattacatccggtgcctttgaagatagactaggtgttattaccgaaattaaccctgaaaaaggaacattgaaacttaatgtagaaatgttcaatcgagatacagaggtagaggtagagttttctcaagttgaaaaagctctttaatatataaatataactctaaaagagcaatcgattttggttgcagtgggaggatatttatccgttaccaccacagtagaatcataggaggtttaattacccatggctaagaaattagttaaacaagtaaaactacaaattgaagccgctaaagctactccagcaccaccagttggtcctgcattaggtcaagcaggcgttaacatcgttgctttcacaaaagaattcaacgaacgtactgctaaacaagctggcttgattattccagtagttattaacgtatatgaagatcgtagcttcgacttcatcactaagactccaccagctgcagtattgttgaaaaaagctgcaggtatcccaaaaggttctggtgtacctaatcgtgataaagtagctaaagtaggtcgcgataaagttcgtgaaattgctgaattgaaaatgcctgacttgaatgctaataccgtagaacaaggtatgcgcatggtagaaggtactgctcgcagcatgggcattgaaatcgttgactaataagcgtacgacttgcgcataagcgcaaatcggtgggagggaattcccgtttgaccacataaggaggatattataatggcaaaagtaggtaagaaatacgctgaagcagtaaaacttattgaagctggtaagttctacgaaccagttgaagcaattgagttagttaagaaaactgcaactgcaaatttcgatgaaacagttgaaatcgctttcaacttgaatgtcgaccctaaatacgctgatcaacaagttcgtggtgcagtagtattgcctcatggtactggcaaaactaaacgcgttcttgtgttcgctaaaggcgacaacattaaagcagctgaagaagctggcgcagatttcgtaggttctgaagagttagtagctaaaatccaaggtggttggagcgacttcgacgtagtagttgctacaccagacatgatgggtcaagttggccgtcttggtaaaatcttgggtcctaaaggcttgatgccaaaccctaaagttggtactgtaactccagacgttgctcgtgcagtaaacgaaattaaagctggtaaaatcgaataccgtactgataaagcaggtatcatttcttgctccatcggtaaagcttctttcgatgatgaaaaattacttgacaattaccgtacaatcgttgatactattatcaaggctaaacctgtagcagctaaaggtcaatacattaaatctgtaaccttgtccgctacaatgggccctggtgtgcctttgaacgtgttcaaattgagcaacgtaaccaaagagcaataatcacatatgtctcttagctgtagacggctggtatgtataatggatgtaaatccgcccgctgaggctgacactagaacaacctaggactagttacgacctcatcgcgtgcgatgaggtcgtttttacgctaagatagtacatagagcaccacaaaatctataaggaggtaatctaatggctgtcactgaatcaaaaaaagcaattgttgctcaaatgaaagaaactctttctgaagcaaaaggtgctgtattgattggttactctggtttgactgttgcgcaagcaactgatcttcgtcgcaaaatgttggctgaaggtgttgaatacaaagtaatcaaaaatactttgactcgcattgctgcaaacgaattgaatcttgaaggtttctctgagcatttagaaggtccaactgcattggctacttctaaagaagatgctgttgcacctgctcgtgtaatcgaacaattcatcaaagctacagaacaagaagttgttactgtaaaagctggtatcgttgaaggcgaagttatggacgctgcaggcgttaaagcaatcgcaagccttccaaaccgcgaaggtatgctttccatgttgctttccgtattgcaagcacctgttcgcaatgttgcatacgctgtcaaagctgttgcagacgctcaaccagcagaagctgcagaataataatttctgcgaattattcattggtcgcttaagaccgatacaataaactattttatggaggaaaactaaaatggcattgaacattgaaaacatcgttgctgaattaaaagaagcaactattcttgaacttaatgatcttgtaaaagcaattgaagaagaatttggcgtaactgcagcagctcctgtagctgtagcagctgcaggtggtgctgacggcggcgctgctaaagattccttcgacgtaatcttgaaagaagctggcgcatccaaaatcaacgtaatcaaagttgttcgtgaagcaactggtcttggcttgaaagaagctaaagctatcgttgacggcgctcctgcacctgtaaaagaaggcgtagctactgaagcagctgaagctttgaaagctcaattggaagaagctggcgcaactgtagaattgaaataattctagccatattaaaaggcgtacctaaaggtacgccttttttgcgttctgattactctgaaacgactctgtataaacttgatattaaaaagcgtgccccgaagggcacgctctattaaaatgaaatactatcttgtactttatatatggtagctccattagttttgcccaatggttttgtaatgacagctgcaggtgaactttcaaagtcttttatattccgattaggtacgataacaatagcatttaactcgtttggaagttgatctaaaaactcatctttggtaatggtaggcataatatttctggccttagcccagcgttcgtcatcagtcttatttaaatatacttgtgttggtatatgttttgtataatacacaaccgaagtataatatccaccatatacgaaaacaggttgattcgtattttctatataagatgtaaactgaataccagattgactcgttaatatgggcgtcacagaaatggtagtggctgagtatagggctagtattggaagcaaaaatagcaatgtgagttgtgaatatgttcgtatgtaatgtctagctattttaaaaatcagagcgcctatgctaactataatcatatactctaagatatagtcgctagcactgacggctacgccaatacctagaatgcatgtatatatgccaaatggtagtgttactaaagaagtacaatatttagatagattagggttaaacagtaaattgataattgcctcactaccccatatgatacatggaataatcgcgggtagtgtataggttaaatacttggttgctacaatagaataaaatagtaatataataacaaaccatatcccgccaagtaggttgaatgattccttccagttcagtttccgcaattgatatataaccactggtgtccatggcaataaagcaagcggcgtaattattagatagtagtaccacacgtcgaatttagggtgttcggatacgagggcacgacctacattttgtaaaccaagaaatccactaataaaatcttggccgtgaatagaatacattgctatgtaccatggactagcaatggcgaaaaataatacaatgcctagcggtgtaaacgcaatctttaagtttcttagtaaacttacctcatccttattggccttactatatttttgaaggaccataaacactaataatatgagtcctggtaatagtaatccgatgggtccttttgttaagactgcaaaggctgatgctatataggctttcatcatcgacgtcttatcattgtttgtaaaagctaggtaagcataaccaaatatggcaagactaaagaaaaataaaaagccatctgttataaccgcatgtgatatataccaaaattgtaaggtgctcatcaagaggatggcactggttactgcgactgggacggactgtttgatacggtataccatgtgatacatgagcgatacactggcccctgcaattaatgtgttggggatgcgtgatacaaaatctgatataccgaacaatttatagcaaatcataagtgcccaatatgttaatggtggtttatcataccatacatggtcgtaaatcataggtgaaatccatgaattgtgagttaacatggttatggcacttaatacatagttagattctactggatcggtaatcggtatataggcattataaaaaccatagcttatgactgtaattaaaaacagcgctataattcgtgttcgatgacttatgttaattttaaacactcctttatgttaatagtatatgcttatattttactatactttgcaatgttcagatatgtcatgagagaaattatatagaatattgtttttatggaataccttaaatgacttttgtgtatacaaaatacatgttataataaattcaaaagaaagaccattttatacaatgtaatttgaatgatatacacattcagtggaaagaaggatagcaatgagaaaagaacatgatttcctaggtgaattagaagtagctgatgagttatattatggtgtacaaacgattcgtgcgttagaaaactttcacattacaggaaaacatttagaccaagattttattaaagctttagcaatggtaaaaaaggcctccgctttggccaatatgaaaacaggtcgccttaatgtatctattggtaaagccattgttcaagccgcagatgaagttatcgccggcgaattcgcagatcaatttccagtcgacccaattcaaggtggtgcaggtacttctgtgaatatgaacatgaatgaagtattagcaaaccgcgcttgtgaaattttgggtcatccaaaaggatcgtatgatattgtaagtcctaataaccattgtaatatggcgcaatctaccaatgatgcatttccaacggctattaaggtttgtgcgattttgaaatctaaacctttgcttgaagcgttgcaacgccttgtggatgaacttgagaaaaaggctgatgagtatagcgaaattttaaaaatggggcgcactcatttacaagatgcggtgcctattacattaggtcaagaaatgggtgcttatgcatcaggtgttcgccgtggtattagacgtattaaatctgctgttgaaggagcacatgttatcaatatgggggctactgccgttggtacaggccttaatgcagaaccaaattacattcatgacgtagcatacgaacttagcgaagtcgtaggcgaaccattctatactgcagataacttgattgatgctacgaacaacacggatatctttgctgatatctctagtggtttgaaggttacggctcttgtattgattaaaatggccaacgatttccgtttgatggcatctggccctcgttgtggtatcggggaattgaaattacctgctcgtcaacctggttcttccattatgcctggtaaggtgaaccccgttatcgccgaagtattgaatcaagtatgttatcaagttatcggtaacgatcttaccatttctttggctgtagaaaatggtcaatttgaattgaacgtaatggaacctgtattggcttacaatttgttcaataatctttgctaccttaaaaatggtgttaacacattcgttgataaattgcttatcgatcttgaagtagaccgtgaacaatgcgaatactggttgaaccgttctgttggtatcgtaactgcattgttgcctcaccttggttatgaaaccgcttctgcacttgcaaaagaagcctacacatctggtcgtgctattcgcgatattatcctagaaaaaggtttattgactgaagatgaaatcaatcatattctttctcctaaagaaatgacacgccctggtattgccgctgctgatttgttaaaacacaaaggaaattaatttttattaatgaactttgtcatataatgtgaataatacgtgaaaatgtgaaagctgtcagccttttggttgacagcttttttatatgatgatagaattataaattgcaaaagtagcattttctacttttccatgtagaagctataacttacgtattaagggttttcttccaaggttgtgcttggataatgaacagagcaaggttattttttaaataaaaaagggccttgcttatttggcgttattaaagcaggaaaactgagacctgtaagatgtcttttctatgccgttatagaaatatggtggaccagtgtatttgaaggagggaaagcacatatgttcaaacctgaacaggtaggcaaacggactcgttatacatatgcaaaaattaacgaagttattaagatgccgcatttgttggacattcagcgtaaatcgtacgaatggttcttggagagcggtttacaaaatattttcaacgatatttctccgattaaagacaattcaggtaatttagtactttcttttgaaggttttagcttaggtgagcctaagtatgatattaatgagtgcaaaaatcgtgatgctacatacgcagcaccacttcgtgtaaatatccgtttggttaataatgatcctgaaaatatggacattaaagaacaagaagtatttatgggtgatttcccattgatgacggatacaggcactttcattatcaatggtgcagaacgtgttatcgtatctcaattagtacgttcccctggcgtttactatggtaaagaaatcgataccatgggtaatcgtttatatgaatccacagttatcccaaatcgcggtgcttggattgaattagaaacagatgctagcgaagttgtagccgttcgtatcgaccgtaaccgtaaattaccagctactgtgcttgttcgtgcattaggttgggatactaatgaaagtattcttgatcttttctggaacggtcaaacagatgaagatggtttaccagtatatgatgaacgcattgttcgtacattagaaaaagatacaactcaatctgctgatgaagcattggtagaaatttataaaaaattacgtccaggtgaacctcctactgtagaatctgctcgtaatttattcgataatttattcttcgatgctcgccgttatgatttagcgcgcgtaggtcgttataaattaaataaaaaactaggatggcgtcaacgtatgttgggtcaaacattggcacaaccaattgttgatactgaaacaggtgaaatcatccttgatgcaggcgtacaagttggggaagaacaacttgatatcgttgctaagagcggtgtatttagcggcgaaggttttgctgaattctatatcactaattcagatggtgtagtatccaaaatcatttgcaacaactgcaacttagaatttaaccatcgtacagttacaagagaagatatgattgctaatatctcttacctcttgaacttgatggatggtgccggtcatacagatgatatcgaccatttgggtaaccgtcgtcttcgttgcgtaggtgaattgttacaaaatcaattccgtattggtttgactcgtatggaacgtgttgtacgtgaacgcatgacaattcaagaaattgaatctattacgcctcaagcgttgattaatattcgtcctgttgtagcagcgattaaagaattctttggttcttctcagttgtctcaatttatggaccaaacaaacccattagcagaattgacacataaacgtcgtctatctgcccttggacctggcggtttatctcgtgaacgtgcaggtttcgaagttcgtgacgtgcatcactctcactatggccgtatgtgtcctattgaaacaccagaaggtcctaacatcggtttgattaactccttatctaactatgcgaaggttaatgaattcggtttcatcgaggctccataccgtaaggttgaaaaaatttacggcgaaggtgctgacgcggataaggttgtaaaagtacgcgtatctgaaagcgttgcttatatgactgccgatgaagaagaaggcatgacaattgcccaagcgaactcccctcttgatgcagacggttgttttgctaatgaccatgtagcatgtcgtcgtggtcatgacgtattagaagtaacacctgataaggttgattacatggacgttagtccaaaagaagttgtatccatcggtacagctatgattccattccttgaaaacgatgatgcgaaccgtgccttgatgggtgcgaacatgcaacgtcaagcggtgcctttgctccgtgctcaagcacctttagttggtacaggtatggaatatacagcggctactgactctggcgtttgcgtattggcacgcgaagctggtaaagtcgtacgttgctggggtaatgaaatccacgttcttcgcgatagcgatggtcgtgttgatacataccgtttgaataaattccttcgttctaaccaatccacatgctttaaccaaaaaccaatcgttaatcgtggtgaccatgttgtaaaaggccaagtattggctgatggtcctgctactgatggtggtgaattggctcttggctttaatgttcttgtagcgttcatgccttgggaaggttataactacgaagatgctatcttgcttagtgaagaactttgcaaagaagatatctatacatccattcatattgaagaatacgaatgtgatgcgcgcgacactaaactaggtgccgaagaaatcactcgtgaattgcctaatactggtgatgatacacttaaaaacctagatgaagatggtatcatctgtatcggtgcagaagtacatcctggtgatatcctcgtgggtaaagctacaccaaaaggtgaaactgaattgacaccagaagaacgtttgttacgtgctatctttggtgataaagaacgcgaagttcgcgatacatctctccgcgtacctcatggcgaatgtggcaaggttgtagacgttaaagtcttcactcgtgaaaatggcgatgagttacaaccaggtgtaaacaaacttgttcgcgtttacatcgctcaaaaacgtaaaatccatgaaggcgataaaatggccggtcgtcatggtaacaaaggtgtcgtttctcgcgttatgagaaaagaagatatgccattccttccagatggtactccagtacaaatcgtattgaacccattgggcgtaccttctcgtatgaacattggtcaggttcttgaaactcacttaggttgggctgttcaaggcttgggcatgaaaattaaagctacagatcttcatattcaaaatgtattgaaagaagcgcgtactgatgaatcctactgggaacaaatcgatgcaattcgcaaattatatgctgaaattgaagaattagaagctaaagcaaaagaagatgtaacagtagctcattttgatatcgatgaaaaaatcatcgatttgaaatctcaaatcttaggtcacgtagaagaagccgctcaaaagaaattggctgcacttggtggtgaagctcgttacaatgaattgaaagcattagaatctaaatacaatgcacttcacatggaatatttcggcactgaagaagaagcgccagaaatggatccagctctcgttaaagaattagaacgcatcaataaagtacgtgctacattgaatcatattgaagaagctcgtgctaaacgcgttgaaattcgcaaagatttggaaaaattaggctatgactacgatacatatggtatgccaaaacctgatgtagctggtattcatatcgctacacctgtatttgatggtgcccatgaaaaagatgtattcgaaacattggatatcgctggtcgcccagatgatggtaaaactgtattgtacgatggccgtaccggtgaacctatggataaccgtgtaacggttggttacgtatacatgttgaaacttcaccatttggttgatgataaaatccatgcgcgctccacaggtccgtactcccttgttacacaacaaccattgggtggtaaagctcaatttggtggccaacgtttcggggaaatggaagtttgggcccttgaagcatatggtgcagcctatactcttcaagaactattaactgttaagtctgacgacgttgttggtcgtgttaaagcatacgaaaagatcgttaaaggcgaaaatattcctgaaccaggtgtgcctgagtccttcaaagtattgctcaaagaacttcaaagtatcggtcttgatgtaaaaatcttgaacgaagatcaagaagaagttgttatgaaagaacttgatgacgaagatgaagtggtagaaactggtattgaagatgttatggacggcgatgctgttgaaacagatgaagtaacagttgtagacccagaagcagaggaagaagtatctaatggtggcgatgatgatattcttagccaattagcatatccaattagtgaatcctccgcagatgaagactgatactgaatattaggaagggagcgatagtagtgctagacgtaaatgaatttgattccatgcgaatcggtttagcctctccagagcaaattttagaatggtctcatggggaagttaaaaaaccagaaacaattaactaccgtacgttaaagccagaacgtgatggtctattttgcgaacgcatttttggaccaacaaaggactgggaatgtcactgcggtaaatataaacgcatccgccataaaggcgttgtctgcgataaatgtggcgtagaagtaacgcgtgctaaagtgcgtcgtgaacgtatgggccatatccaattggctacacctgtatcccatatttggtacttcaaggggatcccatctcgtatgggccttatccttgatgtatctccacgttccttggaacgcgtattgtattttgcttcctatatcgtagttgatcctgcaggtagcccattggcaaaacgccaattgttatctgaacaagaataccgtgaatacgaagctcaattcaatgaagaaggatatactatcggtggtaaatccgtagttatcgaaactgtggcacaacgtaatgaacgtttggctatcgttcgtgaagcacaacgtaaagaacgttataatgcagcacttcgtgaagatgctacaattccagaagctgataaagaatatgaagaattaactcgtgaagaacgttacgaattaggtgctacagaagaaatcttattcgtatgtatcgacatgggtgcagaagcggtaaaagcattattatctgaacttgatttagaacaattaaatgctgaattgcgcgaagagttgaacactgcaagtggtcaacgtaaaatccgtgctgttcgccgtcttgaagtagtagaagcattccgtcaatctggcaaccgtccagaatggatgattatggatgtcgttcctgttatcccacctgaattgcgccctatggttcaattagatggtggtcgctttgctacatctgaccttaatgatttatatcgtcgtgttatcaatcgtaacaaccgtttgaaacgtttgttggacttaggtgctcctgatatcatcgtgcgcaatgaaaaacgcatgttgcaagaagcggttgatgcattgattgataatggtcgtcgtggccgtcctgttacaggccctggcaaccgcccattaaaatccttgtccgatatgcttaaaggtaaacaaggtcgtttccgtcaaaacttgctcggtaaacgtgttgactactccggtcgttccgttatcgtagtaggtccagaacttaaaatgcatcaatgtggtttgcctaaagaaatggcattggaattgttcaagccattcgttatgaaacgcttggtagaacgtggacaagcatccaatattaaggctgctaagcgccaagtagaacgcgtaggtcctggtgtatgggaatccttggaagaggttatcaaagaacatccagttctcttgaaccgtgcccctacattgcatagacttggtatccaagccttcgaaccaattctttgggaaggccgtgctatcaaattgcatccattagtatgtacagccttcaacgccgactttgacggtgaccaaatggcttgtcacttaccattgtccgtagaagctcaatccgaagctcgtacattgatgctatccgttcataatatcttatcaacaaaagatggtaagccagttgctattccatctcaagatatgattttgggtacttattacctaacagttgtacgcgaagatactcgtgataaagcaaaaacatttgctacatatgacgaagtaatgcttgcttatgattctcatgttatcggattgcaagatattttatacattcgtttgcctgaacacggtcgcgtagaaactacagctggtcgtttgatttttaacaacgctttgttcccagaattatggcaatatgaacaaaaagaagacggtacttacacattgggtaaggttatggataagaagacggttggtaaacttgtagatcaatgtttccaattattcggcaatgaaaaaactgctgaactcttagacagaattaaatctcttggttactcctttgcacgtcgtgcaggtatgacagtagccattgcggatattaaagtaccagaagaaaaattcgatttacttgatactgcagaacaagaagtagaaaaagtatctcgtctatatcgccgtggtcttattacagaagaagaacgttatcgtaaaactatccaattatggacaaaagcaacagaagatgttactgatgccatgatggataatatggcgcgcgataaagatggcttcaaccctgtatatatgatggctatctccggtgcccgtggtaacaaacaacaaattcgtcagcttgctggtatgcgtggtttgatggctgacccatctggtcgtatcatcgacttgccaatcaaggcaaactttaaagaaggtttgactgtattggattactttacgtcctctcatggtgctcgtaaaggtttggccgatacagcacttcgtactgctgactctggttatttgactcgtcgtcttgttgacgtatctcaagacgttatcgttcgtgaggacgattgtgacgttgtaggtatcgatctcgttcgtgaacgcgctcgtttggctacatctccacgtcaagctcttgaaatgttgaaagacaaattgattggccgcgttctcgataaagatgtagtaaatgctgaaacaggtgaattggctgttcctgcagaaactattcttgatgaacaaagcttagcagatatcgcagatgctggtgtaacagctatctccttgcgcggtgcacatttgggatcggatagcgatattaaccatactaatttggtacaaaagattcttcttggtgaaagcgacgatagtatccgtgcgacattaaaagaaactatgattcaaaatatgttgaacaaggatactgtgaatgctatcgtggacagcaatggcgtagaaatctaccctgctgatacacgccttacagaagaaggaatcgaagcaattctaaactctgatgtaaaagaggtacaagtacgcaataatgaaatcaacggtattgaagtagaagctatcgttgaaggtacgggtattattgaaccattgaaagaccgtatcgtaggtcgtattgcagctgaagaattaatcaataaggaaactggtgaagttatcgttccattgaatggtgaaattactgaagaacttgctgatgaagttgtgaaacattacgatgttgttaaaatccgttctgtattgacttgtcgcagcccttatggcgtatgtcgtaagtgctatggtcgtgaccttggtacaggtgaccaagttcaagtcggtgaagcagttggtatcattgcggctcaatccatcggtgaacctggtacacaattgacaatgcgtacattccatacaggcggtgtcgcaggtgacgatatcacacaaggtttgcctcgtgttgaagaattgttcgaagctcgtaaaccaaaacgtaatgcaatcattgctgaaaatgaaggtgtagtacgtgttgtacctaacgaaggtaaaaaaggtactaatactatctttattacaggtgaagatggcattgaactcgattacctcatcccttatggttcccgcattatcgttaaagacggtgatgttgtatccttgggcgcacgtttgacagaaggttccattaatcctcatgacatcatgcgtgtaatgggcacacaagcaacacaacgttacctcgtatacgaagtacaaaaagtatataaatctcaaggtgtagaaatcaacgataaacacattgaagttattgttcgtcaaatgcttcataaggttaaaatcgaaactgctggcgatgcagatatgcttcctggcgacatgattgatatcaacacatttgatgaagaaaatcgtcgtttaacattgaatggccgtgaaaatgctactggtaaacgtacattgttgggtattactaaagctgcgttggctacagattccttcttgtctgctgcatcattccaagaaactacacgtgttcttacagatgctgctattaagggcaaaatcgatccattattgggtcttaaggaaaatgttatcatcggtaaattgattcctgccggtactggtatgagccgttaccgtaaaattgaagtagttaaaaaggctcctgaaattttggaattaactgatgacggtgaaatcatagaaaaataagattttatagcttgtagctatgattagaaaataaaagagatattcctagattgttatataatttagggatatctcttttttgttatatcaattttgcataacaagactgcgccaatagaattgaatatgtataaagtgtataaaaataagcgaaattatctatatttgtataaaaaaacgagaatacttcatgtaattcttataaatgatacacacggataggtgtacatattaaatacagtgaaatagcggttttgagtgttaaaaaacctttgacatgcgtttgagtaattgatatacttacatagtgcttagagggcaagtgcgccctgagcatagtttcgtaaggagaagatgtaaccatggacattgcccatttggcatcggcgaacaagacaataggtgctaagcaaacgattaaatcaattgcaaaaggctctgttaagtttgtgtttctcggctgcgatagtgatagctacgtagtagatcctgtacggatggcttgcgtggaacataatataccgttcgacgataagcatacgatggatgaccttggtcgtgcgtgccgcattaaggtgcgggccacagcggtaggcatcctacgttaatctcggtaatatccgatgtaacaatttgttatgacggatcaattataaatctcaaatttggaaaggaggtgcccaaatgccaacaattaatcagctagtacgcaaaggtcgcatgagcttgactaaaaaatctacagctccagcgcttcaagaatctccacaaaaacgtggtgtatgtactcgtgtgtacacagctactccaaagaaaccaaactccgcgcttcgtaaagttgcccgtgtacgtttgacaaacgctattgaagtaactgcttacattccaggcattggtcacaatttacaagaacacagtgttgtacttatcagaggcggtcgtgtaaaagaccttccaggtgtgcgttatcacatcgttcgtggtgcattggatacagctggcgtacaaaatcgtatgcaaagtcgttccaaatacggcgcgaaaaaagctaaaaaataattttagccattaaacgaaattaacacacatcaatataaaggaggaattgaacatgccaagaaaaggccctgttccgaaacgtgatgtacttccagatccggtgtacaacagcaaattagtaacacgtttcattaacaaagttatgtacgatggcaaaaaaggcattgctgaaactatcgtatatgatgcatttgaaattattcgttccaaaatgggtcaagacccaatggaagtttttgatcaagcattgaaaaatgttatgcctgtacttgaagtacgtgctcgccgtatcggtggtgcgaactaccaagtgccagttgaagttcgtgctgatcgccgtcaaaccctcggtattcgttgggttgtaaactacgctcgtcttcgtggtgaacgcactatgaaagaacgcttagcaggcgaattgatggacgctttcaacaatgcaggcgctgcaatcaagaaaaaagaagatactcataaaatggcagaagctaataaagcatttgctcattatcgttggtaataagaggtgacaactgtggcaagagagttttccctagcaaaaactcgtaatatcggtatcatggctcacatcgatgctggtaaaacaacaactacagaacgtatcctctactatacaggtattgttcacaaaatcggcgaagtacatgaaggtgctgctacgatggactggatggcgcaagaacaagaacgtggtatcacaatcacttctgcggcgacaacatgtcactggaaagatcatcgtatcaatatcatcgatactcctggtcacgttgactttactgtagaagtagaacgttctctacgtgtacttgatggctccgtagcggtgttcagtgctaaaggtggcgttgaacctcaatccgaaacagtatggcgtcaagcatctaactacggcgtacctcgtatcgcttatgtaaataagatggatacagtaggtgctgacttcttcaacgtagttgatatgatgaaatcccgtttgggtgcaaattccgtagctatccaagtgccaatcggcgctgaagatactttcgaaggcatcatcgatttgatgactatgaaagcggaaatttacaaatccgatgacggtaaagaatatgaaatcactgatatcccagcagaatatcaagaagtagctgaagctcgtcgcgaaatgatgatcgatgctatcgctgaaactgatgacgatattatgatgaaatatttggaaggtgaagaaatctccattgaagaattgaaagcagcattgcgtaaagcagttattgctaaccaattgttcccagttctttgtggttcttcctacaaaaacaaaggtgtacaaatgttgttggacgctgttgtagattacatgccagctcctatcgacattccagctattaaaggtaccgttcctggtactgaagaagaaactactcgtccttcttccgatgatgaaccattctccgcattggcattcaaaatcatggctgacccttatgttggtaaattagcgttcttccgtgtgtactccggtacattggaatccggttcctacgttttcaactccacaaaaggtaagaaagaacgtatcggccgtattcttcaaatgcacgctaacactcgtaaagaaatcgacatggtttacgctggcgacatcgctgcagctgtaggcttgaaagatactactactggtgatactctttgtgatgaaaagaatcctgtaattcttgaatccatggaattccctgaaccagttatctccgttgctgttgaacctaaaacaaaagctgaccaagaaaaaatgggtacagctcttgctcgtttggcagaagaagatcctactttcaaagttcgtactgatgaagaaacaggtcaaactattatctccggtatgggcgaacttcacttggatatcatcgtcgaccgtatgaaccgtgaattcaaagtagaatgtaacgtaggtaaacctcaagtagcttatcgcgaaactatccgtaaagctgttaaagctgaaggtaaattcgttcgtcaatctggtggtcgtggtcaatatggtcactgctggttggaattaattcctcaagaaccaggtgctggcttcgaatttgaaaataaggtcgtaggtggtgcaattcctcgtgaatacatcggacctgttgaaaatggtgttaaagaagctatggaatccggtgttatcgctggttatccaatggttgacatcaaagttatcgtatttgacggctcctaccatgacgttgactccaacgaaatggccttcaaaatcgctggttccatgggctttaaagaaggtgctcgcaaagcagaccctgcattgcttgaaccatacatgtccgtagaagtagacgttcctgaagaatacatgggcgacgttatcggtgacttgaactctcgtcgtggtcgcatggacggcatggaagctcgtaatggtaaccaacatatcaaagcatatgttccattgagcgaaatgttcggttacgcaactgaccttcgttccaaaactcaaggtcgcggtaactactccatgacattcgatcattacgaagaagttcctaagaaaattgctgaagaaattcaagcaaagaaaaacggttaatcttacattagattaatagaattactattttcctcggaggataatttaaaatggctaaagaaaaatttgaacgtacgaaaccgcatgttaacatcggtacaatcggtcacgttgaccatggtaaaactactttgactgctgcaatcactaaagtattggctgaaaaaggccaagctgatttccaagattacagcatgatcgataaagctccagaagaacgtgaacgtggtatcacaatcaacactgcacacgttgaatacgaaactgaaaaccgtcactatgcacacgttgactgcccaggccatgctgactatgttaaaaacatgatcactggtgcggctcaaatggacggcgctatcttggtatgttccgcagctgacggccctatgcctcaaactcgcgaacacatcttgttagctcgccaagttggtgttcctgcaatcgtagtattcttgaacaaagctgacatggttgacgacgaagaattgatcgaattggtagaaatggaagttcgtgaacttctttcctcctacgaattccctggcgacgaagtacctatcattgtaggttccgctttgaaagctttggaaggcgacgctcaatatgtagctaaaatcgacgaattgatggcagctgtagactcctacatcccaactccagttcgtgatactgacaaacctttcttgatgcctgtggaagacgtattcacaatcactggtcgtggtacagtagcaactggccgtgttgaacgtggtcaagtaaatgtaggcgatacagtagaagttgtaggcttgaaagaaaaagctgaacaatacgttgtaactggtcttgaaatgttccgcaaaactttggactctgcagtagcaggcgacaacgttggtgcattgcttcgtggtgttgaccgtaaagacatcgaacgtggtcaagtattggctaaaccaggttccatcaacccacacacaaaattcaaagcagaagtatacgtattgactaaagaagaaggtggtcgtcatactccattcttctccaactaccgtccacaattctacttccgtacaacagacgtaacaggtgttgtaaaccttcctgaaggtgtagaaatgtgtatgcctggcgataacgtaacaatgaatatcgaattgattactccaatcgctatcgaagaaggtcttcgtttcgcgatccgcgaaggtggccatacagtaggcgctggcgttgtaactgaaatcgaaggttaatttaaccttttatgctcatcgtagtgatacgttgggcacaatatccacgacatgtaagagcggcatgttctgccgctctcgtgttgtgttttcaaactatgaagtagaaggttgcctctgcggaggagaatttctatggagcagttcattcacgaaatggacgacaggaggaattattaataatggctaaacagcaaaaaatccgtattcgccttaaggcatacgaccacaaagctctcgatcaaagcgctgctaagatcgtagacactgcaaaaagaaatggcgctatggtatctggtccgattccattgccaacagaaaagaatatcttcacgattcttcgttccgtacacgttaacaaagattcccgtgaacaattcgaaatgcgtacacataaacgcttgatcgatattcttgaaccaaattcgaaaacagtagatgctatcactcgtttagatttaccagctggtgtatctattgaaataaaactataaggaggtgcgataatgtctaaagctattttgggtaaaaaattaggaatgacacaagtcttcacagctgaaggccaattagttcctgtaacagtagtggaaactaccccaagcgttgtagtgcgcgttaagactgttgaaacagacggttatgaagcagtacaaattggttatggttccattaaagaaaaacatttaacaaaacctgtaaaaggtcagttcgacaaagctggcgtagctccagttaaatatcttcgcgaagttcgcgttgacagtgcagctgactacacagtaggccaaactctggcagctgatatcttcgcagaaggtgaattggtggacgtagtaggtacaggtaaaggtaagggttttgctggcacaattaaacgccataatttctctcgtggtcctgaaactcatggctccaaatctcaccgtgaacctggttccatcggtcctatgatctccggtggcggcggtaaggtatacaaaggtaaaaaactccctggacaaatgggtggttacagagttaccgtacaacgcttatccgttgtgaaagttgatgctgaacgtaaccttttattggttaaaggtggtatcccaggcgctaaaggtagcttggttatggttcgcaacacggttaaacctgttaaataatcatttgtcgaaaggaggattatgtaatgcctacagtagcaacatataatcaatccggcgttaaagtcggtgaaatacagttaaacgatgcagtattcggcgttgaagtaaacgaagccgttatgcatcaagccgtagttcgtcaattgtctaacgaacgtctcggcacacatgcaacaaaaactagaggtatggttcgtggcggtggccgtaaaccttggaaacaaaaaggtactggtcgtgcacgttccggttccagccgttccccaatctggattggtggcggtactacatttggtccacaacctcgcagctattacaaagctatgcctcgtaaggctagacgtttagcagttaaatctgctcttagcgataaggtaaataatagcgaattatacgttttggaagaaatcacattagcagctcctaaaacaaaagaagtattgaatattatcaatagcttcaatgttggcgatgcaaaagtattgttcatcactgaaggtgatgtaaatgttgaacgttccgctcgcaacatccaaggtgttaaagcattggcttgcgaaggtatgaacattttcgatcttcttcattacgataagctcttcattactaaaggcgctgtcgcaaaaattgaggaggtacttggataatgcaattacatgatgtactaatccgtccggttattaccgaaaaatccacaaagcttatggaagaaaacaaatacacgttccgcgtgcctttgactgcaaataaagtgcaaatccgtcaagctgttgaaaaaatcttcaatgtaaaagtagaaaaagtagctactattcgcgtattaggcaaaactaaacgcatgggtcgtacacaaggtaaacgtagcgattacaaaaaagctatcgtaactttaaaagctggcgaatccattacattatttgaaggtgtctaagagtctagttgtaaggaggcccactaatggcaattaaatcatttaaaccgtactccgctggtcgccggtttatgacagtatccgccttcgacgaaatcacagcaagcaaaccagaaaaatctttgttagctaagatttcccaaaaaggtggtcgtaataatactggtaaaatgacagttcgtcaccaaggtggcggtcataaacgtcaataccgtatcattgacttcaaacgtactaaagataatatcccagctaaagtagcaacaatcgagtatgatcctaaccgttcttctcgtatcgctttgcttaactacgctgatggtgaaaaacgttatattttagctcctaacggcttaaaagttggtgacgttgtattctccggtcctgaatctgatattaaacctggtaactgcttaccattggctaatatcccagacggtactcaaatccacaacatcgaattaaaaatcggtaaaggcggtcaaatcgttcgttccgctggtacatccgctcaattgatgggtaaagataatggctatgctattcttcgtttaccatctggcgaaatgcgccgcgtacgtcaagaatgccgtgcaactgtaggtgttgtaggcaacgctgaacacagcaacctagtaattggtaaagctggtcgtcatcgttggatgggcgttcgtcctggtaaccgtggtgttgtaatgaacccttgtgaccatccacatggtggtggtgaaggtaaatctcctgttggtcgtaaacatcctgttacaccttggggcaaaccagcacatggtgttaaaactcgcgacaagaaaaaagcttctaacagcttaatcattaaacgtcgtacaaaataggataaaggaaaggagataaaatagtgtccagatctattaaaaaaggccctttcgtagcagatcatttgcttaagaaagttgatgctttaaacgaaactaacgaaaagaaagttgtaaaaacctggtcccgtgcctctactattatccctagttttgtaggccacacaattgctgtgcatgatggtcgcaaacatgtacctgtatttattacagaagatatggtaggtcataaattaggtgaattcgctcctacacgtactttcaaaggtcacggtaaggacgaaaaatctacaggcaaaaaataggaggaataattaatggaagcaaaagcaatcgctagacatatccgaatcgcgcctcgtaaaatccgtatcgttgctgatttagtgcgcggtaaaaacatcggcgaggcatttgccatcttgaagttcactccgaaagttggcgctgatgtagtcgaaaaagttatgcgttccgcaatcgcaaatgcagaacacaattttgatatgaatgtggataacttatatgtatccgagatcttcgttgatcaaggtcctacattgaaacgtattcatcctcgttcccgtggacaagctttcaaaattttgaaacgcactagccacgtaacagtagtagttaaagaaagagcttaagaaggagggaaacagagtgggtcaaaaagttaatccacacggtttgcgtgtcggtatcgtaaaagattgggacgcaaagtggtatgcagaaaaagatttcgctgctaatcttcatgaagacgtaaaaattcgtaacttcttgaaagaaacccttttcattgctggtatttcccgcattgaaatcgagcgtacaaataaacgtattaaattgactatccacactgcaaaaccaggtatggttatcggtcgtggtggtgctggtatcgaagatatcaaaaaagcaatgactcgtttcactgataaacaagttgacgtaaacattgcagaaattaaacaagcagacatggatgcagttcttgttgcagaaaatattgctggccaattagaacgtcgtatcggtttccgtcgtgctatgaaacaagctgttggtcgtacaatgcgcttaggtgcaaaaggtatcaaaatcatggttagcggtcgtcttggtggcgctgaaatcgctcgtagcgaatcctaccgtgaaggttccattccattgcacacacttcgtgcgaatatcgactacggtactgctgaagctcatacaacttatggttgtatcggcattaaagtatggatttacaaaggtgaagttttgccagaagcaaaacaacctgctaagaaggaagaaggtggcaagtaatgcttattccaaagcgtgtaaaacatcgtaagcaattccgcggccgtatgaaaggtcgtgctatgcgcggtaatacagtgtctcatggtgagttcggcttggtagcatgcgaaccatcttggatcacaaaccgtcaaatcgaagctgctcgtattgctatgactcgttatatcaaacgtggcggtcaagtatggattaaaattttccctgacaaaccaatcacagctaaaccagctggtactcgtatgggttccggtaaaggttctcctgaatactgggtagcagtagttaaaccaggtcgtgtaatgtttgaaatggacggtgtgccagaagctgtagctcgtgaagctatgcgtcttgcaagccataaacttccaatcaaatgcaaatttgttgttaagggtaaagaattgggtggtgacgtaaatgaaggttaatgacattcgcaatatgagcgctgccgaaatggaacaaaaagtttccggtcttaaggaagagttatttaacctccgttttcagcttgcaacaggtcaattagagaatcctatgcgcattcgtgaagttaagaagacaatcgctcgtattaaaactgtacaacgtgaagttgaacttaaatctgaaaacgcataatgacagatttgttaaagtttgaaaaggaggcttaaaatcgtggcagaagaaagaaacgtacgtaaagtccgcgtaggtaaagttgttagcgacaaaatggaaaaaactgttgttgttgctgtagaacgtaaagtacctcacgcattatataataagccaatggttagcaataaacgcttcaaagctcatgatgaaaataatgagtgccgcattggcgatacagttaaaattgtagaaactcgtccactttctaaagataaatgttggagagttgttgaaattcttgaaagacaaaaataagagtgatgtaaggaggaatagacgatgatccagcaacaaacaattttgaatgttgccgacaacactggtgcaaaacgtattatgtgcatccaagtcatgggcggttcttatcgcaaattcggcaatatcggtgacgtaatcgttgcttctgtaaaagatgcatcacccggtggcgttgtcaagaaaggcgacgtagtcaaagctgttattgttcgttctaaaaaaggtatccgccgtcaagacggttcctatatccgttttgatgaaaacgcagcagtagttattaaagaagataaaacccctcgtggtactcgtatcttcggacctgtagctagagaacttcgtgaaaaagacttcatgaaaatcgtttccttagctccagaagtattataagaaggaggaacgcagcatatggctaaattacaaatcaaaaaaggcgatacagttgttgttatctccggtaaagataaaggtaagcaaggtacagtaattgctactgaacctaaaaaagaacgcgtatttgttgaaggcgtaaacactgtaaaacgtcacacaaaaccttctcaagctaacccacaaggcggcatcgttactaaagaagctggtatccatgtttctaacgtaatggttgttgacccagaaactaaaacagctactcgtatcaaaaaagttgaaggtaaagacggtaaattcgttcgtgcaactgttaaatccggtacagtacttaaataatcaggaaaggaggagctacataaatgtctcgtttatttgaacaatacaactctgaaattaaaaagagtatgcaagaaaaattccaatacggcaacgtaatggaaattcctaaattggaaaaaatcgttatcaacatcggcgttggcgatgctgtaggcaatgcaaaagctttagaagctgcagttaatgacttaacaattattgctggtcaaaaacctgtaatcacaaaagctaaaaaatctattgcgaactttaaagttcgtgaaggcatggcgttgggtacaaaagttactcttcgtggcgaacgcatgtatgaattccttgataaattgatcaatgcggcattacctcgtgtacgtgacttccgcggtatcagcgcaactgcatttgatggccgtggtaactacgctttgggtcttaaagaacagctcatcttccctgaaatcgaatatgatcaggtagaacgcgttactggtatggatatcatcgtagtaacaagtgctaaaacagatgaagaagctcgtgaattgttgactcaattcggtatgccttttgaaaaataataggaggaacatatagatggctaaaaaatctatgattgaacgcgaaaagaaacgcgctaaaatcgttgaaaaatatgcagctaaacgtgcggcgcttaaagcagcaggtgattatgaaggcttgtccaaattaccagctaatgcatccccaacacgtttgcacaatcgttgcaacttaactggtcgtcctcacggctatatgcgtaaattcggtatcagccgtattgcgttccgtgaattggcgtacaaaggacaaattcctggtgttaaaaaagccagctggtaatattagacgagaggaggtttttagattatggtaatgaccgatcctatcgcggatatgcttacgcgcatccgtaatgcaaatgctgcacttcacgaaacggtaaacattcctgcatctagaatgaaagcagcagttcttgaaatccttttacaagaaggtttcgttaagaacgttgaaaaagaagaaaacactttaaaagtaactttgaaatatggttccaataacgaaaaagttattacaggaattaaacgtatttccaaaccaggtttacgtgtttacgcgaaaaaggaagaacttcctcgtgtacttggtggtttgggtatcgcagttatttctacatccaaaggcgttatgagcgacaaacaagctcgtaaagaaggtcttggtggcgaagtaatcgcatacgtttggtaatagtagcaataggaggtagaaataatgtcacgtatcggtagaatgcctatcgagattcctgcaggcgttactgttacatatgataaccatcatatgaacgtaaaaggtcctaaaggtgaattatctcgcgatttgcatccagatatgatcatcactgtagaaggtaacacaatcacagtagctcgtccttccgaagataaagctcatcgtgcccttcacggtttgactcgcgctcttgttgctaatatggtaacaggcgtagcagaaggatttacaaaaactcttgaaatcaacggtgttggttacagagcggctaaacaaggcaataaattggctcttacacttggcttctctcatccggtagagatggaagctccagctggtattacaattgaagttccagctcctaacaaaatcgttgtgtctggtgcagacaaagaagttgtaggtgcagtagcagctgatatccgtaaatggagaaaacctgaaccttacaaaggtaaaggtatccgctatgaaggcgaagttgttcgtcgtaaagctggtaaagctggtgcaaaaggtaaatagtaatatcatctatatgaatgaaaggagtgaatatcttgcctcgtaaatctagtagaaacatcgctcgagcaaaacgtcatcttcgtattcgccgccatatttctggtacggcaacttgtccacgtttgaacgtatatcgcagcttgagcaacatttacgctcaagttatcgatgacgtagcaggtacaacattagtagctgctagctctttagataaagatttaaacttatcctatggtggtaacattgctgctgctaaagctgttggtgaagcagttgctaaaaaagctatcgctaaaggtattgacactgtagtgtttgaccgtggtggttacatttatcatggtcgcgtagcagcacttgcagaaggtgctcgtgaagcaggcttaaaattctaagaaggaggaactatagacatggcgagaattgactacaccagtcttgatcttaaagaaagagtagtattcatcaaccgcgtagccaaagtagttaaaggcggtcgtcgtttttccttcagcgcacttgtagttgttggtgatggcaacggttatgtaggcgttggcttaggtaaagctgcggaagtacctgaagctatccgcaaaggtatcgatgatgctaagaaaaatatcgtaaacgtagcagttaaaaatggtacaatccctcacagcgtaacaggcgtattcggcgcaggccgcgtattcttgaaaccagctgctgaaggtactggcgttatcgctggtggccctgttcgtgccgtattggaattggttggtgttcgtaacatcttaactaaatctttgggctcttctaaccctaacaatatggttcgtgctacaattgaaggtttgaaagatttgaaacgtgctagcgaagttgctgaacttcgcggtaaatccgttgaagaaatctataacgcgtaataaggagacaagaaatggcacaagttaaagtaacattaacaagaagcttaatcggtcgtcctgaagatcaacgcgcgacagttaaagctttgggcttgaaaaaaactaattctcaagtcgtaaaagaagtaacacctcaaattcaaggtatgcttcacaaagttagacatttagtaaaagttgaagaagtttaatactgataaggaggtgcactgaatgaaacttcatgaattacaaccagcagctggttccaaaaaaactcgtactcgtgtaggccgtggtttaggttctggcttgggtaaaacatctggtcgtggtcaaaaaggtcaaaactcccgttctggcggtggcgttcgctccggttttgaaggcggccaaatgcctctttatcgtcgtttaccaaaacgtggtttcaacaacgtttttgctaaacaatatgctgaagttaacgtagaacaattgaaccgttttgaagacggtgcaacagttgatccagtagctcttattgaagctggtattttgaaaaacgtacgcgatggcatccgcatcttaggtaatggttctttggaaactaaaaacctaactgttattgctaacggcttcacaaaatctgctgaagaaaaaatcacagcagcaggcggaaaagtagaggtgatctagtttgctagatagcctctcaaacatctttaagattaccgagttgcgtaataagattttgtacacattgatgatgtttgccgtgtttagagccggcattcacatccccgtacctggtgtagatgcatctgtaattgaatctttgtttacatccggtaacctattcggtctattagacttgtttgctggtggtgcgctaagtaagttctctatctttgcaatgagtattacaccttacattaatgcttccatcatcatgcaactacttcaagctgtagttccacagtttgaagcgtggagtaaagatggtgaagagggccgtaaaaaaattgcgaaggtaactcgttatggtacggttgttttaggttttgtccaagcctttggcatggcgtttgcattacgtgcaaattccgctctcgtaaataatgatatccttagtgtatttgttgtagctatcatcctaacagcaggcacatgcttattgatgtggattggcgaacaaatcacagcatatggcattggtaatggtatttccttgattatctttgctggtatcgtagctcgtttaccagatggtcttcaaaccatttaccaatatatacaaactggaacaattaacatgttccaagcattcttatttgctgtaattgcaattgcaatgattgctgttgtagtagcagttacgcaaggccaacgtcgtattccgattcaatatgctaaacgcgtagttggtcgtaaaatgtacggtggtcactctacattcttgccgttgaaagtcaatcaggcaggtgtaattccaattatctttgcgtcatctgtgttgatgttccctgtaacgattgcgcaatttattgaaaacgatttcgttcataaaattgcggatttattcacatggggaacgccgttacaaacggcattgtatgcaatattgatttttatctttacatacttctatactgcaatctctatcaacattacagatatggcagataatatgaaaaaatacggtggttttatccctggtattcgtgcgggtaaacctactgctgattatgtggataacgtgatgaccaagattacattggctggtgctgtattcttagctatcgtcgctatcataccgaatttcctcggtacgattacaggcgtgcaaggcgtatactttggtggtacagctctcttgatcgttgtaggtgtagcacttgatacaatgcaacaaattgagtcacttatggtaacacgccactataagggctttgtaaaataggagggaaacagaatgtatattttattaatgggacctcctggtgctggtaaaggcacacaggcagctcgacttattgaaaaatacggtattccccaaatttcaacaggtgatatgttccgcgctgcgattaagaacgaaacacctcttggagttgaggctaagaaatatatcgatgctggtcaattggtaccagacagtgtaactgttggtatcgtacgtgatcgcttggttaaagatgactgcaaatctggatttattcttgatggattcccaagaactacagcgcaagctgtatccttggatgcaatcttaaaagaattaggaatttctttggacgctgtgcttaacttaaatgttccttctgaagaacttgttaaacgcattagtgaacgagcagttcttgaaaatcgtgctgatgataaccctgaaacagtacagaaacgtctagctgtgtacgaagaatctactaaaccattaattgattactatcgtaatagcggtttgtatcaagaaattaatggtttacaagatgtagacgcagtatttgctgacatcattaaggctttggagaaataatccatgattattttgaaatctgcccatgaaattgaatgtatccgcaaggcaagcaagcttacagcagacacgttgtccttgttagtagaaaaggctaaacctggcatcacgacgcttgagttagatacaattgccgaagaatatattcgcagccacggtggtataccaagttgtaaagggtactatgggttccctgctacaatctgtgcttctatcaatgaagaagttgttcatggtattccgagcgctaagcgtaagcttaaaaacggtgatgtcctcagtattgatcttgtagcatctattgatggatatcacggcgattcggctgtgacaattccaattggtcatgtcaaaccagatgtgatgaaattgttaaaagtaacagaggaaagtctgttcaagggaatcgaacaagtgaaagttggtaaccatatcggtgctatcggtcacgctgttcaaacgtattgtgagaaacatggttacggtgtcgttcgcgacttcgttggtcatggtttaggccgtgaaatgcatgaagatccacaaattccaaactatggtaatccggaccacggtcctgtgatgaaaccaggtatggtattgtgtattgaaccaatgattacattaggttcttataaagttcgtgtgttgggtgatgactggacggcagttaccattgatggtaaaccagctgctcatttcgaacatacagtggttgttacagaaaacggccctgaaatattaaccatgcgtgatgaaccgcggttaattaaataaacaggtaaccggaggaaaaaatatgtcaaaagaagacgttattgaggtggaaggtacggtagtagaagcattacctaatgctatgttccaagtagaattggaaaatggtcatgtggtattagctcacgtgtcaggtaaaatgcgtatgaattttatccgtattcttcctggtgataaagttactatggaactgacaccatatgacttaaatcgtggtcgcatcacctatcgctttaaataagcatagggtccacaaaggaggtactaatgaaggttcaaccatcagttaaaaagatatgcgaaaaatgtaaaatcattaaacgcaaaggccgcgtaatggttatttgcgaaaatccaaaacataaacaaaaacaaggataatctgataggaggtggagatttaaatggcacgtatcgccggtgtagatttacctcgtgataaacgagtggaaattggtttaacttatatttatggtattggtcctactttagcagacgaaattctagctaaaactggtatcaatcctgacacacgtgttcgcgatctttctgaagatgaagtagcgaaaattcgtgaagtgttagatgctgattataaagtagaaggtgaccttcgtcgtgaagaagcacttaacattaaacgcttgattgaaatcaactcctatcgaggcaaacgtcatcgtatgggtttaccacttcgtggtcaacgtactaaaacgaatgcacgtactcgcaaaggtcctagaaaagcaattgctggtaaaaagaaataagataaaggagggataaagcgtggctaaaaaagttgttagaacaaaaagaaaagaaaagaaacatattgaatccggtgcggctcatattcgttctacattcaataacactatcgtaactttgacagatacaaacggtaatgcgttgtcttgggcttccgctggtggcttgggcttccgtggttcccgtaaatccactccattcgctgctcaaatggctgctgaacaagctgctaaagctgcaatggaacatggtcttcgcactgttgaagtatttgtaaaaggtcctggatccggccgtgaagctgcaatccgtgctttacaagctgcaggtcttgaagttacttccattaaagacgtaactccaattcctcacaatggttgtcgccctccaaaacgccgtcgtgtataatatatagacggccgttttgacggccgtgctataattaaactaagaacgtgtgttatataggaggatgttcctgatgagcgaagaaaagaaacttaaaatcgagaaagtggacatcgccgaaggcggtcgctatggtaaattcgtatgcgaaccattagatcgcggctatggtatcactctcggtaatagcttgcgcagaattttgctttcatccttggatggggcagctatcacctctatcaaaattgatggggttcttcatgaattctctactattcctggtatccgcgaagatgttacggatatcatccttaacttaaagcaattgtgcattaagcttgaagaagatgcagaatggccattggaagttcactttgatttccaaaaggatggtgtattaacagctgcagatttggctgaacaatttccaccagaagtagaagtattgaatccagagctcgtgattgcgacaatggatgaaacagctcatttagtaatggacgtagtaatcgaacgtggtaagggctatgttccttctactaagaataaaaaggatacagatgttatcggttgcattccaattgattccatcttctccccaattcttcgtgctaaatacgaagtgagtgatgttcgcgtaggtaatgaaatggacttcgacaaacttacattagaagtttggactgatggttccattaccgctgctgatgcagtggcaaaatctgctgccattatgattggttatttagggaacttcactaaattagcgcactctacaagtgttgttgaattagacgatcaaaatcttgaaggtgatgtagttgatcctactcctcaagatgttcaagaagatgatggcccagctaagatttccatcgatgaattggaactctctgttcgtgcgtacaactgcttgaaacgtgctggtatcaacacaattgcagatttgctagacaaaaccattgatgacttaggaaaagttcgcaacttaggtaaaaaatctatcgacgaaattgctgaaaaactcagcaaccacccaggtggatttaatcttaagcaaaaaggcgaataaggaggaagacgaatgtacagaaaattaggccgcgatagctccgctcgtaaagcgttgttccgtagcatgttaacatctttcttccaatatgagcgtatcgaaactactgaagctaaagcgaaagaacttcgctctttggctgatcaaatggtaactttggctaaacgtggtgatcttcatgcacgtcgccaagttcttgcatacctcatggatgaaagcgtagtaaaaaaattgtttgatacaattgctccaaaatatgcagaccgtcaaggtggttacactcgtgtaatcaaaactggtcttcgcaaaggtgacgctgcaccttgcgctattatcgagttagtttaatcaaactcatacggtgttgtaacttcggttgcaacaccgtttttttattgtcaattttatggtacaatcgactagtacaaatatcgttatatagtagcagttatcgtagtgatggaagattaattgttaactttcacataaaacgaaattgactagaaagatacgaggctattcatgaaatcaaacgaaacaatgattgaggtcaatcatttaagccatttatatgttgatgaaaatggtaatgacgtgcgtgccctagatgatgtgagtcttaccatacggcgtggtgaatttgtggctattataggtactaacggcagtggtaaaagtacattggctaagcattttaatgtgttattgcaacctacagcgggaaatgttaccgtatgtggttttgacacattaaatgatgaacatatctggaatattcgccaacatgtgggcatggtattccaaaatccagataatcaaatcgtagcagctgtggtagaagaggatgtagcatttggtccagagaatctgggcgtacctagtgctgaaattcgtaaacgtgttgatgacgctttggctgcagtaaacatgaccgaatatgcggaacatggtccgcatttattatctggaggtcaaaagcaacggattgccattgctggtgtacttgctatgaaaccagattgtatcgtactagatgaacctactgctatgttggatccaaaagggcgtttagaggttcttgaaacaattcatagactcaataaagaagaaggtattaccattgtaatcattacccattttatggaggaagcggtaaccgcagaccgtgttgtggttatgaaaaatggcgttaaattacaagagggaacaccgcgtgaaatctttactcaagtggatacgctaaaagatttaggcttagatgtacctgttgcagcagaggttgcatcgaaactcattcaaaagggcgtagatatccctaatgatatcattactaatgatgaacttggtgatgcattaacgacgtactatgcgaaggaggcacactgatggctattgtattagataatattacctatacctatggtgtgggtactccttttgagaaaacagcgttgaagggcatctcggtgaccattgaaaatggtgaatttcttggcattattggacatactggatcgggtaaatccacatttgtgcaacatctcaacggtttattgcatccaacgactggtaaagtgacggtcaatggtgtggacgtaagtgaaaaaactgatgaagcaaaacatatgcgtcataaggtaggcatggtattccaatatcctgaacatcaacttttcgaggaaacgattgccgaagacattgcatttgggccaaaaaacttaggccttgatgcagaagaggtagaccgtcgagtgcgtgaagctatggcctttgtaggtctggattatgatacctatgctgaacgttctccgtttcatttatctggcggtcaaatgcgccgcgttgccatagctggtgtagtggcgatggaaccggatttccttgtactcgatgaaccttctgcaggccttgatccatttgggcgtgaagaaatctttgatgaaattattaaactacataaggaaaaagatgtaacagtcatcctcgtatctcataatatggaagatatttcacgcatggcgaatcgtctcattgtattagataagggtcagattgtactggatggtaaaccgttagatatctttaatcatcatcgccatgtattacaacaggttggcgtagatgtgccacctgtgtccgtattgatcgaattattgcggaaccgaggccttgatgtatcaaacgaagtattaaccgtagatgatgctgtacaagctattctagaaggaggtcaacatgttaaataatattacaattggccaattcttccctggtaactcgttattacatcgcatggacccacgggcaaaaattataggcactactattttcgttgttgccatattcttggcgaacacaccattggcatatggcattgtggcggctttcaccattggtgctatgttattatctcgtctgccattacgtttgatgtggaatgcgataaaaccattatggattatcattgtattcacaatggggattcatatttttacaactcctggtaatagcatcatctcctatggcatcattaatattacggataatggacttgctatgggcttgcaaatggcggcacgattagtattcttaatcttattctcgtcattgctaacctatacgacatcacctatacggctgacagatggcattgaacatttactaaatccattccgccgcatcggtgtgccggctcatgaactagctatgatgatgaccattgcattgcgttttattcctaccttacttgatgaaacagatcgtattatgaaagcccaatcggctcgtggtgcggattttgtaacaggttcgattattcagcgagctaaaaatatggtacctctcttagtgccattatttattagtgcattccgccgtgctgatgaattggctatcgctatggaagcacgttgctatcgcggcggtgttaatcgtacgcgtatgaaagaactcagcattacatgggttgattatgtaggcttgggagccgtgtttattgtaacggctatcttattaatcctatggtggttaggataatgcggaatatacgattaattgtgtcctatgatggtactgatttagcgggttatcagaaacaacctgctgataaggggattactgttcaaggggctttggaaaaggcattatctattatttgtgctgaaccaatccaaatttatggtgcatcgcgtaccgatgcgggtgtacatgcacgctttcaagtctgtgcatttcaaacatcgggatccataccggtagagaatattccacgggcgacgattgcccatttgccaaaggatatcgttgtaacagaggctgttgagataccattagattggaaacctcggcataacatttttggtaaggaatatatttactccatttataatcgtgaaattgcagaccctatggggcagcggtatcattggcatgtaaagaaacctctagatgttgaagctatgcgtcaagcaggcaaagctcttgaaggaacgcatgacttttctacattgaaagggtctaatacgacaccggtggatccggtaaaaactatttatgccatcggtatcaaagagaaagcgggtcgtatcgatatttctgttgtgggtgatggatttttatatcatatggttcgaaatatagctggcttgttagtggacattgggctaggccgaaaatcagtggcccgaattcctgaactattagctgcaaaggaccgtaagcaaattggaaaaacagcaccggctcaaggcctagtattagaggaaattttctttactactgatagactacatgcggtaatagaacgtattaaagaagaataattatgaaatgttacattgtaaaacgtctactatacatgttacaattgcactatgagacaggtttattacttagctgtaattaatatacatagggtagactcttgtcagcattgtaattatatcctaaggagggtgaatctcttgcaaaaacgtaaagattttatctggaaaatgggtggacaacaaggtgaaggtatcgagagttgtggcgaaatcatggctacaatccttgcaaaagaaggatattctctatacagtcaacgtttgtttgcatcccgtatcaaaggtggtcatactaccttcgcattgcgcgttgcattggaacaagttatgtccattggtgaaggcgtagacttcttgttagctcttgaccaagaaactgttgatatgcatggcgttgaagtgcgtgatggtggttatatcatctgtgatagtaaagtaaaaccagatttttctaaatttgaaggttccaaagttaactgcttatccttgccaatctctgaaacggcaatgaaacaaggttccttgttgatgcgtaatatcgtagcacttggtatgtctgtagcgcttcttggtttcgacactaagatgtttaaagatgcaatcgctgcaaaatttgcgaaaaaatcccaagaaatcgtggataaaaacttggcagcttttgatgatggtcatagccttgtaatggaaaaattaggtgatgtagaaatcgatacattaccagctcctggtaagaaagatcaaatgttcttattaggtaatgaagcatgtgctcttggtgctattgcagcaggttcccgtttcatggcatcctatcctattactccagcatctgaagtaatggaatacatgattaaaaacatggataaattaggtgctactatcgttcaaacagaagatgaaatcgcagcttgtatgactgctatgggcggtgtatacgcaggtgttcgtggtttcacttgtacttctggtcctggtctatccttgatggcagaatccttgtctatggcatccatggcagaacttcctatggttgttatcgacgtacaacgttctggcccatccacaggtatggctacaaaggtagaacaatccgatattgatgcggcttgctacaacgctcatggcgattatgcaggtatcgttatttctccaacatccatcgaagaatgtttctacgaaattcaaaaagctttcaacttggcagaaatgtatcaatgcccagttatctttatgccggacttacaacaaggtttgaataaacaatccgttcctacattcgacttgaaccgtgtacctattaatcgcggtaaaatgatgaaggaagctgaccttcctgaattggaacaacctaactacttcaaacgctttgaattgacagaagatggcatttctcctcgtacgattcctggtatgaaaaatggtctattcctttctactggtctagaacataatgaagaaggtaaaccagcagaagcgcctacaatgcacgtagcgcaaactgataaacgtttccgcaaattggaaactgtagctgataactatgaaccattcttgaacaatgcaaaatacgatgaagctgatgtactcgttgtaggtatggcttctagccgtggtgctatcgaagaagcagttgctgaattcgatcaagaaggcgttaaagttaaccatttacaacttcgtttgattaaaccattccctgcaaaacaattgcaaccattcatggatgcagctaaaaaagtttttattgtagaacataatgcaacaggtcaattgactaacctattcaaaatcaacatgcataagaaatccaaaatttctagctgcttgaaatatgatggtaatccattcacaaaatcatatgtgaaaaatgcaattaaggaggtcctataatatgacaacagctaaagattacagaaatgatattcgccctaactggtgtcctggttgtggtcattatggggtacaagctgccattactgatgcagtagtagcaaaaaatattccacctgaaaaattggcagttatctctggtatcggttgttctagccgtatcggtggttatttctatgcatatggtgcacatacaactcatggtcgtgcgcttccatacgctcaaggcgttaaacttgctaaccaagacttagaagttatcgcttgttccggtgatggtgatgcgttcgctatcggtatgggtcatactattcatgctttcaaacgtaatgtaaacatgacatatatcgttatggataaccatgtttacggtttgactaaaggtcaagcatcccctcgttccgatatcggttttgttacaaaaacaacacctcgtggggcctttgaatcaccattgtccgtttgtgaaactgctatcgcggcgggtgctacatttgttgcacaaggttatatgattaaccgtgctgaactcgttgatttgattcaacaagctatggaccatgaaggcttctccttcatcaacgtatttagcccatgtgttacatacaacaaacacaatagctatgactggttcaaagaacatttgactagcttgccagaaggatatgatccaacagaccgtgcgactgcacttaaaacattaggtgaaacacaaggtttggttactggtcttatctatcaagatacgactaaaccttcctttgaaaaagctatggccgctgttaatggtggtacacatccacgtccattgactgaagatgttgttaaacctgatcaagcattatttgatagcctttgcaatcagtttaagtaattttaacttaacatatatcgtgttctgatataggtcccctctttactgactactatgtaaagaggggattttcattttattacttttcggttaatgataattactttacggagtttttcttaactgatatactaattttaatttaagttatttataattaaacataggtatagtacctgctagacgtattttaactattacagccataagatagaggggtagagtaacgtgtcgaatgaatataatgaagcattactagaaccactaaagtattacagagaaagtcttaaggatacattccaaggtattacagaagattattttcaagatttggtaaatcaatcacaggttgatattaataaaaataaagacttaatcgataagtatacgaatgtttcggagaatcgaaatcagtctaacagtacatataaacgatttggtattgtacgaattatcgattccattgtgggcataggcgcacttatttatggtgtgtatcagttttcacaaccgcaaatggatattctatccatcgttatatgtatcgctattatagccttatgcatagggctgtatgtatattggattcgacctaatcgtaagagcctcgaagagaaactgaatgatttagatgcaacgctaagtcaaatacgtgacgaagggtacgaaatgatgcaaccgttgaatgagttgtttcatagtgagatgaccgcagaactcatcaaaaaagcgattccctttattcatttagattccaattttaatatggaacgttatgaacagctcgttaaagattatggctttttagaaaaagatgatgtaaatcgctctacattggatattacttccggagatattttaggaaatccttttgtgtttattaagcgtattatccattggattgatgattatacatatgaaggtactcgtgaggtcgtctatacagaagaatatatagattctgatggcaatacaaaaactagagatgtaagtgaaacacttcgtgccactttaaaacgacctggtccatattatgcggatagaatatccttggtatatggtaatcatgcagcaccgaatttaatattccatagaagaccaccagaaaaaggtttatttaattttggaggtgccaagattcaactggcaaaacgcattgcagggcttagaaagaaaagtgaagatgccttagaagatggtggaaactttcaggcgttggcaaatgaagagttcgatgcccaatttaatgcattagaccgaaataatgaggtcgagttccgcgtgttattcaccccattagcacaaagtaattacaaagatatttttgagaattctccctatggtgatgactttgttttcaataaacaatgtaaaatcaatgaaattttaactgataactctatggattggaatttcgataccgtaccatcacaatactatgatttctcctttgaaaagattaaagagaaattcattaattttaactgtagctattttgagcatatgtatttttcatttttgccagtcttagcaattcctgtatatcaacaaatggcttctactgattatatttataagaaatcttatgattttaaatataatgattatattacagaaatgctcgcgaataagatgaaccttgggttatttattcctcctgatgcaacgcagagaagtaatgtaaaaacattgctaaaaacgagtcactataaaaaagaggcagattcggaaattatcaaggtagatgcttattcgtataggactattgagcatgtggatgaggttcctgttacagcaggtaatggtagaacctattatgtaccagttaagtggaatgaatatgtgccggttacaaagcatgaacttattgaagtagcagaagtagatacagttgacgatgatttcaagcgtattaaagaattgaatcattaccaacgatccgaaaataacaaaaatggttcctttgcctatggacattttatggtagggaaactctataaggataatcagtctctcgtagacttattacatacgatttttgaacaaaatggaggtaagtaaaatggctaatcaacttgatgaaatgaacccagagattatggcagaaggcagagatgtacatgttattgctaaggtgattcctgtagaaacaagtggttttgaaaaactgatacctacgattctaatggctatcggtgtaattgccatcgttttagggatagttatagacaagtacctcatatctgctataggtgtggttgtacttgtttatccttggtggcgattaaaacaaattagttccgaatttaatatgatggaacaacgaattcaaaatgcagcatccgaaattgataactatatggaacaacgcgttgttattctttctaatgcggctaaactcgtagaaaaatctattgaagtagataaagatattcttgtggatattgcaaagtatagaagtggtaattttagtgaagaatctagaagcgatgtaaatgctcagcttaataaagcgacgagagcattaaatgtagctatagaaaattatccagaattgcaaagccaagatacaattcgcgatgcgatgcaacaaaattcatatttgcaaaaagaaattacagctgctagaacgttatataatgatgcggtaaatacgtggaatcgagaaatattcgatttcccattcaaaaaaattgtagctgctaaagaaggtagaaccacaagaattccattcatagcagatcaagagactaaagaaaaagcaaaaggtgttttcttttagttgataaagtttgatgcgtaatataaaggggatactatgaaaacatatgaaaaaggcattagcttgtctatttggaccttaagctggcctatatttatcgaagtattcctgcaaatgctcgtcggcaatatcgaccaactgatgatgagtcattactcgccacaggcggtagccgctgtagctaatgcgaatcaaattttaaatatttttatcatgctcatcgttgttatgagcactgccacgacgattttgattgcccaatatttgggtgctcgaaatcagtcaaagttatcagaggtttgtaccgttagtttagtgctaaactttgtattctcctctgtggcggcggtgtttttcatcacttgccatgaatggatttttacatggcttgggataccaccagaaacgatgggggatacatcgttgtatacgactattgtagcggcaggattaccaatacaggccatgtactatgcattggttgccgtatttagaggccattcgttgacgcgtattaccatgtatgtggcactcgttatgaatattatccatgtaggaacgaattatattctaattttcggtcatggcccgataccgagtcttggtgtactcggtgtatctatttctacgtggctttcaaaggtaattggccttcttatcatcgtatatctgttcaagacactgttgcagttgcaggttagcacgtcttatttaagaccctttccttggcatacggttaaatccttgctccatattagtgtgccatccggcggtgaaacattgagctatcaattatcgcaaacgacgattatgaagatggtcaatattctagggttaactgtgattaatacgaaggtttatgtatatgtcatcgccatgttgtgttatgtgtataccatagccttatcgaatgcatcgcaagttatcgtaggattcttgatgggcgctaaacggcaagatgaagtaacaaatcgcgtgtggcattctatgtttttagccatcgctatcaatgtaggattggcaacgttcttttatataacgagtgatacggttctatctgtatttacaacggatcctgagattttatccttagcccataatgtgctcttggttgagattttccttgaactagggcgggctgtaaatatcgttatggtcggttgtttacaggccgcaggtgatattcgtaccccaatgctagttggtatctttggcatgtggttatgtgctgtgccattatcgtacctatttggtatttattggggctggggccttgtaggcatatggattgctatggctgctgatgagattttacgaggtgtattgtttatctatcgctggtatagcggaaaatggaaagaaaaacgtcttattgaggtgtagtggtatagtttgtttgcgtttctatattggagatatagggacacttgtgaaagtaggtttatatgagtaaaaccgtaggtatcattgggttaggtttgttgggtggttcgttggcaaaggctttgaaagcctatacagattatgatgtagtagggtatgcacgccgacaagaggtatgtgatgcagcattacaagatggggtagtatcccaagcttggaccgaggtagagccactcattgaacattcggatatcgtagtgttttccttgccgccagatactaatgctcgactttttacagaggtggctcatctgtttaaaccaagtcaggtggtaacagatgtatccagtgcaaaggaaaattttgtacgcgccgtgtatgaatctattccaaagggaacctttttcgtatctgttcatcctatggcgggatctgaaaagggcggttatgaagtgtctcataaaaacctatttaaaggcatggggtggattgtattagaggataaggcgtctgatgtgtataatgaagaggtggctaaagaattggctgatatggggcgtgccgttggttcccgtatcgaatttgtcgatgtatatgctcatgatgcgtatttagcgatggttagccatatgccgcatctgatagccgccattttaacacaagtatctggtggcgatgaactcggcgaattacgtatgcgcttatccgcaggtggattccgtgattgtacgcgtgtagccggcggtttgccatccatgtggcgtgaaatcatttatgggaaccgtcataatgtattagaaggcttgtctaaaatggaagacgaaattcgtcgggtaaaagaaatactttcacaagaagacgaaggccaagccttagaagactatttacatagaagccgagatgttagaaataaattaccgtacttgacgggacaaattaagaataattaagaggagttgttatggggttactacaagaaacctgcgacgcgattcacagtcgtagtaaagagattgaacaacatattattaagaattggaatgatgcgtcagatagtaagcaatatggacgtctcgtcaatatggtggctcaatatggggcagctacaaatcaaaaggatgtaacaattccaaaaccttgtatgatcattgcctctgccgatcatggcgttgccgatatgggggttagtgcctatccaaaggaaaccactgttggtatgacgcaaaactatttaattccaaaaggggctggcgccaattcattggccaattattgtggtgcgcatatggaagtgatcgacatgggcattgatgcggatatgagctgggtccctggactgcgttctcataagttggggatgggcacaaagaattttgtagaagaaccggctatgacgcgggaacaagcaatcgaaggtattgaaacgggcatcaaattggttcaagaaaagatggctgacgggtacaatgtgtttcttgtaggtgaaatggggatttccaacacgacagctagtgcgcttatgacggctaagtttgccggtcttactgcagaagaggccactgggcgaggcacgaatatttccgatgagcgccttaaattaaaacaacgcatcgttcacgatgtattagttaaatacaaggatatcccaaaggacgacgccattggtattttggctgccgtagggggctttgaatttacatgtattgtaggtgtcattttgggggcagctgctcatcatggtatggtcatcatcgatggctttaatacatctgcttgcgcactggtggctaaaacattggttcctgcctccatggactacgttatggcctctcatttatctgcagaaaaagcggctaaatcttcattgcaaaatcttggattagaagcctatgtggacttaggtctttgcttaggggaagcctctggtggttctgttcaaatggggatgcttgaccttgcagttcatatgtataagtctgtcacaggaggtaaggcatgagagcttttaacattcaaccattagatacgaaagcgatggaaacatgccggtatcgcattgataatttaaccaaacctatttatagcctggctatgctcgaaacgatagctgaacgatttgcaggcgtattggcgaatcctaaaccaaatcatttaaaatatggtgttcttattgtaggagcagaccatcttgtggacggtcctcaaaatgttgaacatggacatactagtttaaatgcaataaaacgatttaatgaaggcatgagtgctacgcaaggggcggcatttaaattacaagtaccggtttacgttgttaatattggcttagaacaagatacaaatcatttggcgaatattgattctcgagttattcgtaaggggtcccacttctttggcgtagaaccttctattagtcatgatgaattggaacaggcacttgaaatgggctttgcttatgcggatacattacatgaagcaggcctacaagtggtggccttaggtaatataggtgaacgcacattccttgatgcgttggttacgaccgctaccgttacaggcacatcgtacgagactttattgacagaatctgataatggacctaccattgcacagcgtgctgcacacatccattcgtttgtagatccatttgatattactgtagatgattggtctgttttatctgaaagcgaccgccgcactgctgtattgcgtttgcttcatgtagcaggtggcctcgatattgctttcttaacaggctttatcttaggtgctgctagccatcgtatggctgtggtatacgataatgcactaactggtgctgctgtactcgcagcagtgacgatggaaccattggtgaaagactatgttttcccatccgctgtttacgatgatcctattcataaggaacaatgtcgttttttagatgtaaaacctccattacattatgatttacaaatcgatgaaggcttaggctctacaatggggctatctatcgtagatgcatctatgcatatgttaaatgacatgaaaacattcgtagaagcagaggttcgtgccgctgaggatggtgccggtaaaggtagacaagaagatattaaataatgatagagaggacttcatgatatatagttcctttacttaagaaatagtaaagaaggtatatatttgaaagtcctctttaatatgtttgttataaatcatgtagatttgtatcatatagatttcgtattatttttataggaaattcattgaaaaaccattgacactatatgtgtaaattgatattattataaggcagtcagaactgacctagtttagttcttgactaacagaaggtaattatgatatagtaattatcggttctgtatgcgggaatagctcagcggtagagcaccgccttgccaaggcgggggtcgcgagttcgaatctcgtttcccgctccatacattcctcgatagctcagttggtagagcaatcggctgttaaccgatcggtcgtaggttcgagtcctactcggggagccattcatgactcactagctcagttggcagagcacctgacttttaatcagggtgtcccgcgttcgagtcgcgggtgagtcaccaactttggcccgttggtcaagcggttaagacaccgccctttcacggcggtatcccgggttcgattcccggacgggtcaccaatatggacgattagctcagctgggagagcgcctgccttacaagcaggatgtcggcagttcgatcctgtcatcgtccaccatatgcgggaatagctcagcggtagagcaccgccttgccaaggcgggggtcgcgagttcgaatctcgtttcccgctccactaatgttcctcgatagctcagtcggtagagcaatcggctgttaaccgatcggtcgtaggttcgagtcctactcgggaagccaatttcatatcatggcccgttggtcaagcggttaagacaccgccctttcacggcggtatcccgggttcgattcccggacgggtcaccacatggacgattagctcagctgggagagcgcctgccttacaagcaggatgtcggcagttcgatcctgtcatcgtccaccaagctaaagcagttatcttcggataactgcttttttgtgttataaattcagatgtgtgaagtacaaatacaaaaagcgacactatgtgtcgctttcagcatagttattaatgttatattgtgtatgaaatttatcgtggtgcatacatgatgatataaacaccaactaggcatacaagaccgccgatgatgtcatacatatctggtcgcaaaccatcgatgagccaaccccataggatggagagggcaataaatacgccaccgtatgcagcatagaccttgccaaaactggcctctggttgaaatgtaggaattataccgtacaagattaagataatggcgcctgctagtagatatagaggacttttatcatcgcgcatgtagagccagacgagatatccaccgccaatttcagcgataccggctaataaaaaatagaatatagataataacatatatacctcacaatgattataaatctcatattagtgtatcatggttattgtaccctgtcagtagtagattattgagtttgaaaacaataaaaaatccctcgctaataaaacgagggattgagtattataatctcgcaggagattcctgatggacatagtccataaatgtatgcatcgtttcagttttagaattatttttcttgtatgcgaaacatacctgtaacttaaatggtttttctaatggtaaatagccagtagtgatgttgagggcgtcgagaatttgacgcgctacgatgcaaccagattcattcttaccacaataatcaatcattgtgtacggattagataagcgactaccacggatgtgtagattttgttgaccattacctacatatgcttttaatgtacggtacataaaatatttaggtggatacattaaaagtgggaattgttgaattgattttaacgtagcttctttaacttgatcaatcaattttggcgcataatatacaaattcatcttcccgtagcgcttttgattcatataaggacatgtccttattatttggtaaatagagaagggcaatgtcgatacgattttctcgtaaatcgagcaatagctcttcttcttccatatcgtaaatagatacagaaaattcaggatggttttcaaagaaatgcgatacatatccgttgaggcgaatgtcgccgaggctacgaagaacgccgatgtttaggatagggcgttcaaccttgctagctaaacggatggattgtatggctctctccaatgtgtccaatacgagttctgcttcaggcaggaatagttcaccttctggcgtcaaacgactgccgcgggtggagcgagaaattaatttaacgcctacaagtcgttctaattttttcatttgcgcactgaaagcagattgggtgatattcatcgtttgtgctgctaatgtaaagctacctgttttattatatgtaataaaactttgtagctcttgcatggttggtaattctttcatttcggtactccgattataataaaaacctcacattactacttattacctatattaattgtattgtagcatactataagtattttttcatctaaatctataaaaggcgatgaattaattagaatagatatagagcggttcttttataagaaatttcgtttctaatgctatgataggtgagtaaaaataatgataaatagtatggcgaaagaatatcctttgcacatgctatttataggtagaactaattgacataggggcataagaagtgatattattactaagtacctttatgtcgtggtacaagtatatattaatttatgaggtgataatcacatggcaacgagaagagaggctcgattcaaactttgtcgtcgctttggtgtgaacgtattcggtcacgcaaaagccttgaatcgcgtcaaaaaagaccaacgtcagaaaaaaatgtctgagtatggcacacaattattagaaaaacaaaaagttaaagcttactacaacttgctagaacgccagttcgtacgctattatgataaagcgaaaaaaatgcaaggtgttacaggtcaaaacatgttgatccttttggaacaacgtcttgataaccttgtatatcgcatcggcttcggtaactccattcgtcaagctcgtcaaatggtaaaccatggccacattttggtaaatggtcgtcgtgtagacattccatcctactcctgtaaaccaggtgacgttattgaacttcgtgaagcttcccgcgacaacgaaatgttcaaaactaatttccaagaacttcgttctttcgaacttccttacattgaaaaagacttggaaggcttcaaagctacttttactcgtcttcctcaacgtgaagaacttcctatcgaagttaacgaaacacttatcgtcgaattgtactcgaaataagacatacagttctacaaatatagaaagcacagtgcttatgcgtataggcactgtgctttttgcttttttatttaattagcaaaatgatgaaattgaaatgttcaaataaaacaaaactatttataaaaaaactttaatcatgttattctgttgatagaaaaaattatgatttaatcatgattagtgttgttagagtatgtatttaggagagttttgtgaagataaaacgcttagttcttcttagcctaggtgtattgggtgcatctatgccttttggggcatatgcagtgaatccgattatgcctatggcacagcaagaacaattacaagaagaccgagaagttcaacaggaacggaatcttcgcttagatgctgagcgcgtagaaagtgttgttagtgaatcggcgcctatagacgtaccttcagataagaatggtacgtctttttatattaaacaaatacagttagatggtgtacctaaggaatttacgttcttacataagattgcacgtaaaaatgagcaaagaacagtaacagtagcagatattactaatatacgtaattcccttcaacgtaagttgctagatagaggtttcgttacctcacaagtatatattcctgaacaaaatgtaaattctggcacgttgcagtttatggttctaccgggacgagtggaagatattcggtatagtgcttcttcagctcatggtccttggcgcactgcatttcctgtgcgtacaggagatatccttaatatccgagatgtagaacaaggcttagaacagatgaaacgtgtatcatctcaatcggtaacaatgaagttacttccaggtacatctgttggtacttctattattgagttatcgattaaacaagagaaaccagtacacggatcaattagtatcgataatagtggagtggaatcaacaggtgtgtatcaaggtagctttactgcatcgttagatcaagtatttcgagctaacgatacgttaaccatgtcattgtcaggtgatgtaagcggtgcagggagtataaaaggaactcgtgcagccagtcttaattatgtgatacctcatgggaaagatacgtttagtttaagcttttctaaatcaagatatcatcaaactattcaatctaatccttataatttcacatatggtggtaagtccactactatgaaggcaaaatggaatcatatttggtcgcgtacacaacgtgaaaaacgggcatttgatatttctattagcacacggcataatcatcgctttatcaatgatatggaactacctgtacaagcattacgtaccacttcgatggaacttggtatttctaatcgtacatatattggaaatgcaacgctgtactctcggttaggattccaatgggggataggtgcacttggcgcacaggctgaacataaggcctctgttgctatgggtgggcctacctcaagatatcatatgtggcttgtagatgtagattatcgaaaaccatttattatgggccatcgaccagcatccttcacctcttcattccatggacaatgggtacaaggcggtaagagagtgtatagtgtagatactatcaatattggcaatcgatatagtatctatggcttcgatggcgaatatacacttatgggcgatagtggttggtatgtacgtaatgaagtatcatctgttattcctcgccttaatacggaagtatatcttgggcttgatgtaggggctgtatatggtaaaagtacggaatcattagttggaaaaagtattgctggtacagcattaggtatacgtggtaactatgcatcagggctcatggtcgatgcatttgtaagtacccctttatataaaccgcaaggctatcatacgaagaagttttatagcggatttactatagggtatagattctaatctcaatatgattatgactatatatgtgttgagctagcatgtgttgagctagtatttatataattggagagttgtatgtgtaaaacgaatcaagaacgacgtacgctgggacgaaagatactgtcttggctcacttttggcgtagtagtagcatctcaatcgatggtgttggcagctcctattatgcctgataataatgcagtgattacggaacgaccattagttcaggaaacagctaatcacattccattggttaatattacggcacctactaatggtggcatctctatgaataagtatgaccaatttaatgttgagaaacagggtgctgttctaaataactcatatgtaacgagtaaaacagaacttgctggttatgtgcaaggcaatagtaacctggtgagtggtactgcaaaggttatcgtaaaccaagttacatcagatgcaccaacatctatgaatggttatttagaagtggcgggacaaaaagcctccgttgtggtggctaaccctaatggcattaccgttaatggagggggtttccttaatacagatcatgctgtgttaactacaggtaaaccagaattagatgatgctggaaatttacaacattaccgtgtagaacaaggaaatgtttctattgaaggtaaaggccttgatgggaaacgtgcagattctgtgtctatcttggcacgaactattgatgtaaatgcaggtgtttgggcaaacaaacttaatactcgtacaggacaaaatcacattgatgctaacaacttaaaggctacagcgttagaggcttcaactgtggaaacaaaaccaacgattggtttggatgtggcggcagtaggtgggatgtacgcgaatcatattactatggttggcactgaagctggtgtaggtgttaatcttaatggtgtagtggcaggcactcagtctgtttcagtagatgctaatggtcatctatctgttaatggtacacttcaatctgatacaagtctcgtggctaaagcaaactctatacagaatacaaaaataattgcttctggtggagagttagcattagaaacaaaagaactaacaaatacagggcatattacatctgttaataatggacatattcaggtagaagaatccttaactaacaaaaatacaattgtagctggtgctaacacgcaaggcgctgttacaagtaagggttccttgtctgttgtggcaggtaccgttcgtaatactgatgcagtgattgtatctggtggtactacgacaattaacagtaaagagctacataatacagagaatggtcgcatttatggtgggaagatagcgatacaaaccaaggtactcgaaaaccgcaagaatgtagcgttagaatctaaattagatgccgctatggcagatatgaaagcagcagaagataagcttgaagcagcctatgctgtagatactacagcttttacatcaaaaactgaacaagataactatttgaaccgaatcaaagaactatctaaagtatatgatgaaaaactaaaagctgttaagttagtacaagaggaattatctgctcataaagggagtactattgcaggtcgagaagatgtaactattgaagcggactctattttgaatagagaaaaatctcttatatatagtggtggtactatgacgctagacggtcgtgatacattgcacaacattggtggtactattgacggaatgggaaatggtgtcattcgaagtaaagattaccaaaataagaattcttcttttaccgcaaaacgtgttagccctgaaattgaaaaaggcctttctggtgaaagtaatgacgctatgcttacagcgcaagaagaccaaatcttgattacagacaaagatcatagcgagcgaggtcaaacatttaaaaagtctgaatttagctcgttaaacagtggctatggtgcctatcacagtcatagtagtaaggcaccaatgcctatatacgaggctgcagaatatgttactgtagaacaaattacaccagaagaacaagcggctggtgaagcgccaattccggcagaatatattggtacacaagtaccatcgtatgcctataatgaccctattttcaaggagtttggcattacctctatgacgacagagcgccctcaaacagtaggtcctgaacaagaggcgtgggatgcacaatttaagccgattttggcatcattaaatgataaaatcaaagcgcataatgaaaaggctaaactatataatcaacagatttctggtgtggctaatgaaaaaatagacgattatactataattcgaactaagactatgagttctcatgaagaagtaaaaaatagtacaccaggggtaatacgctttggtggagatatgtcattcactggcactggtactaatgaaaatagtcaaatggttgtaggtggtacgttaactactacaggtgctattgatcaagtagcaaaagaaaatcaagaagtaacaaatacttttgggactactgaagtaacctatagatataagcgtaaatttcctcataaatcttggcgccgaggttataaggggcaagtatttatgacgccacaagtgagtaaagaaaacccagtatcacttggggtggctaagaatgatgacaaaaatggtaaggcaaaaggtgaggtaggtgctaatcaccgtaaagaggtacaagacttcttacatccatttgcacaagatagcaataatgatacctctaaaccaactacaggaactaacattttgtcattacctacagaatctttgtatacaatacatcctgaaagcactgctaactatgtagttgaaacagatccacaattcacaaataaaaaagcctttttatcatccgattatatgtatcaagagatgaaaacaaagcctgaaaatattgaaaaacgattaggcgatggcttgtatgagcagaccttagttagaaatcagattgtctctggtacagggtatagattccttgatgagtatacagatgatgaaagccaatttaaagctctcatggatgccggtgttgcgtatgctaagcaacatggtattgctccaggtgtagcgctgacagcagaacaagccgctagtttaactagtgatatggtctggcttgtaaaagatgttgttatggtagagggtaaacctgttgaggtaatttatcctaaggtatatcttaaacaaagtcatggcttacagttgcatactgatggaacattaataagtgctaatacattgatcatgaatgcaaaaaatagtattcgtaatgaaggtgtgattcaaggtaaaacagtagttcttgcatctaaccaagatattattaatagcggtcatattaatgcagacaaagttggtttgcaatcggatacaactatttaccaacaagggcaaattgttggccgtgatgctgtagaattacaagcaaaaaaggatattacctttaataactctattgcgcatttaacaaaccaagatgttttacataaaacagctggtattgctgtaactggcgatacaggcgttatgattgtatctgctggcaatgatgtaaacttgggtggtgcgactatcgaagcattaggtaaagaaggcgctatcactattaccgctggacatgatattaatagcactacagatactcttactgctaaaaaagatatgactcaagatggggataattatttacgaacctatcgtcaaactgaactaggaacgacagtagaggctggtggcaatgtatctattggcgccaaaaatgatatcaaggctcgtaatctgactgttagtagtgattccggtgctgtaaaagtgatcggtgaacatgacgtatccattgaaaatggatatagtgaatctaaggatgcctttgcgttatcctataaagaaaaagggtttcttaataagaaagcaactaaaattaagactaatgatgaatctaaacatgcgttaatgagtaccgttagtggtcatactgttgtggtgggtgctaataatgatgtgacacttacatcctctaatgtggtgagtactgcaggaacatctgtattagcaggtcataatgtaacaactgatgccgcagcagagcatacgctaagtaccgcatctaaagatgtaaaaaaatctggtattatgggtgctggcatgggtatcatgattggtaaaaaacaatcgaaagataactactctatcgatgaaacgactcataaagccactactttaggatctactaatggtgaggttactgtacaagctggtgatacagttcacttgactaccacaaatgcggtaggcaaagatggtgttatcattgtaggtcaagatattatattagatggtaaagatgacgtgtataaacaagaggagcgtcatgagcgaaagtcctctggtttaacggtaagtttaggtggcagcgttgttgaaaaattagatagtgctgtaaaaaaacaacatagtgcatctgatagaaaaaataatcattttaaatcattagaaggcaaacaatcaaaagatagattgctttctgccattggtgaagcaaagcaaattgttgatagaagctataatggccaaatgagaactattaattcacaattagaacgtgttaatactgatatagtcaatacgccagaaactgatacaactaaattagctgagcttaaagctaaacaagatgttttattgaaaaaacgaagccttttagaagagaataaggggaatataaataaagccactgataaagccattgatagagctattaatgtacaaataggtattggatctagtaaaagtgtagccgagtcgaagttagaacgtcatacgtactctggtgggactattgactctgacggaactgttttgattcatgctaatagtgcagattcaattaaaggtaatattacatccattggagagcaaatcaaagggacgaatgtacaattagctgcttccaatactattaatctagaggcaggttcaaatacgcaacgtattgaaacaaatagtaagtctagtggatggaatgtctctgctaatattggtatgagaactggtgggctcgtaggctggtcggcttccgcttataaagggtcagaaaacggcatagaagatactacgactcatacagggacacatgttgtaggtactaataacgtatctattgaaagtggcagtaatacgaacattattgggtctactgtttctggacaaggtgtaacggcgaaagtaggtaataatctcactgtagaaagtttacaagacagtcagatttatcatgaaacatccaagagcaagggtatatccatatctggtgcaaactttacgtctccacctacaattaatggtgctaatgtaaaaggcaatattgatagtacttataagagtgttactgcgaagtcaggaattcatgctggtagtgatggtgtgaatattactgttggtaatacgacaacattaaaaggtgctactataactagtaaggctacacctggaaaaaataagctatctaccaaatctctagttatggaagaccttcataatgaagcgtcttataaggctaagaaatctggtatagcaatgaatacatctggattgacagcaaaaggtattctcggtaaaatcaacccgttagggctatctccagtagtttctattcctgtatcagatgaggcacaatctaccacgaaatctgctattagtgataccatattagtagaagtagagcataaacctcttactactattaatagagatactgaacatgcactcaatagtataaaacctatatttgataaggctgatgtaaaagaacgtatggaatacgttaatgctgtatctgatgaaggctttaaacttattggggatattgctatgaaccaagttcagaaatatgaagaaaaagtcgctaatacttctgatgaagctctaaaaaaacgatatcaaaaagaagctgataaatggaaagatggtggaatttataaagttgccttacatggtggttttggtgcagtagtctctaatatggctggaggctccagtttagacggttttgcaactgctagtgctaatgagataatggtgggggctattgctaaggaactagctaaacatcctaatagtacaataaatgctgatggtaaatatgttgataactctgatgtatataaaattgctagtgcggttttaggtaaaacagtttcacactcttcgttaggaactggtatttcactatctgctacaacaagtaattatttaactcatgagcaaggaaaacagtatgagtatgagctttctttggctaagagtgaaaaggaacgtaaactagtaattcaaaaatggaaagctattgacgaaaaacaagaagctgattatattagtcaagagaaaagtatatttaaaaaatattttaatacaatatcggacttaattgattttaatatctatcttccgtataaacgagagcgtaacagatataatattagtcttgatcgtgcattctctttagattctaatactggtaagcttgagatgccgatgataaaagttaatgcgttatttttgaaaaaggaaagttcttttgctgagcaaatacaaaatgagagaaatatatttgctttaaatcaggctaaaattattagtaaaatacaggggtataaagatggatctgatgaatttgatgaaaatactttatatcattataatcggatacgagtaggagaagataaattcctatcacatattttaaaaagtactgatattacaagaggtgttttggatagctttactgaagatggtttttcagcacttgaacggtctttaggaattactcctgtttataaccgatattattatggtggtaaattattaggagatgggataggtgttgttggtggtggtattactgctggcacaggtattatagagacggggatgtttacagctggcggagtaacagctgttgctacgccggtatctgtgacacaaataatggcaggtagtacactagcagttcattctgctaataattttgaaaagaatcttacgctgtttgcaaagcataatagagagaagccagaaatatccaccaaatttaactttgatgaagaagccccttatattagggaaaatcgtctgcctcaagattctgaaactattttatcagatggtacatttgataaaataggtaaagtcgaacgtcatggtgctcaggtttataaaaaagataaaaaatattattatagagatacacttcactttggaaaggacgcacatttagaagtatttgatagaaaaggtaatcatttaggagaagcagatcctttgacgggggaaataaagccacattctgctgattctaaaaagaaacttagtaaggaatatagatgatagaattagaacctattaaacagataaaaagtccaagttcagaaaatgttataatttttgctttgcgatgtgcaaattatataattataaatgataaacttaatggtctaattattttggacatggattggagcgaagttaatagaatttatataggcgaacaattattacttattgaagctatatatacagatatgctgaaaaacagaattgtatttaaattagagtcgtctttatgctttgtagatattgatacacattttgttaagttaatacctattcctaataatattaaggaattctatttttatcaattatacaaatttaatgatgacataattttaatgcgtaccaataaaggggtagtatctttgtcattggttgattattctgttcatattataaatgaagtagcagaatatgatgaaaaatttgcatacgttgtttatgaaagtgaaacaaaagaatcctattctcataatggaaaattagtttgtttggatacagataatataactatattagattattttgaaaaggttcagattaaaaaccctatttctgtcccgtattttgatgtatctgtgacggatagatatggtttagctgttggagaggaacaattacagatttttaacctaaatggagatataaaaagtaggatattatcatataaaagaccgtggtatggtgagagggctgatatagttggaaaagatgatggacttcatttatatgttataagccgtaatgatttggaagaattaacaagtttttcagaatatttaattccgtttgacaagatgcctaatcatataattttattataattttaaatgatttattaaaggtgggggttgatttagatatttatatgactctgcgtttagcaaaatatcagtttaagtttaaagcagtcgtatatgcttggttatttctggtagctttatacatatatttatatattttaacctattattagatactttgataatgtatatagtaggattttattgattaatatgtaattctaatataaggtatataaaccaaaaaaggacgctatagtctaatcttcagtgataagtatatactgaatggtttagaactatagtgtcctttttttatcgttcatttaaaatctgcgtggatgttacagataactcatagagatgaaagagagtttatttcatgtgattattaaatctattggtgaaacaatttcaggtaaaacagtcaaattagtggcttctaatgatgtatctttacaagcggcaacaaatacaagtgaaaagcttgaaaatgctaagagcaaaggctggtctgttggggctaatattagtgttgctggcggcggtatactaggttttgatgcaagtgctaatgctgcaaaacaaaagaataatacaaaggaaacaacacatacaggtactactcttgtaggttcggatgctgttactattacatcaggaaaggatacccacatcagtggttccaaggtaattggtaaatctgtaacagccgacgtagggggaaacctttccattgaaagcttacaagatacaaagacatatgtaggtgaaagctctaataaagggtttagtgtatctacaaatgcgggttctttaagtaatgtatctatgagttcaagtaaaggtaaaatgaaaagtgattatgcgagtgttactgattaagctggtatatatgcaggtgacggtggatttgtaattttaagaaccttagtaaagcaggaaaagatgctgtgtggaatacattaggcacattacctaatctgttaccagattctagtaaatctagttcttccactacaaaatctgctatttcaaatggtacaatagaagtacgagatgctaattttaatatgcaaacactgtctcgagatacaaaagatagcttgaataagcttgatgaaatctttgataaaaagaaaattgaagaacgtcaagaattatctaagttatttgcaaaagaagcctttggacaattacataattggaatccaacctctaaagaaggtaaagctgcgaaagcaatagcccatggtgtagtcgctgaagtatctgctcgtatggcaggaaataaacctggcagtggtttttatgctggtgctaccaatgaagcattaattggagaaattcaaaaaattgcaaaagaaaaacctgatgtagctcaatcattaagtgctctactaggtgctgcagtaaatggcagtctaggctactcccctgtaactggtgcagctgaagcacaatatgggactaaatggaatgctaaccaggttgagcctaatatgaaacatatattaaatgatattgaatcaacgggtgtatatgtaaatagtcaaggagaaaaaatatacatatctaaactatataaagatgcttcgattgttgaatatgtggtaataacaactacaaatgaaaagggggaggaaataacctctgtacttgataaagattataactttgtagacgttgatattaagggtggaacgttaaatttatttaagtctgattatgatttaagaaagcggaataaagtagatataattttatataatgattataaaacgggaaaagatagattaaatgattttaatccgaccacatctgttttgacagttaaagttaaggaagacgttggtaatttaaaatatactcctaatttttatatgaagaaagaagatcggcctttagaggtaggttcaaaagttatagaaagttatatgaattcaaatttttggtcgatgtctgcagaacattatggatctacaggtgtccaaaatttatttaagaagatgacaccgggatatgttagaagtggcactcgtgcaattattaattctggttcaagagctattggtggatatgcttcaggtgcagcattgcttgtagcggcaaaaatagataatgagatgacttttaaaggtcatccagatttaattgctaaggcaaatatgttagatgaaactgcttatggattaggagtggtaacaagcttaagcgcggcaggcgccacagctggaacgttagggtcgggtgcgccattatcttatactgctagtgtaggagttaatgtatcctatggcatttttgttgagtatcagaaatataaattgttgaaggagaaagaagaaagagataagcatgtggggatataaaggattatttttatgttggtttattataactttatgtatttatacaaagatatatatattagcttggacgaataatgtgggctataaagagatgtctttaaatatgcgctttccaaagctatttaaaacatttattgtcatttcttatttttatgttgggctattaggatatgtattttggtttatagatgattttatgataatcatgagtagtacgattttgggtgtaattttaatttacttatcagggatgattattacaatacaaaaaaaatcttctccacaatatcataatggtaaaaaattagctcgatatatgttgctatatcctgctatcgcaatagttctatatttgtggcttaagtataatgggttttaatatgatatgttggaataatagttaaagtaaactaaattatttgcaaaagaagcctttggtcaattacataattagagttcaacctataaagaaggtaaaacagcaaaagcgatagctcatggtgtagtcgctgaagtatctgctcgtatagcagggaataaagctggtagtggtttttatgctggtgctacaaatgaagattttattggagaaattcaaaaaattgtaaaagagaaatctgatgtggctcaaacattaagtgcactactaggtgccgctgtaaatggtagcctaggccgttcaccagtgataggtacagctgaggcacaatatggcactaaatgggatgcatcaggtgttattagaatcaatagtgaacttgtgcttgatgaatatataaatattattgtaccagtagaattaaatggaacagatcaaaaccaagcatatatacggtgtagaaattttggtaatcaatatcaggcgtatggttttttgccgaggaggtcgccgttattcaatttgcagaaaaaggggcatagttgagagagcaagagctaataattaattctgatagaggttattcgaatattgatgaatggattggattagttaagcttttagttcctatattgactagaagtgataatgaagggatagaagtagatgctgatgctaataatgtgagccctttttctccagtatcaagtgttataaataatgcgcctaaaaactttgctacaggtactttaacttatgtaggtgaaaatgcttttggtaaaactgtagagaaagcatatttatctgtatctaaaccgatgaataataatattagagtccgagatgctaagatgcttggaggccttggtggcaaagcttataatgtaggcatgtttggaaattcatttaatgaaaataatgagcgttataatttaactacagaaaaggttgtctctacaacattagatagcgtaaatttgtcacatgatttagaattaatcaaaactaagcccaaaataaaagctagtaaaaataagttggttaatatggctaagattattacttttaagttgagtaaagctggaataaaaggtactgcgattgatagattggttggataaaatagataaacaggctgaagaggtagaaaaagaaggtagagagaaagctagaaagtattggtcgttttaattaaagaggtactttggtagaatatgtttttattaacatatattgaaaatatatcatttagtcatcttataatgatgatatctctaattatttttcttatatattttcttataaaagtattattggaaatcttaaaaaaatggctttgtaacttatacaataggtcgggattatgcttggtataattggttgagccttgttaataccttgttttcgttagtattcatagtatcatcttactttattggctccgttgatttctttcagtttactatatcggaacgtatactcttaggtattgtactattagatgtattattatcatttaatatacataatcacttattagaatatcgagcatataatcttaaagagattaaacgaatagaatatactacacaaagaaaacattatgttaggcaagcatcttatttgataattatatggttgttgagcatattagtctttaatattgatttatggcttttttgatttagtattgtatctattatatcggcttgttacaggaacatggttgggtacttgattttgagcatttagatttttcaattaaatgaaagtaaatataaaatctatcttctacaaaggtaaaaatcatagtaacttttaattgacacaaccccataaaatctgtatactattttgagtaagctttagtcgtgtttccattagccccggaagcaaaggacaagctgattttggtagaattatgacgttattaggaggatatgcagcatgaaaactacatttatggccaatccgaacacaatcgaacggaaatggtatgttgttgacgctgaaggtaaaactttaggacgccttgctgccgaagttgcaaaagttcttcggggcaaaaataaaccaactttcacaccacacgtagacactggtgaccatgtgatcgttgtaaacgcagaaaaaattcgcgtaactggtaaaaaattggaacaaaaggaatacttccgtcactctggttacccaggtggttcccgcttcactaaattgtccatgatgcttgaaaaacaacctgaacgtgttgttgaaatggcagttcgtggtatgcttccaaaaaacaaattgggtgcacaacaataccgtaaattaaacgtatacgctggtcctgagcatccacatgcagctcaaaaaccagaagtattagaaatttccgtacgataatctagagggaggaacatataatggcagtagcacaatattacggcactggtcgtagaaaatcttccgttgctagagttcgtctggtaccgggcacaggtaaaatcactgttaacaaacgtgaacttaatgaatatttcggtcgccaaactttggaattgatcgtaaaacaacctttgaacttgactaacacagttgaacaatacgatgtaatcgcaactgtagctggtggcggtccttccggtcaagctggtgcaattcgtcacggcatttcccgtgcgttattggacgtagatggcgaacttcgtcaatctttgaaaaaagctggcttcttgactcgtgacccacgtatgaaagaacgtaaaaaatacggtcttaaaaaagcccgcaaagcaagccaattctccaaacgttaatatttggaatacaggttattacacctgcagacaatgtctgcaggtgttttttgttgcttagattatggtgacactaataattatctgttatgatgatagtaatgataaaagaaagcgtatcttggataatatgaaatctgagtattataaatgataggagatattgttatggaattaatgaatgctattcaattgacaggtcccagtaactgtatttcatgatatgttacataatatatttacctgtgtatagggggctgtatgatacaaaatatatatcatttactagtggagaattggagctttttctcaggtctattatgggaacatgtcgtcatagctttgctttccagtataattgccattattttaggattggttgcgggtattttacttaacgagtatcgtcgagcagttaatccgaccatgatggttattaatttcttgtatactataccatccatatccatgctgggatttttgattcccttttcaggaattggtaatgcaacggcagtgattgctcttgtgatatatgcattattgccgatggtgagaaatacatatactgggttaagcagtattgataaggaaatgattgaagcggctacatcgctggggttatctcatgtacaacgtttacgatatattgaattgcctttagcctttccggtaatcatggtcggtatacgaaatatgctagttatgactatagcgcttactggggtagcatcatttattggtgccggaggtcttggtgtagctatttatcgaggtattactacaaataatacgactatgactgtagccggcagtttactaattgcttttttagcattgattatggatggtgtattaggcttttttgagaaaatcatactatatagagggcattgcaaacgtacttttaaacgtattggtattgtagcctcaattgtgataattagtggtattggtgtgtttatgtggccgtcgcaacaatctgacgtaattcatgtagctacaaaaccgatgacagaacagttgattttgggcgatatgcttaaacttcttattgaacaagatacagatttaactgttgaagtaacagccggagtaggcggaggaacctccaatattcaaccggccatggagtccggtcaattcgatatctatcctgaatatacaggtaccggttggaatgcagtactaaaacgagacacgcaatatagtgaaaatttatttgatgaattacagcgcgcttacgaggatacatatcaatttaaatgggtcggtatgtatggtttcaataatacatatggaatggctgtacgtaaggatattgctaacaaatataatttaaaaacatattcagacttagcgagggtttcgtcacaattgattttaggtggggaatatgattttttcgggcgccaagatgggtattcgggattacagcgagtatacggcatggactttaaagatacgaaggatatggatataggtttgaaatatcaggctattgaaagcggacatgtggatgctatgcctatatttactactgacggtcagttgagccatgcgtctattgttgttcttgaggacgataaacatttatatccgtcgtatgtttgtggtaatgtcgtcagaatagatgtgttaaagaagcatcctgaactagaatcggtattgctgaaattgacaaatacgattacggatcaggatatgtcatatatgaactatgaagtggaatcggaaggacagaaacctcatgatgttgctgagcgatacttacgcatcaaaggtttgttatactaacgtgggttgatagcgggtacatagtattgtattgtgattataagattacgtttacatctataattaattcccctataatagatatataataatcgaaatttatcgaaaaaagattttcatataggagaactcatatgatttataatacaattcaatacgtagtggataacggtattggtacgttgacatttaatcgtcctaaagtggcgaatggttttaatatcgaaatgtgcaaggaaatccttgaggttttagataaagcacatcatgatgaaagtgttcgtgcattgctgatcaatgctgaaggcaaggtattctctgctggcggcgatttaactgaaatggaacgggctgtaaatgatggtgatacagagtctttatttgaaatcgttgagctagtagctcaaatttctatggctatgaaacgcttacctaaaccggttatcatgagccttcaaggtgctgcagcaggtgctgcgttcaacatggcgttagcagcggactttgtggttgcagctaacaatgtacgctttattcaagccttcgtaaacgtaggccttgcacctgatgcaggtggtttgttcttgttaactcgttccattggtatgaatcgtgctatgcatatcgttatgactggtgaagcggtttccgctgaaaaaggtaaagaacttggttttgtatataaagtttgtgaaccagaggatttagagactgctacaagacgcttagttgaaaaattagcaaaaggccctgcaaaatcgtaccgcgttatgaaggaaatgatgtggagaagcttcttagcaggctgggaagaatataagacatttgaagtagaaaaccaatgtgaattaggtctttctgaagatttcaaagaaggtgttcttgcctttacagaacgccgtcgccctaaatttggccaaaagtaagactgttttgtaataagatgtgctaaatcgtctgtaaattagaactacatactcatatcattagaaccgatgtagctcagatagtgtgttacatcggtttttccttttcatacattgacaaaacgtatataatagaactattaagatagttttaggaggtccatattttatggctcaagatacaattaaatgttatgatactcctagtgatgtggtcgctgcattggcggaggattttattgctttcaccaatgaagaaatcagccgcaccgaaacatgcattgtaggtatcactggaggcacagtcatcaatggtttgttagagacattgaactctgctgagtacattgagcgtgttaactgggaacggatattttttgtctggactgatgagcgatttttgcctcagtctcatgaagataattatttcaaccgtgtaaaaccatatctgctttgtaaggcgaagggggcggcccatttctttcctattaacaccaattcgaaaactgttatagaggcagctgacgagtacgagaaagaaataggcaatgttcttaaagcttgtaaaaaatctggcctggatttagcgatcctagatcttggtgaggatggtcatacagcaggactttttgcgggttctcatgcactgcgtgtagcagatcgcaacgttgtgcccgttgaggatggcaaggtgtgggaacgcatttccatgaccttctcgtttttggcgaaaacagatgtcctttggttcactgtgactggtgaaagtaaacggactgcccttacaaaggttttgtaccaacgtgaggattatgaagatacatcatgggataaacgtatcggtcgtgtattgccgggtgcagtgctttcacaagaacctatgacatggtatgtggacaaagatgcgtataatgatgtacactgatggatgtagtattaagtaaatataaaggagatacaaatggggtctataggaacacctgaattaatagttattttagtgattgctctagttatcttcggacctggtaaattacctgaagtgggtaaagcgattggtaaggggatcaatgaatttaaagatgctctttccggcccaaagaaagctgtcgatgaaacaaaggaagccgttaaatctgctaccactatcgatgtgacagctggggctaaaaatgatgaaaaacataaggaagctaatgattaggaggtattattatgtgcaaagattgcggttgtggtgaagataatggcgttgtaacaaaggtattcactgtacctggtatgatgtgtaataattgtaaggaaacagtagaaggtgctacattaggcctagaaggcgtacttagctccgaagttgatttgccaaataaaacggctactgtatcttttgatccagcaaaggtatctgttgaaacgattacaacagctattgaacgaactggatttgatgtagagtctgtggttgatggtgttcgtgaacatagccatggtttactaggtacgattaaacgtctctttaaataatcgaattcatagagctgtattgaaacatcgtttcgatacagccctttttgtattgtgaggtgatgagatgatacgcaagtttgattcggaaaattttaaatgggatggcgtcgataccttggtgtataaacaagatggtagtccttttaaggatgtaacacgacaagtgttatatgatggggcttatgatattccctgccaattccgttattttgaatgtttgcccgggggctactctacgttagaatatcatgagcatacacatatggttatgattggccgcggtaaggggcagcttttgctaggtgatgaaatttatgatgtagcacaaggggactttattgaaatcccaggcaatacaattcatcaatttagagctaataaaggcgactatatcggatttttctgccttgttaataaagaccgagataaggttaaattattgactgatgaacaaatggagacattgcgtcaaaaacctaagattaaggaatttttggagggactatgagtacatggacacgagcggccttaaccgttttgattggcctgattatttggtttttgcctcatacagaggcgattaagcctgaaggttggcatttgttggctatctttacggctacgattgttggttttattttgcgcccttggccgacgggtattatggcactctttggcattgttgctgctgtggcaacgagctctattacgatggtgcaagctttgggtggctatgcagaggctaatgtgtggcttatcgtagccgccgtattcttttctagaggtattattaattccggcctcggtaagcgcattgcatacacattaattcgtgcctttggtacaagttctctgaaattagcctatgccttagcttgtacggatttgattatctctccagccacgccatctaatacggcgcgtgggggcggtatcatttttccaatcgtccaaaatatttcccttgcttttgactctgagcctcatggcaatacagcacgtcgcataggggcgtacttgatgacgacggcccacaccattaatacaattacagtaacaatctttttaactgcttgtagcggtaacctattgatcacatccttaggtgcaaaattatttggttatgatatttcttggtgggaatggttccaagcgggtgtcatccctggtgttatttgtatgattttgatgccatggtttatctataaaatctatccgccagaaatcaaagaaacaccagaggcggctgagatggcacaaaaggaattaaatgcacttgggccaattacgaaatctgaaatttctgtggctattatctttatcctgtgtattttactttgggctacggcgatttggacaaagttacatcctacagtagttgctatgatgggtgttcttgcttgtgttgtaactggttcccttacatgggaagacatattaggtgaacgcaccggttgggatatcctcatttggatgggaaccctcgttggtatggctggccttcttggtaaacttggtgtagtggctgtgtttgctaattttgtaagtcaacatctcgtaggtattgattggttctgggcatcctttattatctctgcaaccttcgtatactctcaatacttctttgctagtggtacggcgcgtattaccgcattattctccgcctttgcagccattttggttgccatgggtgcaccgattccatttaccatcttgctctttggtttgatgaatagccctggctgtacattaacgcattatagctctggtgtaacaccaatcttctttggtgcaggctatgtacctcaaggcacatggtggcgcgtaggtcttgctatttctgtagtaagttttatgattcacttctgggctggtacatttggtatgtggctgttcggtattttataatatatacatccctcgctacggcgggggatttttgtatatcaaatattggttcataaacatatatgggtatagctattgggtatggtgaacttcataaaaaaaatataataaatctatagaatatttattgcatgacactatggaacgtgttattatagttttatcgttacagattattttaggaggaaacatgttcggtttagtcattagcttgttgattatcgcgctggtcgtgattattaaaaacattcgaattatgaacaacaacttaacacgtttttgtcttaaaagttccgcgaatggtttaatatacaatcaataagatttgactatagtgtttcttatttgtatgtattccatggggtacataggtttttatgtatgtattaaggaattctgtaaacaaaaggaatatcatttgtaaacttttaagacggttctttggaatcgtcttttttttgttcattgtgaaagccgtccaagtggatactttcaaaagaagtgaggagaatatcatgagttgtagaagtgacaatttaaaaacaggcgtagcacgtgcaccacacagatctttattaaaagcacttggttttgtagatgaagaattaggtagaccggtcattgggattgccaattctttcaatgaaattattcctgggcatgtgggcttgaaaaatattgtacaagccgtaaaagacggtatccgcaacgcaggtggtgtgccaatcgagttcaatacaatcggcatttgtgacggtttggcgatgaaccacatcggtatgaaatactccttggtaactcgtaatatcatcgctgattccatcgaagcaacagctatggcaacaccatttgatgcgatggtattcattccaaactgcgataaagtagtacctggcatgttgattgctgcagctcgtctaaacattccatccgtattcgtatccggtggtgctatgcttgcaggcgtacacaatggcaaaaaaatcggtttgtccgacgtattcgaagcagtaggtaaacatcaaactggtgaaatgggtgatgctgagttagctgaaatcgaaaataccgcatgtcctacatgtggttcttgctctggtatgtacacagctaatacaatgaactgcttaacagaagctcttggtatgggccttcctggtaatggtacaattccagcagtatactctgaacgtttacgtcttgctaaattagcaggtatgcaagcagtagaggtattgaaagcaaaccttcgtcctaaagacattatgacacgcgaagcctttgaaaatgcagtagctctagatatggctttgggtggttcctctaatacagcacttcatttgccagctatcgctcacgaagcaggtgtaccattgtccttggacgactttgatcgcattgcacaaaacacacctcaattgtccaaactttctccatctggtaaatacttcatcgaagatttgtatgctgcaggcggcgtatctgctgtgttgaaacgtttagcagaaaatggtcgtttgcatacagattgcaaaactgtagctcttaaaacacaaggtgaaattgcaacagcagctcatgttgtggatgaagatgttatccatccatggaataatcctgttcatgaaacaggtggtattgccgttcttaaaggtaaccttgctgtagacggttccgttgtaaaagcaggtgccgtagatgatgatatgctcgttcactctggcccagcaaaggtattcaacagcgaagaagaagctgttgaagctattacaggcggtaaaatcgtaaaaggtgatgtggtagttatccgctacgaaggccctaaaggtggccctggtatgcgcgaaatgttgacaccaacatccatgatcgctggtatgggtcttgataaagatgtagcattgttgactgacggtcgtttctctggtgctactcgtggtgcatccattggtcacgtatctccagaagcagcagctggtggcacaatcgccgttgttgaagatggtgatatcatcaatatcgatattccaaacggcaaattggaattagccgtatctgacgatgaaatcgctcgccgtaaagcagcattgaaaccattcaaatctaatgtaactggatacctaaaaaaatacgctctccatgtatcttctgcagcacaaggtgctatcgaaattttagaagactaataggagaagtattgttattactacaagagtaggtgtcttatgcataaattatatgattttatggaagcccgtgaacggttgagcacgattacggtaaaaactaaactgcttcatagcgatgtgttctctgaagagtgtggcaatgatgtgtacatcaagccagaaaacttacaaataacaggttcctttaaggtgcgtggagcatataataaaattgctaaattgacggaagaagaaaaggcgcgcggtgttattgccgcgtctgccggcaaccatgcgcaaggtgtagcgcttgctgcaaaacgtctaggcattaaggcgacaatcgtcatgccaaaacatacacctctcatcaaggtgaatgctacaaaacaatatggcgcagaggtcgtattatcgggcgagatttatgatgaagcttaccaaaaagcgatggaattacaacaagagcacggatatgtgttcgtccatccttttgatgacgaagatgtcatcgaaggccaaggtactattgcccttgaagttcttgaggaattgcctgatgcggatgtattacttgttccagtaggtggtggcggtattgtttctggtatcgcagctgctgcaaaattaaaaaatcctagcatcaaagtaatcggtgtagaacctgaaggtgcggctagtgcaatagctgcgttaaaagcagatcatcctgtaccacttagtgaggtggccactatcgcagatggtacagctgtacgtcaaatcggcgaaactacattagaatatattaagaaatatgtagatgaaattattactgtctctgactacgagttgatggaagcctttttgttgctcgttgaaaaacataaattagtagcagaaaactctggtattttgcctcttgcgggtctaaaaaaattagactgcaaagctaaaaaggcagtagccatcgtcagcggtggtaatatcgatgtattaactatttcttctatgattaataaaggtctcgtattgcgtggccgtatctttacattctctgtaaaccttccagataaaccaggccaattggttgctgtatctcaaatgcttgcagatgcggatgcaaacgttattaaacttgatcataatcagtttaaaaatcttgaccgcttccacgaagtggaattacaagttactgtagaaaccaatggtgaagaacatattcaaagcattattgatacttttaaaaagaatggttataccattaaacgtttaaattccagcgaaattttatctgaatagctggtcgaaagggttcctatgagcgcagaaacaatcaatggggcacgtattgtccttgaaacattgcatcgccttggtgtaaccgacatgttcggttatccaggtggcgcggtaattccaatttatgatgaaatttatagcttccctgaaattaaacattattttgtgcgtcatgaacaaggtgcagctcatgcggctgatggatatgctcgcgtatccggtaaagttggcgtatgccttgccacatctggccctggtgctacgaatcttgtaacaggtattatgactgcttatatggactctgtgcctatggtagccattacggggcaagtaggacgcgcactaattggtaaggactcattccaagaggcggatatacaaggtattacgatgccgattacaaagcataactatcttgtgcaagatattcacgatttaccacgaatcattaaggaagcgtatttcattgctggtacaggtcgtcctggccctgtattaatcgatattcctaaggatatccaaaccgaaaaaatatccatgacagaatacaataaattgtacgatgtgccaattcaacttgaaggttacgatccaacctataaaggtcaccaaggacaaattaaaaaggctgcaacccttattaagaatgcgaaacgtcctcttattattgctggtgcaggtgtattaaaatccggtgccatggcagaacttaaagaattggccgaaaaggctcaaattcctgtagctaataccttggtaggccttggtggattccctggtaaccatgaattggctcttggtatggtcggtatgcatggatcggtagcggctaacaattgtaccgaagatgcagatctcgttattgcggctggtattcgtttccatgaccgcattacaggtcatccagatttcttctgtaaaaaagcaaagattattcatatcgatatcgatccagctgaaatcgataaaaacgttaccattaacgtaccaatcgtaggcgatttaaaacgagtattaaccgaattgaatacttttgttgaacctactacacatgaatcttggatttcgcaaattcgagaatggcaacaagaatatcctatggttgttcctaaatcgactcatggtgagttacatcctcaatatgtattatctgaactcaataaaattgctaaggatgatgctattatcgtaaccgatgtaggccaacatcaaatgtgggctgctcagttcttaacacataaggcgccacataccatcgtaacttctggtggtgctggtacgatgggctatggcttaccagcggcaatcggtgctcaagtgggtgctcctaacaaacaagtcatccttgttgttggcgatggtggtttccaaatgacctgcgaagaacttatgatggttcgtcaatataatttgccaattaagattgtcatcatcaacaatggatatcttggcatggttcgtcagtggcaacaaatcttcaatgaccgacgttattcctatgtagatttagaagtgagtcctgatttcttaaagctagctgatgcatttgatttgaaagcagcgcgcttcgattcagttgaaacgttcaataaagattttaaatcctatattacatctgatgaaagcatcgtcttggattgtcgcgttgaacgtgaggataatgtattgccaatgattccagcaggtggtactgtgagtggtatgatgggcaagaaaggggtgctataatggctaaagaacatcaagtgttagtgattgccaaaaatacggcgggtattggtactcgtattttagcactcttcaatcgccgtggttttaacgttacgaaaatgacttctggcgttacaaataagcctggctatgcacgcattacgcttactgttgaggctgatgaccgtgcacttgaccaaattcaaaagcaaatttataaactgattgatgtggttaaggtgaaagtatttgatgatcatgatgtagtttgtcgtgagttaatgcttatcaaggtgaaagcaacgtctacaacgcgatctcaaattgttcaaattgccgatgtataccgcggtaatgtacttgatatttcccctacatctatgattatagaagttatcggcagcgacgataaattacgcggtttcgtacaaattatggaaacctatggtattcttgaaatcgctaaaactggtattaccgctatgagtcgtggagaaaaaatgtaggagatgattgtgtgagtagtgaagtactacattatgaagatgtcaaatttcgtcgcgatggtcgagaaatcctaaaaggcgtagattggcacgtggaagaaggcgaaaactgggctctattaggcctcaatggggctggtaaatcgacgatgctcagtatgattccagcatatcaaatcccaacgaccggtctgttgcgcgtgtttggccatgaatttggcaaatatgcatgggttaagattaaaaatcgcttaggatttgtaagcgccacattgggccaatttcaatctaccttagatcgccaattggtagaaaatgttgttatttccggtgcttttaacactatcggcgtctataaggacgtctctgaagaccagcgaaaaaaagcgatagacctaatggaagaatttaaaatctcctatttggaaggccataaattctccaccttatccgttggcgaacaacgccgtgtactattggctcgtgccatcatggcagatcctgatttgttgatcttagatgaaccttgctctggtcttgatttgccggctcgtgagcaattcttaagaaccgtggaaaatatggctcgtgatgagaagaagccttttatctatgtatctcatcaaatcgaagaaattatgcctagcattacacatgtagcaattattaaagatggtctcatcgtgtataaaggcaaaaaacaggacatcttaaccgacgatatattgaccgatgttttcggtattgatgtatctgttgtttgggaaaaagatcgcccttgggttatcgttaaataaggtatgaaaatttcagaattcatatttttttaatacaaagagggtacaaatttagttatgaattagtctatttgactattcgataaattacgatatacgctacaaaccttgcaattatttgcaagattgtgtacagtatatatattaaatattctattgaatataaattggaggttgtctaatatggcaggtaaaattttaggtacaacagtttactatgatgaagattgcaatttaagtaaattggaaggcaaaaaaattacagttttaggttacggttcccaaggtcatgctcatgcattgaacttgaaagaaaacggttttgacgtaactattggtcttcgcgctggttccaaaagctgggcagtagctgaagaagcaggtcttcctgtaaaagaaactgcagaagcagttaaaggcgctgatatcgttatggtattgattccagacgaattacaagcagacgtttatgcaaaagatatcgctcctaacttgaaacaaggtgcatacttagcattcgctcacggcttcaacattcacttcggtaaaatcgttcctcgcgaagatatcaacgtattcatggtagcacctaaaggtcctggccacttagtacgtcgtacataccaagaaggctccggcgttccttgcttgtacgcagtagaaaaagacccatctggcgatactgaagaagtagcattagcttggacctctggtatcggtggtggccgtgcaggtatcttggaaactaacttcaaatccgaaacagaaactgacttgttcggtgaacaagctgtattgtgcggtggtttgactgcattgattcaaactggtttcgaagtattaacagaagctggttatgaacctgtaaacgcttacttcgaatgcttgcatgaaatgaaattgatcgtagaccttatctacgaaggtggtttccaaaaaatgcgtaactccatttctaacacagcagaatatggtgattactatgcaggccctcgcgtaattactccagaaactaaagaagctatgaaacaaatcttggctgacattcaatctggtaaattcgctgatgaattcttggctgattctaaaaatggtcaaaaattccttaaagaacatcgtgaagcagcagccgttcatccaatcgaaccagttggtgcagaacttcgtaacttgatgagctggttgaaataagagtttgcattagtaatttcttgataagcataggcttactgaaagcgaccccatttggggtcgtttttttattgagtaatacaagtacgtatgatatagttaacgtagagtcaatgtagtatattttggtataaggagagatactatgagttctacaactattattatcatcgtggcggttgcagtcatttgggccattttgtttgccgtatttatgaagttcaataaaaaacgacaagccggtgaacaacaatttgtacaagagaatgctaataaagcgattcttcatatttatggtaaatctgtaaaggttgatggtaaggacctttctactattgatcataaaactggtcaatatggtcaagtcattgtggcattaacaccaggagaacataccattgaatccgtatattacacgacggataatgtgggtactaaaacaaagaatgttgaaacacagcctgttaccatcacaattccagtacaagcaggtaatgaatataatgcggctatgtatttctattccgcagaacaacgtaatgcgtattataaaggtgacgttgacgatgccgttttagaagttgaactagaattagaatctggttttacagcgaatactcatgcttatatcatcgtgtaccgtgaatgtaaataaattagtatagtaactgtttaatagagctatcattgtggtagctctattttttataaatcgttggtggttattatcatatttatttgtgatataataaaaagatatatgaaaggagcataattatggacttctataccgtttcctatgtggaaagccaaatcacatctggtcatacattagggttcgttatctttgtagttgttttattagcccttctcggagtaggtattcaagttttgcgtaatggttttacaagccgctatcgtgatttaaccgttattttatcattagttattgtatttttcttaggtcttgaatatcaagaatatgggcgtatgaaggtgtattcagaagattcctctcgcatggctcagttcttacactcctttagtgccgatcgtggtgttgatgaaggtcaattagctgttaactccttaaaggtacgtaatggtataattttaaaggttagcgatgcatactatgaggtgcaatttaaccctgaatttactacctatacaatcactcgtgtgtatacagtaagccctacagatcgaattcatgataaagcggatgtattaccataaggaggaccacatatgacagaagctatggccgtctatgggatggtctttgccaaactcgccataggtctcttggcgattattttacaaattaatttaatgggtaaaggtaatttggcgcctacctcagccttagatcaattacaaaactatgtactcggtggcattatcggtgccatcatctataatgatgcgattggtattttacaatttatgttagttctcatcttatggactattctcgtaatgacgcttaaattcttaaaaggcaatcttcgattctttaaaacaattctagatggtcatcctgtaattgttatcgaaaaaggtcatgtcttaactgaagaatgtatgcgttatggtattcaatcggctgaattaaaactaaaacttcgcacagctggtgttcaatatgtagcagatgttaagcgcgccgtattagagcaaaatggtcagcttagtgttgttcagttcggtgaagaaaatattcgttttgatttgattaatgatggtcaaattaatcaatttactcttgatgtaattgaaaaagataaagaatggctagaacaagaggtacaggcacaagggtattctattaaggatatctacattgcggaatacagagatggtaaagtcgtattgtatccgtatgagaaaaaacatcggcctcaattggtaaaaacaattaaaacaaagactattcatacaaaggataaaataaaatctaaaatataatctcttgaattatatatagagagcgttgttaagcccacttttcgtagtgggcttatatagaaaggaaattagtgaaccgtaaagatttaattgatcgattacaagaactttataaagatgaggatagtcgcgtaactattaaccctcatgcggagcaaaaggttgctattgtttatccaaatacctatttcgttggcatgagcaatttaggccttcacattatctatgaggaaatcaatttgcatccatctagtgtatgcgagcggatattcttgcctgagaaaaaggaactagacgtctatgataagacgaaaactccgcttatgagtgttgaaacgcaacgacctatgcatcagtttgatgtagtggcctttgatgtgacctttgaaatggactattttcacattccattaatgctacgatatgggcgtgtgcctgttatgagcgaagatcgaactggctttgatcctatcgtcattgccggaggaccttgtgcgacatttaatcctgagccctttgccgattttatcgatgctttcatcatcggtgaaggggagggcatcgttactgctgtgttagaacgaattcgcaagggtcgtgagaatggtgaaagccgagaagaaacgattgccggactagctcaaattgatggtgtatatgtacctgttttatatacccctcaatatgatgataataagcgttttgttggctatgatatagcagatggtgcacccaaaatcatacgacgccactttgagcctcttacgagcggtggtgaaacggtaattgctacgaatttcaccgagtttggtgccatgtatatcatcgaggtagctcgaggttgtggccgtcattgtcgattctgtatggctgggtactgtttccgcgtaccgcgggtacgaccactggatattttgaaagaaggcgtcgatagagcagaaaagttaggaaaaaaggtaggtcttatgggggcggccatttccgattatccagaggttgatgagctcgtaagctatattcgctctaaggatatgcgctattcttgtgcgtccttgcgcaccgattccttgacacaagccgttgtcgatggattggctgaaagtggacaaaagacaattactattgcaccagaaacgggtagtgaacgcttacgccgtgtcatcaacaaggggattagtgaagaaaatcttcgcaccgcggctcagttatccgctaagtccggtattcaacatatgaggctatatattatgataggacttccaacggaaacagatgaagatatagatgctatcgtaggactggcagaacgtacacaagcacacatggctgaggtgggctgtaaaggccgattaacacttagtatcaatccatttataccaaagccatttacaccattccagtggatggctatggatcatcaaaagagcgtagaaaagaaattacaatatattaagaaatcattgcaaaaaaatcgtcgtatcgaggtactcgttgagtctcctaaagaagcatatatccaaggtgtactcgctcgaggtgatcgccgtttaggcaaggtactcgctgcatgtgctctagatagaggtagcaaatcctttaaatctgaaatgaaaaaagccggcctcgacatggatgactgcaattatcgggaacgcaagtttgaggattatttgccttggtctcatttggatatgggcctaagaaatggttatttagaacaagaatggcaacgggcagttgatgaagcgtatacaccgccttgtatggaagggtgtaagcgctgtggcgtgtgtaagtgatttgagaaataaatagtagaggagcagtcgtatggatattactgttgtaaatgtgaatacaaatgatgatcgtaaatggtcttttgaaatgcctaactgggccaatcaatttcctctggttatgggggatacatatcgtcatggcggtgtatctaagaagccatgtgaatctctaaatttagctactcacataggagattcattacaagatgtattagataaccgcagcattgtggctaatcatttaggcgtatcgccagaccgcattacctgcggcaatcaagtgcatggcctcaatgcagtacgcattacagaagatttaatcggtgctggcgccatgagttctgataccgctattccagattgtgatgcaatctatacggatatacccaatattccattattcttatttactgcagattgcgtaccagtaggcatttacgattctgtgcatcatgtggtggctaccgttcatgcaggttggcgcggtgctataggccatctaccggttatcaccatagaggcgatgcaacgagattttggtacgcgctttgaagactgctatgtatatttaggtcctagcattggacctgaatcctttgaggttaatcaagaactggcagatactttcaccgacgagtggaagaaaataactgatgccaatagtgatgaattggtccgatatatcgttagagatggcgcgtcgaaagcgacaccacatgttgatttgtggcgatttatcgaagaagatttgttgcaacgaggtgttccaaaggaccaaatctgtattggtagtaccgatagtatgaccgatgagaattgtttttcctatcgtcgtgaacatggaaaaacagggcgtatggcattatttggtatgctcgaaaaacggtaaagatatacattattggttaaatattatataatataagtctataggatatttatttatacgttactatatgggaggatcatatgattgaagaatcccttcataaaatccaacaacgcatggctgatgcaatggctagcgtagggcgcacggatacggcgttacttgttgcggttacaaagaatcatcctgtaacggctgtagaggaagtggctcgccttggatgcactcatgtaggcgaaaatcgcgtgcaagaggcaaaagaaaaacaaatgctttatacaggacctaaattgatatggcatttaattggccatttacaagttaataaggttcgtcaagcggtaccgatgtttgatttgattcattctgtagatagtaagaaactattagatgaaatcgaaaaggtagctgctaagcatgataaggtacaagatatattgttacaagtcaatgtagctcgcgaagcgagtaagtctggtatgtccgtagaggattttcctgacatacgagactatgcgaagaccttaccgcatgtacgcgttaaagggttgatgtgcatggctccgtttttcgaaaatccggaggatgcaagacctatctttagagtggcacatgctttgtatgaagatatgaaagggtatttccctgatggggatatacaatatttgtcgatggggatgacacatgactttgaaatagccttacaagaaggggctaacatcgtgcgtgtaggtactgccatctttggggaacgtgtatataactaattgggaatataacagtgtgagtatattaggaggattaccatgtctatgggagaacaatggcaaaaaatcaaaaattttatcggcattaataatgatgaccgttatgattatgatgatgagtatgaatatgaagatgatgaggactatgcagaggacgtgccaccagtagcaccaacagcagctgcatctgagttccatccacgtaaggtaggaggcacatccactatgacacaacgtccaacagccatgaaagtagttgttatcgaacctaaggtttttgaagattctgaaagcatcactcatcaattgcgtgacatgcgccctgtattgattaattttgaaaatacagatcctcacgaagcagctcgcatcgttgactttgtatctggtgcaacatttgcattagatggcaaattggaaaaggtaggcaaagacattttcatgtgcgtacctgttaatgtatccattgattataataatgaatctgaaagtggaacaactgagcaacaagaatttaactggcaaaataaataatccggtatagaaaaagtggtgatactatgttgggaaaaacagtatgtataggcgtaggcgccatgggtggtgcccttttacgaggcgcacttacacagggcgtattacaaccaaatgacgtatcaatcgtagtgcgtcgccctgaacatcgcgacgaattagttgacgaattgggcgttacaggttttgtagaattacctgatatggcgcagtttgacacgattatcttagctgttaaaccacaggtattaccatctgtattgagccaattaacgtctgtgaaagcgggtgctacggttatttccgtggcagctggcgtaacattagataccttgcgcaaagtattaccaaccgcggtgttgtaccgtgccatgccgaatactccagcatctattggatgtggtatgactgcgttgactgcggataatggagctgatacaattcacgtggaggctttatttaatgcagttggtgaagtagccgttgtcagtgaagccgacctagatcgattaggcgctttgtctggtgctggcccaggatatatgtttgtcattttagatgccttggctgatgcgggagttcgcattggattacctcgtcaattggcgattaaggcggctgcccaaacgatgtatggggctggtaaaatggccttagaatccggcacacatcctgctgtattgcgcgatcaagtgactagccctggcggaactacgattgctggcattggagctatggaaaaaggtggcttgcgcagtgccctacaagatggggttattgcttgtttagctcgttccaatgaattggggaaataatggctgatactagtaaattaattagatattttgaagcaagcggtagcggtgaagaagcgcgccgtatgcttgatttagccgaacaagtagtaaagggaaaaccgtatcgcgtttgtgactttacaagtcctgcaggacttgttattgcggatgcaattaaggcggcttatcctgaattactcgttcaatcctatggcggctatgaaggggcggaacgtattcgtatcgcctttgtagatagtcattttcaaggtacagtagatatgggtatcgttccattgaaggtatcttgggacccacgatttagattgttaaatcatcgtgatgtgcttggttctttgatggggcttggcattgatcgctcgaaatttggcgatattatcatgggccaagggggcgcacaaattctcgtagatagcgctgtagcagattttgtagtgcaaaattttacaaagattgctatggttgccgtatctgtaactccgatggagttagatgagatagcaccaaaagaagaaaagattaaagaagtgcgtactaccgttgcatcacttcgattggatgcggtagcaagctctggctttagcgtatcccgtaccaaattggtgagcgctgtaaatgccggtttattgcaagtaaattggcaacctgcaaaggggccatcccaagaggtcaaagaaggggacatcatctctatgcgtggtcgtggccgaatgaaggtagaggctattacgggcacatcccgtaagggacgtatcggcgtttaccttaaacgatttatgtaagcaaataagcaatcggcttgattcatcaagccgattttttataccgcttatgtatatctatagtttcatatgtcggtatacataagcggtatcatcaattatgcgaggttcattatgatatctctaacattacaaactacagcgagtgataccattttatttgtaggtggtggcgccgtggctgaacgacgtctagcattatgcttagacgagccctgtcaatgcattgtcattagccctgttataacaaatcagatgaaagcttggcatgaggataacagatttatttggcacaatacagtgtttagcaatgaccatatagacattgtaaaacaatgtaaattattgtttatctgtacagataataaagctgttaatgattatatggaagttatagcacgcaataatggcatactagtcaatcgtgccgataatgctacagcttgtgatttcacagtaccatcaacaatcgatatgggtgatttgcatgttgcgattagtgctaataatgggggaccacgtattaatcgtcttgtgaaacaagatatgatgaatcgttataatatattgcaaattgccataccgagacttaaaattatgagggaagaggtaaagttactgatccctagcgtagaggagcgtagccgtttttggcgtactcatttaagcgaaactgaatttcaggctattcttaagggacaatggcctttgatagaggagaaactacaccatgcaattagtggtattaggactaaatcatagaagtgctgccgttgaggtgcgtgaacgtttctcgtttgaaaaaaacgaggtagaaagcgccttaaaccgactctatgagtacgaaaaaatttcagaatgcgtcattctgtcgacgtgcaatcgtacggaaatttatgccgtattagaagatgtacaatctcctaaagcgtatatgctcgatgtattaaagcatttaaaacatgccgatacaattgatgaatccgcatttttcttctatgaagagaaagcgtgtatagaacatctattccgcgtatctgctagccttgactccctagtattgggggaaggtcaaatccttagccaattgaaaggtgcctatatcgcggcctatagtgcaggctttacgggaaccgtatttaatatcttgttccaacgcgctattagcgttggtaaaaaggttcgaaccaatacaggcattgcgaatacacctgtgtctgttagttacacggcggttaacttggcggaagatagcctagataaaccactttcagaagcaacagtcctcatcttaggggctggtaccatgagtgagttaacagctacacacttacaatcaaagggcgtaaaaaccatattcgtatcaaatcgaacttttaccaaagcggaagccttggcgaagaaatttaatgggcaagccattaaattagatcactatgtagaacaagcagaacatgcagatatcatcattacatcgacgggggcaccgcattatattattggtgaaaaagaggctaaacgaattgccgaattgcgtcatggacgtcccatcgtgatgattgatattgcagtgccacgtgatatcgatcctgtcgttgcggatattgaaggtgtgtacctattcaatatcgatgctctagaaagcgttgtagaagaaaataaacaacaacgcgaggaagaggcgaaacgggctgaaccgattattcatgaagccatcgatgaagtgttagaaaagtttagttatttatccgtacgtcctatgatggcattattgacggataaggctgatcgtattcgtcgccgtgaattacatcgagcgctggctaaattgccggatatttccgataaagagcgtcgcatcattgattctatgagtcgtatgatcgttagaaaaatgctaagagaaccgatgattcatttcaatgaaatcgccggtacacaagaagaaggtttatattgggatttattcaaagatatgtttaatctcgagaaagaaggctcgtagtatgaagaaccacattagaattgggactcgaaagagtgctcttgccttatggcagtcagaatatgtaaaaagtgaattgcaacgtttatacccgggggttaccgtagagttagttcactttaacaccaaaggggaccgcattttgaataagccccttgccgaagtaggtggcaaaggtttattcactgctgaattagaggcggctatgcatgctggcgatatcgatatcgccgttcatagtttaaaggatatgcctacagaattgccagatagccttacattaggtgctatttccaaacgagaagttccttttgatgctttggtcagtcctaagtataaaacattggaccaattaccagaaggggcacgcattggtaccagtagtttacgtcgtcaagcacaactattgcatcgtcgtccagatttacgcatcgaagtgattcgcggcaatgtgcaaacccgtcttggcaagattgaaacggaaggcctcgatggcgtcgtattagcacaagcaggccttaaacggctcggtttagacgatagaatcacacaagtctttacggcggatgaaatgattcctgctgtggggcaaggtgcattagccattgaatgtcgcagtgacgatgctgagatgttagacatgctttcaaaaatcgacgacgaaccaacacgccttgccgtagaaggggaacgtagtttcttgaatcaactcaatgggggttgccaagtgccgatgggcgtatatggaaccgttgaaaaagggcagctcatattgaaagcactcattgcatccttagatggtaaaactgtatatgaaggggaattgtctggacctgctaagaaaggggttatgttaggcaaaaaccttgcgaaagccttatatgaagaagggggcaaacacattgtggaagcccttgttaaggagggaatcataaaatgacaggtttagtatatttgatcggcgcaggccctggagattctaaattaatcaccgtaaaaggtaaggaatgcatcgaacgtgcagacgttatcgtatatgattatttagcagatgctcatctattagaatgggctagacctgatgcagaattgatttatgcagggaaacaatgcaaagaccacaccatgcaccaatgggaaatcaacgaactattggtaaaaaagggaaaagaaggcaaaatcgtagcccgcttaaagggtggtgatccactcgtatttggtcgcggtggggaagaagcaatggcccttcgtgaggccggggttccttttgaatttgtacctggtgttacatcgcctatcgctgcgcctgcctatgctggtattcctgtaacacaacgcgctatggctacatcctttgcggttattactggtcatgaagacccaacaaaagcagtgtctggcattcattgggaaggtcttgctacagcagtggatacactttgctttgtcatgggcgtaggcaatttacctaccatcgcagaaaaattgatggctcatggccgtcctgctaatacgccagtggcgctcgttcgctggggtactaaacctgttcaagaggtgcttgtttccacactagaacatgttgtagaagacgtggaaaaggcacaactaaaagcaccagccatcatcgtcgtaggcgatgttgtaaacttgcgtgaacaattgcaatggttcgataacaagccattattcggcaaaacgattgtggttactcgtgctcgctctcaagctagcaaattccgcgatatgctcatgaaccaaggcgccaatgttatccaagcagcagctattaaaacagagcctgtagaattatttgatgaagataaacgtttattacatggcgtagatcgctattcttgtgtcgtattcacatccgctgaaggggtacgctacttctttgatgcattgtacggagaaggcaaggatgcacgttccttaggttatgctaaggtatgtgctatcggcagtgccacagctaaggcgttgactaactatggcattacgccggatattatccctgtagattataaggctgaatccgttgtagatgcattgaaacagcatgttaaacctagacatacagtgctattaattcaacctaagaaggctcgtgaagtgattcctcgtgaattacgtcacttagatatcgacgtagatatcttgcgcttgtatgaaacgcaacaagatacatctcaacaagaggcattagtagatgcattgcaacatggtcatgttgactatattacatttactagctcctctacagttaccaatacgttagatttattgggtgaggatgcactttcactattagaacatacaaaaattgcgtgcatcggacctattacggccgctactgctatgagtgcaggtttaaaggtagatatcattagtcctgtatatacgacagaaggccttgtagacacaatcgtgaaagactgcgctaactaatatactgtcattattaaacggaagaaggaaatttactatgtacgatttaacctatcgtcctcgccgtttgcgcacttctccagaaatgcgtgatttagtacgagaaacaacattagatacaactgatttaatttatccattattcatcgttcctggtgaaggcataaaaaaagaaatcgacacattgccaggacaataccatttatctgtagatgaagcggtaaaggtggcgcaagaggcttatgacctcggcattcgtggtgtagaaatctttggcattcctacctataaggatgaacaaggttcttccgcatgggatatggaacaaccggtacaacaagcgattaaagccatccgtgaaacggtgccaaatctcttggtcattgcagacgtatgcttatgccaatatacatctactggtcactgcggcatgattgatcatcacgaaattttaaatgatgaaacattgcctctattgtgcaaggttgcggttagccaagcgcaagctggtgcccacatggtggcgccatcagatatgatggatggccgtgtaggtgctattcgcgaagctcttgatgaagcgggtttcaccaatgtatccatcatgagttatgctgccaaatatgcatctgcctactatggtccattccgtggcgccgttaattcagctccacaatttggggaccgtaaatcctaccaaatggatccggctaatcgcttagaagcaatgcgtgaaattgaactcgatatcgctgaaggtacggatattatcatgattaaaccggcattatgctatttagatatcgttcgcgaagcccgtgatcgttatgaattgccattggctgtctacaatgtatctggcgaatatgcaatggttaaaactgcggcagctgctggtcttatcgatgaacaacgcctcgtaatggaaacgatgttatccatgaaacgggctggtgctaagattatcattacataccatgcccttgatgtggcacgttggcttaaacaataaggagtgactatgttacaactaggtaaatcagaaaaagcgtttgacgaagcaaagcgatatatgccgggtggcgttaatagtcctgttcgctcctatcgcagcgtaggctcaaatcctccatttattagctccgctagtggcagccgtatctatgacatcgataacaatgaatacatagactatgtgttgagttggggccctatgattttgggccatgcgaaccctgaggtcgtagcaagcttgcaagaggctattcctcgtggtacaagctatggtgcgcctacattgttagaaacggaattggctaagaaaatccaagccttcatgccatctatggaaatggtccgtctcgttaactctggtacagaggcgaccatgagcgcattacgcgtagctcgtgggtatacgggccgcgatcgtatcgttaaatttgttggctgttaccatggccatagtgattccctattggtgaaagccggctctggtctcgctacatttggcgtaccagatagcccaggcgtaccaaagggcgttgcagaaaataccatcacattgccatacaatgacattgatgcggttaaacaattatttgatgaaatgggcgatactattgcttgtattatcgtagaacctgttgcaggtaatatgggctgtgtgcctccagtagaaggattccttgaaaccttgcgcgatgtaacaaaggcgcatggtgccctattaatctttgacgaagttatgtgtggattccgcgctagcagcggtggtgcacaaaaactatacaatattaaacccgatttgacttgccttggtaaaatcgttggcggtggtatgcctctcgctgtatttggcggttctagcaaaattatgagcgaagtagcaccatccggccctatttaccaagccggtactttgagtggtaatcctgtggctgtaacggcgggccttgctacattatctatgttgcaacgagacccaaccatctttaaacaagtggaagatagcacaaaagcattgtgtaatggtcttgaagaattggctaagaaatacaatgtgccagccgtagtacaacgtgtgggctccatgtttaccttattctttacagataaaccagttcacaactttgatgacgctagcgcatgcaatgcagacaatttcaagacattcttccatcataacttgagccacggtatttactatgcgccaagtccatttgaaagtaattttgtgtctatgtgccataagggtgcagaaatcgataaaacactggctgtcgcagaggaagctttcaaaatgatcagtgagacactgtaatattcttttgacgtaatcgatgtaggtgatgaacatgcaattttacaagaacttaaaacgggctcgcgtacgcatgggaaagagccaaatcgaagtcgccaaggctgtaggtattagtaatgcggcattgtccaattacgagactggctatagagaaccagatctcgatacactgtgcgcgttggctcgttactatgagctgaccttagatgaactcgtgaatgttaataatgaacagcaagaacgcatttatgatattagcaccgttgtgaaggatacacatattaagttcaaaggggacttgtatgaattaaaagcatcgcaaaagaaggttctcttgcgagaattagacacagtgtttgaaaagtttcaacgatctcgtataacatcaatcaaagaaggtacctcacatcgccatccccatatcaatcggggagggctgttgggggcaaaccttgcggtgagtcgcgggaaaaaataaaagtcgcctagatggtcgtttatagatttgctatgaacgtcatctaggctcttttttgtgaaagtcatcctttgtttgttgtttattttttgtgctgataattagcataaaatttaacttcgtggtataatacttgtgaggaggtgttaatatgttaatggaagtgagattaaataatgtattagcatttaataaacctgttgtgttttctgcgaatgcagatatgcgtactaaaaagtttatatcaaatgtacatcaagaaaatggaaataatattgtaaaaagcactgctatatatggacctaataatacggggaagacttgtttaattaaaggtatagccagtattattgataatatattaaataatgagccccatttattacctaatttatttacacataatcctatttgtaaattaggtattggttttttatatgattagaaaaagtatgattatactataacgtatgatactcaatcagaagaaatcatatatgaacatttcgtacacaaattttatgatgaatatggtaatgagaagtcagatacattaattttaaaggatataaaaaaacaggaatttaaatgtatcgatcctaatgtagaacctttgatggaagtggttgcaaataaagccttattgtgtcatgctatcgatacatctaagtttagtaaattggcagagattaaacaaattattactgaatttgctcgttcaatagatattattaatatgaataatattccaattgatcaaactatcaaattattaaagaatgaaaataatattcagaaaaaggttgttaattttattaaacaagctgatgtatatttagatgattttaaatatgctgaagcagatatggatataaaattaaaaaagaatggtaaagcgattgcagacgaacgcgccttagcattgccagaacaattgttagatcaattaaagttaatttccgtgtataaaggccatccagtaccaagtatggtatttgattctacgggaacgaaaaaaattgctgctttagctagttatattattgaagctttagaaaaaggaagaactttaattgttgatgaattggatagtagtttacacttttctttaacacgtgctatcgtagctctttttaataatgagttaaatgatatggcgcagcttatatttacagttcatgatgtaactttgttggattgcaaaaggctatttagaaaagaacaaatctggtttgttcataaggatgaagaacaagtatatctatattcattggctgattttacaacggctaacactggtattcgagatagtaccaatcttcttgataaatataaaaaaggtgtactaggtgccctgcctgatccatcattttttgattccttgttagaaattaaatcgaaatactaggaggtttatatggttccattattaccgcctctgaaagataataagaagatttatattatatgtgaagggtcagaagagtatgattatcttaatcaactaaaactgttgaatgtgtggtcggatgtatatgatataacgcttagagatgcaaaaggtaatgggaatttatatcctatataccaaaacgtatatcaaaaaggaaattatgatttagttgttattgtttgtgatacagaaaagaaaccacatgaacaatttaatgatatttgttgtaaagtgaactcgctccatgcgtgtgaattggcaagccaacatgtggtaatgtttacaaacccatgtactatgcaagtcattttattgcattgggatacttctgttagattgcagacaccatcaaagcggcgtagtgcttcttatattgaaaaatatacaggtatccaagattactcagctaaagaatctcagcgaacacaattggtttctaatattacaaaagagagttatagaactatgatgaatggtgcaaagcaattgggaatggatgcagcattaattaatagtactaatttacatgtgttttttgcacaattggagcaatctgacacaaattggattgatgagattaataagttaatagagtcctagataacgaaaatttaggaaataatgtaaagatgctaatgattatcgttagcatctttttatgcattaatgtatcttttgcaagaaagttaaagtcgctaacataacagagttatgcctgtatttttcagcctattcctgtttttgcaattctttcctcctgcggtatagtacaactgtgcccgggcaggaaaggatttacaatgacattctattctgcacaagattttgaacaatactacgtaacaaatgtaacgcaatttgaacagattcgcgatgaagcattggtagaggtatgccaaacgagagtacctatctgtgatgtgcccagtgaacctatagatagcacggcggctaagatggaattgtgtcggcggtatcgcccactcatcgtaaaatacgagcgattattagtgaatcgcaccgttgaggatgatgtcgaggctatgctatggctcacctttattgaatcgatttacacctacaatctaaccggtactgtaccctttgcaggatatgtgaaatcggccattcattttaaacatctcaatcactataaacggattaaacaacagtggaatcatgaattccatattcccgatacagcggatggggatgaacaattagcgatggatcaaataccagatactatagatgtggccaatcagactgtacatcacgcggaacaggtacaacaacatcaattattgcgaagggcgatacgtttattaaaggtggatcaacaacagttgattaccgatatttatggacgtggttgtaatttgtcggatgttgcaagacagcaaaattgttcacgtcaatcggtacaacaacgacataaacgcatcttggatatattacgtgaatacatatatagatatgtaatataatattcaaattagagatagagttaggagatgataatacataatcaaatgatatagatagtatacgtggctgcatatagttgcatgcttcatatattaaaaaatatgataaatctatgggtatatattttaaaattacatatttacaggtaaaagcacataggtatacaatgaatgcgaaatgaatgcgcgttcatgtatagagtgggaatattccttatatagtttgttcgtattatttaagaggagactattgtatggaaacagtgtatgatgagcatacgaatgtgtcaccctatgtagtagacgacgagagagaatatgtactacaagattgtatggtccgccatctatggtgtatgattccagactataaatctggtggtaatgtaaccaaatgttactacgcggatggcacagatgaattagtacatcgtccgatgttacgcctgttttatgatctagcaaaatatttagccgtcgatttacgggctttgcataatacgatggggcaacgagcatcgtataatcagcctcgtaccttggccgtgaatatgacttggataccctttaaaacgaggaaacctgtaggcaaggatggagcttatggatactttaatattgtggtaccctttacctatatggtatccgatgggcctacagatcagcaatgctatattcatggtggtcacacggaaccgattttgttactacatccaccgacctatgtgcggagaaaactagatgcagccatgatggaacaccggcgctacgtgaggcgtatactagagtatatgcggatgtgtggtaatccagatgtactagcagaactctatattgcttgtcattttcatgataactaaataatggtatgacctatatcgtcatagatgatagacgtgtttctatctctatggcgatatttttttgtgaaagtttaaattgtagattgagaatagttataagtaaccaataaattcctgtagaatatagaaattaatgaaatattaaaatataagataaacttatcatatgttatctaaatattaaactaacctgcaaacttatgtaaataatgaagaaaagatgaataaaaatgttgacggggggggggcatttggtagcattatgtctatagagtgtgtacatccaatatagggacaaaaggagtgtatagatatgggtctgaatcatatatacaaagttatatggtcaaaaaccaaaaacgcttgggttgtggtgtcggaaattgcaaaacgagacggcaaatctagcgttaaatctgtagttacttcactggctggtaaaagtgtggcagctgtgatggtggctatggttatgtgcgggggagtggcatcggccgctactggtactcaatatggtactggagctacggccgcttataatacctccgttgcagtaggtgaaaatgcacaagcaacaaattctggagttaccttagtcggtgctaactcacaaatacaaggacaatattcaactgttgtaggtattaataataaggattatgggacgtcaactaataataataaaattcttggatcagtcaataacgtaaaaggtcaacataacatcattgttggtaatggaactaccatttcttcacaaggtaatgcctcatcaatcagtagtgatgcggagggaaattataatgttgcgttaggtgattttcaaagtattggtggagataaaaatatttccatactttccgatggctatagactaagaggtaaacaaaatatttcaattgggtatggtagtcatgtgggtgatagtagaaatgctgaattcgctttagcgattggtgctgctagtgctcaaggtaataataccgttgcaattggtcgttctgcacttgctgaaaatgtacataatagtgacacatctattgcgataggtacattagctcaagctagtgattctattgctattggatcaaatagctctggtccggttagtagtactcgtgcttatttaaatgctcaaggaagttccgtaaatataggctttcgtaatgcccaagctacaaataaatccgttattctaggttcgaataataattatggttttggtggaggcacacctgtaagtactgatggaggcgtggctattggtcatgataataatatctcaggtgctaaaaatgaggtgattattggtagtggaaataatactaatggtgaatcacaaatagcgattggtactaatattcagtcaaatacccatttaagtggcgtaaaaggtgcggtagccattggttataattcagaatttgcaacccttaataaaccaagtggtactttaagcattaatggggtaaatttagatgcttccaattatgctggcaactcttcgtcactaacctatgggaatactttttctattggtaaacttaataatgaacgccaacttaaaaatgtagccgctggtgagatttccgcaacttctacagatgccatcaacggtagtcagttatacgaagctgttagagcggtatcagctggtgctagtcctgatgtgtatatgcacgttaatgatgggacatctacacaaggtgctggtggaggtaataatttaggtaaagcaaacgaaaaaagtggtgctttaggaaattattccattgctgtaggtaaaaatgcacaatctcaaggaataaattctatttctattggttaccaaagtggcaccactaatgatcagtctattgctataggtggcaatgctcatgtcaatagtagtcattcaattgctattggtgataatgctaatgctagtggtacttatagtattgctatgggggcaagctctgtaaatggtgataaaaatttagcgttaaacaattcatatgtttatagtggaagtgattcagtagctataaatggaagtctagttgcgggtaataataatattgctattggcggtgcctatataggtgcaggacgaacatacactcgtgatgcttctgggaatcctacatcaaatattgggaatatgcaaaccgcagcaccaaccttagggatatcttctatgcaaggagagcagtatctagaacctgtaaaaaatagtattgctattggtaacaatgcatacgtaactcgtagcaatacgattgttatgggtgacaagacttttgacaatattaagtctagtaaaactgcaactgattttatagcaccgactaaaagtaaattttctagtattttttcgggtgatataaatttatatcatgaagggactttaggaaattcagtatatcttggacatgattcttatgcctttactcctgatgctttgactgatggtgaaaattcctctagtggtgagaatagtattcatactaaaaaatacgatgcaaccggcaacatcgttgtaagcaacaacacaacaggcggtgcgttcggtaaggtaagcaaagccactatcaatggtgatgaaatcactggctttgcgggtgctcaatccgttggtgccgtaacaatcggtgctggcgattatgaacgtcgtatccaaaacgtcgctgctggtgaagtatctgctacatccacagatgctattaatggttctcaattatacgctgtagctaatacattctccaaaaatatgtctagttatatgcatgtcaatgatggtacaagcacacaaacagtaggtaatgcgactacaaactatgggtactctggttctaaggcaggtgcaaccggaacaaattccattgcaggtggtgttaatgcacaggctactggtgaaaagtcaatagctataggtcactcttcagtagctaatagttacaaagcaacaatttttgggagtggtaatagtattgaccatgactcagctaattcagttatattaggaacagacagtagtatagttggttctttgtccaagccaagtactagtagtgtgttgattggtgtaacaagtcatattacgaatagtcagactgcaataggtatcggtggcagtgttaatatatcggaatctgctaatgcgattggagttggtcttggtgcacagagtagtaatagtgttggaagtgttgtgattgggaaggtagctaaagctacaaatgctaatgctggtattactataggtagtaatagtgaggtggctggttttgctggaattagtataggctttaatgcgaaagctttaggtgcacaggctatctctatcggtacaggcaatgaagtaaaaggtaataaatctagtgctatcggtgatccatcatacatcgataccacagcaactggtacacatgtacaaggtaacgataacggtactgccacaaaccctattaaagcctctgaatctacgttcatgggtaatacaaaccttgccggcacagctggtacaacaggcatccatgtagtaggtaatagtaactccgtagattcctctaatgttatggttatgggcaataacgtaacagtaggtacaggtcttgatggtgccgtagttcttggtcaggcaagttctgctgatcaatatgcagctgctaccgattctactattaatggcgttaccttcgaagctgctggctatgctggtaacacaggccttaacaatggttctattgtatctgttggtgccactggtacagaacgtcaaattaagaacgttgcagctggtgctgttacagctacttctacagatgcaatcaatggttctcaattgtacaaaacagctgaaaccattctaaaaatgccaattaacatggctggtgactcaggtgataccgttggcttgaaacttggtaaaacggtaaatattaaaggctccgttgcttctggtgccgatgtaaccgatggtaacatcgctgttgtaggggataaggccactagcacattgagccttaagatggctaaaaaccttactggcttaacaagtggtactttcacagatgctactggtaaccaaaccgttatcaacggtgctggtgtaacagttacaccgactggtacaggtgctacaccaatttctattaccactagcggcattaacgcgggtaatcaagaaatcaaaggcgttaagaagggcacaaccgacgatgcagccgttaacaagaaacaaatggacgatgcattggctggtatttcctccacattgaccatcaatgatggcgcaactgatggttccgttaatattaaaactggtaaacttaaggttgttggtgacagcggtgccaatgctcttgttacaactactgtatctggcgatactattaccgttggtacaagcactaaattacaaaacgctgtaaccgctgcagaaaaatctgccgacaaagatttgtctaatttgtctacaactggttctgataaagttaaaacacttgcccaagatgctgtgaaagtagctggtacaggccttgccactgttagcgatgctacagctgctggtgttaaaacatacaccgttaatgtagatgaaggtaagcttgttatcgatgatacaacaggtaaaattggtgctgctggtgcttcacaaggtacggtgcaaggtaaagatggcgtagccactacgcaaaatgtagcatctgttgtaaattctgccattgataagacaacaaaagctttgaccgatgcaaaacataattttgctggtgatgatgcgaccgtaattagccgtaaacatggtgaacaacttaacatcaagggtggtgcgtctactacggcaaccgatcttacatccggtaatatcgcagtcgtaggtgacacaacatctggcacattaaacatcaagatggcaaaagccttaacagggttaacatctgctacatacacagatggtgccggtaatacacaaaccgtaacaggtggctcctctactatttctgatgcagcaggtaattctaccgttgtatctaaaggtggcgtaacaaccactgatggtacgaatacaacaactgttgctccatctggtgtgactgctacagatggtactaacacagttaaattgactggttccggtatcgatgctggcaatacacaaatcaagaacgttggtaaagcaacgactgatgatgctgctgttaacaagaaacaaatggatgatgcattgaaaggtgcaacagataatactgtttcgttaggtagtgaatctggcacaactactgctaagaaattaagcacaactggtggtattaaattcaacattaaaggtgaaactggtgcgaatgcattgatttcaacatctgccacaggcgatgatgtaaccattgctccaactgctaaattgacagctgctgtaacggctgcagaaaaatctgctgataaagacttgtccaacttgtcgactgctggcgatacctatatcaagaaccttgctaaatctgctgcttcttggaatgtagaaaccaatggtgctggtacaaccgctgtagcgggtggtgacactgttaacttcatcgatggcgataacatcgctattaccaatacaggtcgatccattacaattggtacagctaaaaatgtatccttcgataaagtcactgttggtggcgttgttatcgataaaacagatggtatcaatgctggtggtaaggaaattaaaggcgttgctactggcactgctgctgattcggcggttaataaggcacaaatggatgcggctatcactgctgccgctggtggttccttatctactgaaaaggtagtcgctaagacattgactggtgacaataaccttgctactgtaacaggtcaaactggtacagctaagggtgaaacatacgaagtctctgtttctgaaaatgctgttaaagcagtagctgctactgctgcacaagatgctgttaaggtagctggtacaggtcttgctactgtaagcgatgctacagcagctggcattaaaacatacaccgtaaatgtagacgaaggtaagcttgttattgatgacactactggtaaagtaggcgctgctggtgctacacaaggtacggtgcaaggtaaagatggcgttgccactacacaaaatgtggcatctgttgtaaattctgccatcgataagacaaaacaagcgttagatgatgctaaacataactttgctggtgatgatgcgactgtaattagccgtaaacatggcgaacaacttaacatcaagggcggtgcgtccactacggcaactgatcttacatctggtaacatcgcagtcgtaggtgatacaacatctggcacattaaatattaaacttgccaaagtattaactggtttaacctctgcaacctatacagatgcagctggtaatacacaaactgtaacaggtggttcctctacgattgctgatgcagctggcaattctaccgttgtatctaaaggtggcgtaactacgactgatggtacaaatacaactactgttgctcctgctggtgtaactgccacagatggtactaacaccgttaaattgactggttccggtatcgatgctggtaatacacaaattaaaaacgttggcaaagcaaccactgatgatgctgctgtgaataagaaacaaatggatgatgcattaaaaggtgcaacagataatactgtttcgttaggtagtgaatctggctctacaacagctaagaaattaagcacaacgggtggcattaagttcaacattaaaggtgaaacaggtgcgaatgcactcattacaacatctgctacaggcgatgatgtaactattgctccaactgctaaattgacagctgctgtaacggctgccgaaaaatctgctgataaagacttgtccaacatttctcctgctggtgaaacagtgatcaaaaatttggcagctacatctgcacaagatgctgttaaggttactggcacaggtttagctactgtatctgattccactactggtggtgtaaaaacatacaatgtagatgtgaagacaggtaaccttgtagttaatgcggctggtcaagctggtgcaactggcgcaacaggtgcaggcggtgctgctggtgctgatggcgtagccactacacaaaatgtagcatccgctattaacgatgccatcactaaatccaaaactgatacagcacaagctattgctgatgcagaacacaaatttgatggcgatacaggtacaacctctgtacgtaaacacggtgaagtcttatccgttaaaggtggcgtaactgctactactgatttaacaactggtaatatcggtgttgtatctgacggtgcaggtacattgaatattcgtcttgcaaaagtattgagtggtttaacatctgctacttacacagatgctgctggtaatacgcaaactgtaactggtggttcctccacaattacagatggtgctggtaacacaacgactattactaaaggtggcatgacaaccactgatggtacgaatacaacaacagtagcccctgctggtgtaactgctacagatggtactaacaccgttaaattgactggttctggcattgatgctggtaatacacaaattaagaatgttggcaaagcaaccactgatgatgctgctgttaataagaaacaaatggatgatgctgtgaaggcagctaccgattccatcagcacactaggagataacaaagtatccttaggtagtgattctggtacaacaacagctaagaaattaagcacaactggtggtattaagttcaacattaaaggtgatactggtgcaaatgcattgatttcgacatctgccacaggcgatgatgtaaccattgctccaactgctaagttgacagctgctgtaacggctgccgaaaaatctgctgataaagacttgtccaacttgtctactgctggcgatacctacatcaagaaccttgctaaaacagctgcttcttggaatgtagaaaccaatggtgctggtacaactgctgtagctggtggcgaaacagtcaacttcatcaatggcgataacattgctattaccaatacaggtcgatccattactattggcactgctaagaacgtatccttcgataaagtcactgttggtggtattgttctcgataagaatactggcattaatgcaggtggtaaggaaattaaaggcgttgctaatgctacatccgccgatgctgctgttaacaaaggccaattagatgccgctgtattatcggctgctggtggtgctctatccattgaaaaggtagaggctggttctgtagctaatggtaaattagccgctggcgataataacttggctagtgtatccggtcttactggtactgctaaaaatgaaacatatacagtaactgtttctgaaaatgctgttaaagccgtagcacaaacagcagcacaagatgctgtaaaagtggctggtacaggccttgctactgttagtgatgctacagctgctggcgttaaaacatatacagtgaatgtagacgaaggcaaacttgttatcgacgatactactggtaaaattggtgcgaatggtgctacacaaggtactacacaaggtaaaaacggcgtagccactacgcaagatgtagcatctgtagtaaatagtgctatcgataagacaaaacaagccttgactgatgcaaaacatgattttgctggtgatgatgcaacagtaattagccgtaaacatggcgaacaacttaacatcaagggcggtgcgtccactacggcaactgatcttacatctggtaatatcgctgtagtaggtgatacaacaactggtacattgaacattaagttggcgaaagccttaaccggtttaacatctgctacgtatacagatgcagctggtaatacacaaactgtaactggtggttcctctacaattacggatggtgctggtaacacaacgactatcactaaaggtggcatgacaaccactgatggtacaaatacaactactgttgctcctgctggtgtaactgctacagatggtactaacactgttaaattgactggttctggtatcgatgctggcaatacacaaatcaagaacgttggcaaagcaactactgatgatgctgctgttaacaagaaacaaatggatgatgctgtgaaggcagctactgattccatcagcacattaggagataacaaagtatccttaggtagtgattctggcacaacaacagctaaaaaattaagcacaactggtggtattaaattcaacattaaaggtgatactggtgcaaacgcgttgattacaacatctgccacaggcgatgatgtaaccattgctccaacagctaagttgacagctgctgtaacggctgcagaaaaatctgctgataaagacttgtccaacatttctcctgctggtgaaacagtgatcaaaaacttggcagctacatctgcacaagatgctgttaaggtcactggcacaggtttagctacggtatctgattccactactggtggtgtaaaaacatacaatgtagatgtgaagactggcaatcttgtagtcaatgcggctggtcaagctggtgcagctggtacaacaggtgcaggcggtgccgctggtgctgatggcgtagccactacacaaaatgtagcatccgctattaacgatgccatcactaaatccaaaactgatacagcacaagctattgctgatgcagaacacaaatttgatggtgatacaggtacaacctctgtacgtaaacacggtgaagtcttatccgttaaaggtggcgtaacggctactactgatttgacaaccggtaatatcggtgtcgtatccgatggtgcaggtacattgaacatccgtcttgcgaaagtattgagtggtttaacatctgcatccttcactaatgctggaggtgattccactgttattaatggtaatggcgtaaccattacacctagtgcaactggtgcatctccaatttccatgacaacagctggtatcaatgctggtaataaggaaattaaaggcgttgctaatgctacatccgctgatgctgctgttaataagggccaaatggatgctgccatcaccgcagctgctggtggttccttatctactgaaaaagtagtagctaagacattgactggtgacaataaccttgttactgtaacaggtcaaactggtacagctaaaggtgaaacatacgaagtcgctgtttctgaaaacgctgttaaagcggtagcacaaaccgcagcacaagatgctgttaaggtgacaggcacaggtcttgctaatgtaactgattccactactggtggtgtaaaaacatacaatgtagatgtgaagactggtaaccttgtggtaactgcggctggccaagttggtgcagctggcacaacaggtgcaggcggtgcctctggtgctgatggcgtagccactacacaaaatgtagcatccgctattaacgatgccatcactaaatccaatgctaatacagcacaagctattgctgatgcagaacacaaattcgatggcgatacaggtacgacctctgtacgtaaacacggtgaagtcttatccgttaaaggtggcgtaacagctactactgatttaacaaccggtaatatcggtgtcgtatccgatggtgcaggtacattgaacatccgtcttgctaaagtattgagcggtttaacatctgctacctacacagatgctgctggtaatacacaaactgtaactggtggttcctctaccattacggatggtgctggtaatacaacgactatcactaaaggtggcatgacaacaactgatggtacaaatacaactactgttgctcctgctggtgtaactgctacagatggtactaacacagttaagttaaatggttccggtatcgatgctggtaatacccaaatcaagaacgttggtaaagcaacgactgatgatgctgcggttaacaagaaacaaatggatgatgctgtgaaggcagctactgattccatcagcacattaggggataacaaagtatccttaggtagtgattccggtacaacaacagctaagaaattaagcacaactggtggtatcaagttcaacatcaaaggtgatactggtgcgaacgcgttgattacaacatctgctacaggtgatgatgtaacgattgctccaacagctaagttgagtgctgctgtaacagctgctgaaaactctgctaataaagacttgtccaacttgtctgctgctggcgatacctacatcaagaaccttgctaaaacagctgcttcttggaatgtagaaaccaatggtgcaggtacaactgctgtagctggtggtgatactgttaacttcattaatggcgataacattgctattacaaatacaggtcgatccattaccattggcacagctaaaaatgtatccttcgataaagtcactgttggtggtgttgttatcgataagaataatggtattgatgcaggtggcaaagaaattacaaatgtaggccctgctacatctggtaactctgctgttaataaaacacaaatggatacagctattgctaatgcacaaacagctgcaacctctactgaaaaagtagttgctaagaccttgactggtgatactaaccttgttactgtgacaggtcaaactggtacagctaagggtgaaacatacgaagtggctgtttctgaaaatgctgttaaagcggtagcacaaactgcagcacaagatgctgttaaggtgacaggcacgggtcttgctaatgtaactgattccactactggtggtgtaaaaacatacaatgtagatgtgaagactggtaaccttgtagtcaatgcggctggtcaagctggtgcagctggtacaacaggtgcaggcggtgccgctggtgctgatggcgtagccactacacaaaatgtagcaactgctattaacgatgccatcactaaatccaaaactgatacagcacaagctattgctgatgcagaacataaatttgatggcgatacaggtacaacctctgtacgtaaacacggtgaagttttatccatcaaaggtggcgtaactgctactactgatttgacaaccggtaatatcggtgtcgtatccgatggtgcaggtacattgaatatccgtcttgctaaaacattgactggtttaacatctgctgccttcactgatggtacacacacagtgactatcgcaggatctggcattgacgctggtaatacagaaatcaaacacgttggtaaagcaactacagatgatgctgctgtaaataagaaacaaatggatgatgctgtgaaggccgctactgattctgtcagcacattaggggataacaaagtatccttaggtagtgattccggtacaacaacagctaagaaattaagcacaactggtggtattaaattcaacatcaaaggtgatactggtgcgaacgcactcattactacatctgccacaggtgatgatgtaaccattgctccaactgctaagttgagtgctgctgtaacggctgctgaaaactccgctaataaagacttgtccaacttgtctactgctggtaatacatatatccaaaatcttgcaaaatctgcagcgtcttggaatgtagaaaccaatggcgctggtacaactgctgtagctggtggcgacactgttaacttcatcaatggcgataacatcgctattaccaatacaggtcgttccattacaattggtaccgctaaaaatgtatccttcgataaagtcactgttggtggcgtagttatcgataagaataatggtatcgatgcaggtggtaaggaaattacaaatgtaggtcctgctacatctggtaattctgctgttaacaagacacaaatggatacagcgattactaatgctgttaacaaagcaacaactgatgctaaacatgatttcggtggtgatgatgcaactgttgttacacgtaaacatggtgaaaaacttaacatcaagggcggtgcttctacaacagcagctgatcttacatctggtaacatcgcagttcttggtgatgctacaacaggcacattgaacattcgcatggccaaagcattaactggcttaagcagtgctactttcacaacacctagtggcacaactgttgtcaatggtggcggtatgacaattacgccaagtacaactggtgcggcacctatttccatcacaactggtggtatcaacgctggtaatacagaaattaaaaatgtggctgctggtacaacgcctaattccgctgttaataaacaacaaatggatagtgcgatttctaatgctacggctaacgtaggtttcagtacagctggtaatacaggtactggtagtgtaagcaatggtcaaacattgagcatcactggtacaaatggtattgaaacgaatgcaagtggtcaaagtattacagtaggccttgatgctgcaacacgtgcgcaaatcaataatgctacaacaactgctaataatgcagctaagaaggatttgagcaatattgataatgctggtaagcaagttattaaggatacagctgcttggaatgtgaaagttaatagcggcacacctgaaattgtaaaaggtggcgatacagttactttcaacgatggcgataatatcaaggttacaaatactggtaaagatattactattgctactaagaaagatgtttctttcgataaagttactgttggtaatgtagtaattgataagaatactaaccgtatcagtggtttggctaatgcagctaataatgatgaagctgtaaacttgggtcaaatgaatgccgctattagtactgcaactgcaggcacaggtaatattaaatacaaggctaatggtggtactcaaaattctgtagcattgactactggttttgatttcaaaggtgatagcaacattcaaatcacagctgatcctgccaactctggtgttattaattacaaattgaatcctgcattgacaggtattacctctattagtggtggtactggtggtcctactattacgcttaatgctggtagtggttctacacctggtaatgtatccattaatagtaatctagatatgggtggtaaacaaatcaataatattggtgctgctactcatgctggtgatgcagttaataaagcacaaatggaccaagcattgcaaaatattgctggtgcatccagtaatgctgctaagtcttatgcgtataaggctggtgcaggtgctgccgcattggctgcattgaaaccaattcaatacgatccattggaaccaacacaaattatggctggtattggtaattacaaatctcaaacagccgtagctcttggtgtggctcattacactaatgaaaatactatgtttaacttaggtgtttccttagatagccacgatggtatcgtaaatgctggtgtaacccacaaatttggatatagccctgaaaagaaagctattccagataaatataaaggtggtcctatcagttctatctacgtaatgcaagatgaagtgacagcattacaagcaattgttcaaaaacaagctgctgaaaatgaagcacttcgtcaacaaaacgaggatatgcaacgcaaggtagatatgattctatctaagattcattaattccaataattttaaacattccctcttgtatacagaagattagttagaattaatgaatatagggctatttggtggttagccattgtactatcaaggtggctgactactccctagtgggaaaacaaacggattctatcttacttttcttatacacactctcttatagatagaattcgtttgttattgatagtgtttagttataacagtacataataaatagtaaatgttattgttgtctgaaacgtaaagaatttgaggcgtaacatatgaaatctgtatttaaaaagagtcgtttatttataatgttagcatctttgttaggggtggtgagtccaatggctcaagcagctgatttagttcctgttcagccaacagtcgctgttgttgatgaacaacatcaggcgattagctgggcaaatctaatgctcaatggttttttacaacatcatgaaggcgcatctattaatgaaatttcttttgatgctaccgatacagtcgttacattgactgttggcggttttgataaagacggtgtatataaggcggtatttacaaatacagccaatgaagttaaggaggaaaaggttggtaaacttaccaaaactgtagaaaaaacagcctttgatccatctactattttgcctcctgctgtagctgtaaactttgcttatgcacaagctgaaggtaaggcaacaagccttttaagctgggctgttaaaaccgataaaggcacgccacaatatactgttgtgtttgccacaaaagataagaaaaccattactgtagtattcgatgcagtgagcggaaaattgttaagtgtaactaaataacttaaacgcaaataataatatttgtattaatacatataatgtatatatatatatatatatatacatagtgtttaggtacagcgttacaaaatagaatattatgcacgaaacctcgcttttcttgaagagaaaggcgaggtttttgtggatattaaatttgattggtatttgcttaatttttattttgtgtattaatagtaaaaaacctatattttaattaaatataaaataatatataaaactcattggaaaaagtattgaaattaatatataatttaattatagagaaaggagagggatttatgagagttgtacgtattgcggcaagctgtattggcttgctgaccacatttggtacattgactagcatggcagccgatgtatctaccccttttatacaacaagaagcggccagagccgatgcttcgttgcgtcaacgcgcagaagcaccaatgactggggccgcttcgttgcgttcagaatcagcctatgttggtcttagtagtgctcctatgaaggcattaccaaaggaagcgattgcatttcctatagaccacattgttatcacatcgtcagaacctgtatttagtaaatataagaaccgtttagaggcgtatgagcataatcgaatcgggtcggatggagttacattccttcaaaagcaattacaagaacaattattagcagatggatatgtcacaagccaagtggttgtacccaatcaagatttacattcagggtcattaacttttgagattttaccagggtatgttgaagatattgttcttgcaaatccaaatgtacggacgaattggcggagtgcattccctgtacgacctggctatgtattacgacgtcaagcgttagaacaaggaattgatcagatgcgtagcgtacctggtcaagatataaagatgacgattgaaccaggtaccaagccgttacattctattgttaagcttacggtagaacaaaaaggatttgtgcatggctcatttatcttagataattcaggatataaagctacaggagagtatcaaggtactgtatttttatcgtttagtcaattgctgggtcttaatgatacattaacagctaatttcactaaagatataagtcgtcatgatgatggccatgggtcaaagcaatatgcagttaattatacgattcctgatggcaatcgtacgtatagattatctacatataagtatagctataatcaattggtatttatgccaaacgcatttcgctcggctggtaccacacaaggtacagaggtatcagtagagcaggttctaaatagaactagtcgttcgaaaacatcagttattgctaaggttaatcataagtctcgtcataattatctggatgatgtagaaattggtgttcaagaacaacataccacatcggtagaattagggttatctcatcgccaatatagaggcaatacagtaagtgatatgtatgtattttatcgtcaaggtattaaaggattgggtgctaaggtacgaagttgggaaggcttggcagataatcctactacactatacaaaatggctggtgttgaagggcagattcaaacgggagtacgaatcggtcataagcaaggtatattctcgatgcgctttagaagtcaatttacgaatcagcgcttatttactacggatcagtttagtattgggggacggtattcagtacgtggatttagtggggaagaaacactacgaggtgattctgggtactatgtacaaagtgaatggtcattaccatttagaaaacaacagattacaccttatataggaatagatattggtcatgtatggggaccatctacagaaactcaactaggtaatacattgattggtggtgtcgttggtgtacgaggcactgttggtgacgctgttaattatgatgtatcactagggacgccaattaagaaaccagaaggctttaatacagatacccgtgtttgggcgtttagaggaagttatcaattttaagtgttgtacatagagagttatatagatacataatacatattgttttatatacttaggagagatacgtaatatgaatattagaaaacatacgaccatggccatttttgctgcattgcttgccacaaattctgccccatggattccaatggcgttagccaatcctgttgtacctgctcaaggtgcattaggaccaaaaacagaagaggctcgtaatggtatgactgtagtcaatatcaatacgcctaatgataaagggctatcccataaccaatatgatgcatttaatgtagatcataaagggcttattttaaataatgccaatcgtcctgtgaatacggagctggcaggttacattatgggaaatccgaatttagtaggacctacagcgaatacgattttaaatgaggtaacaggtacgggtgcaacatctatgaatggtgcccttgaagtagccggcaataaggcacatgttatcattgctaacccaaatgggatttctgttaataatggaacctttatcaatgctaacagtgctaccttaactacagggaatccgattatcaataacggtagtgttacaggctatcaagtacaacaaggtagtatcacagtaggtgaaaaaggacttaatgcatcgaaaacagcacgtacagatatgctagctgaggctgttcagctgaatggtaaagtttgggcgaaagatgctcaagttgtgacggggaagaatactgtttccgtagattcttctggtacagttacgaatgttcacaaaactggtgaatctagtcaagttggccttgatgtagctgctattggtggtatgtatgccaatagtatgtatttagttggcaccaatgatggctttggtgtgaataatcaaggtgtattatctgcacaaaataagttaaccgtagatagtaccggcaaattgcaaaataccggtactatcgctgctacagatgcagatgttactacaaaaagtttcgaacagatgaatcgtggtaaattgtatgtggatactgccaagattaccactgattctgttattcaaaagggtaacacagagactaaagatgcgcctgttatgattgcccaaaaagatttatctatagcaaccaattcgattgtcaatactgatggtagtgtgattaaagccgaaggaaaactacaacttggtaaaacgatggattctacaggaactgtgtctggtaagatagatcgtattgtaaatacagcatctaccattgaatttggtcaaggtggtgcattatatgctaaatctgtagataataaaaatggtgggattacccttaaacgtgtagcggtaggtgaaaaagagcatgtcaaaaacgaagtagcaccatccggtagcattaagcggtatcagttatctgaagaacgaatttatttagatcatgagcaaattccaaaagataaggttgttattcatactcgtgagaatcttcaactttctataaatggtgaatattatgagaattggactaagtatgaatatgatcgtactcgtgaaaaagatgtggtagatacatctaaccctgggcggattatttccggtggagatttacatatggatgtcgatcatatggtgaatgaagctagtcaaattagtgctgccggagatataacaggtacagtaggacactatgagcaaagtaaccctaagggtaatgaatatattactgaagatggtacagcaacatcctatagtcgtcggaggagacgtggacgggatacgactaatatacgaacggctgactataagaatacgatagtcaaccctacagatgtccctgttgccgtatatggtagtcatgttgaacatagtacaagtgatgccacagtagatacatctttattaaatagtatgagccagttagcgacgaaccctaatacatcttatgtgattgaaactgatcctaatttcacaaatcggcgtaatttcttatcgtccgattatgtattatctcgtcttaaattagaccttatgaatgtacaaaaacgattaggtgatggctattatgagcaacaacttgttatgcaagagattatgcgtcaaactggtaaaagtagactgcaatcgggtctttccgcagaggaacaatatcgccaattgatggatgcagggattagtgtaacaaaatctcaatctattgcattaggtagaggcttaacagaggctgagcaaaagaatcttaaagaggatgtagtgctcttagttagtaaggctgttgtattgccaaatggtaaaacagaaactgtactagtaccgactctatatttagccacaactacaaaacgagtagacggtgcagctaatttgcaagctcaatccattaacctttctgttgatactatgaaaaatagtggtagtattgtggcggataaagatgtgaatcttactggtaatactattcacaatgataatggtcttattaaaggtaacactactacggttacagcgaatgacgaagttcgtaatacacaagggactattatgggcaacgatacagtctctgtgtatgctaaaaaagacgtcattaatgaaggcggtaccattacacaaactaatgcagctggtaccacaaaggttagtgctggacgcgatgtaatgaatacaggcgtacagtatgaggcagctaatagcaaagttgagtgggatagtcgaaataatcgacgtgaaacgataaccggtgtagatcaaggtcgtattggtggtgctggtgaaacaacagtagtcgcagggcgagatgtatctatggcagcaggtgttattacctctgatgtaaacactcaagtgacggccggccataatgtaacgatgaaagctatgaatgctacacatgagctagaagaacatcgttttgacaagggcaaatctggtggtgggcattctcaaacgacggagtctcatgatcttgttaacgcacaatcatcggttggtagtagcattgaaggtaaaaatatttctgttgtagcctctgatgcagtacaacttgaaggtagtcaactattagcggcagatacagttaaggcatcgggtaatacggttgaactaaatacagcgaaggcaaatagtacagtcaatcatgtgtatctagataaaaagaaaagctttgtcaaacgtgaaagtaccaatgccgttgatgatgcaactactacagttgtgacaggctctaccgtaagtggcaaagatatacagattacaagtgctcaagatataacaggtcaatctgctcaaattataggcgaacatacagtagatgttacggctggtggtaaggtagaacttggtgcagataaagccattacagatggtactagtgtatatcgtcataagaaatctggtttgcttggtagtacaggaataggctttactataggtaaagaaaaacacaatatagatgaagctaaccatgaagaatctactgtacgaaatacaattgccagcacgaaaggtactgttactgtcaaagcgaacgataccgttcatctcacaagcgctgatattgttgcaaaagatggtgctgtgttagaaggttctgccgttacattagatggcaatatagatcacaaccatatgtctcatgatgaacgctataagaagacggggcttaccgtatcattaggtggtgcagtggttgatacgcttactaatgcaactcgtactataaaacaagctggtggccgtgatgataaacggttagctgcacttgaactcaatgaagcacgtcaacaattgcaagatggctatgctgcagtagataaagcggttaagggcgttaaacttcgtgatactgatggtaaagtattaaaagacgcaaaaaatcattcccgacgtggtcaaaaaaatattgatgatgcgataaatctctcagtaagtattggtagcacttctagaaaacaaggacaagtggtagatacaaatacatatcaaggtggtactcttgttagtgatagtgaagtacaaatcaaggctcgtgatgctcagcaaagtggtattggtttaactggtgaaacagtagaagctaaaaacctagtattagatagtgctagtgatattaaccttgcagcgggtaaaaacactgtagatgttaagaatacttataaaagttctggttggagtgtcggtgctggtattagtttgactggtggcggacttctcgatattaatgcgagtggtaatatggctcgtcaaaatggcgatacccatcaagaaagctatgtaccaacgacgattaaagccgcataattagcacaacttaaagcaaagcgagatactactattattggttctactgtatctgggaagaaagttgaagttgatacaggtcgagatttacatattcagagtttacaagatgtagataattttaaagaacacagtaagtctgcaggcttctctgtatcctctaaacctaatttcaaagatccaaccggtagtattagtgctagtgtaggccgtattgatagcaaatggaaaagcgtgactcatcaggcaggtatttatgctggagaagatggctatgatattcatgtagggaatggtactacattagaaggtgctgttattaaaagtgaagctccaaaagctaagaatacattgactaccaaatctctagatatgaaagatatccaaaatgaagccgagtatacatatagcaacaacgggattggctataactactatggtagtaaaaagaaactcgaagagatgaagaccaatgataaaaaaggctatgataagatttataacagtattggtctagttccaaatttgggtgtaggttctaaaggtaaagcaagctctactactcaatctgctatttctgatggtatactaatagtagatggtaaagaaattgatactaagacgattaatacaaatactgaaaataccttacatcaattagataaaatttttgataaaaagaaaattgaagaacgtcaggagttagcacgtttatttgctaagaatgcttatgagcaattacataactggcaacctaccacaaaagaaggcaagattgctaaagcttttgctcatggtgtgattggcgagtgggctgcacgtatggccggtaatgcacctggtagtggttttaaagctacaatgaccaatgaaatgcttatagaaaagattaagcaaattgcagataatgatccggcattagcacaatggttgagtgctggggccggtggtgtagttaataaagttagtggtggctctttaaatgctggggctgcggtgtcagcttatgctactaaatggaatgcagaattaacaagtccatatcctatagaagttgattcggcgaagttattagcgggacttagatttagtgttgtaggaagtgtgttttataaagctttaacgactcctatagaaacagggcgtgctgagccagttactcttagtgaagctgatactcaggagtttccatgggctagatcaattgatcaactcacaaattcaagtgttgataccagttatggtgaatctagtggtgaaagtattgattctggagaaggaagaaacgcttccgaatcgagatttaatgggccttggagcataactgtaccatatgtaggaactgagtataaagttcaattagattacaatactggaataggatatcagtatattaatgttttccatgcttctgatggtaacacctataaagacagtgggaaatgggatgttatagggcgtagattttttgatggaattagtattccccaaagtacagcatattccggtcgctggattggaccagatggtacggataattgggtaagagataaaaataagtttaatgatttttttattcatattacgagtttaattagtggacaacaagtacaattaccttatacaattggagatgaaagcattatagatgatagttccgattcgtttattaagaatccaagaactggagcctgggaatctataaaaacgggtgcccctgtaagtgaaattgttctaaagcaatttcctttgagaattaaccctttaaataatcatttagatttaccaaatgttagcaatgataattctaatattgggaattctagtagtgatgatgtccctaatataaacgaggataattcatctaataaaaaggatccacataatagtggaccatctatatctggaccagtaattgtggggttagctaatgaagtaaataagaagagaaatattatagctcaaaaagtctcacaattaaagaattctttgccgaaatcaaaaagtgaagttaaggaaaaaggtaatacaggaacgggttcttcagagaatacaattaatgtagatgaatttgaaaaaacctttaaaaatcgtaaatatgaagaaatggatttcaatgattttaagagattaagttttcaatatttaaaaccaaaaggatggtctgtagaagctcataatggtagattacatgtaagggataagaatgatattatgcggttacgggtggatccacctgataagcatacaccttataatcatttacatatacatgataagaatggtaaaccattagatagtaactggaaacctgttggacgtcgtgaccctgaatcacatataagaattaaagaggataaaaatgatggaacttcaaaaaagaattgatatattagatttatgggatgaaatgccatattcattagatattaaagattttggtaatacagtcatattagtgtcagaatcctgtgaaattagatttattacctgtatagaggttaattttaaaagtgacattttatttaagaataaatcaatgaaatttcatgaatatcgtaatcatgaatatgatattcaagatattagtgtcgaaccatgtgttgtaaaaacagatggagagatgactcataataagaaatgggtaagcccagtactaaatggtgttaaagctaaaatagttatgcctgtaatgtgtattgatttgattgctgttgattttataatttccacaaaggcggacgaagagaatctaatacagtctaagtttagttatatagaccttgaataattaaacgtattttattaaatctttaaactgttaatttatatagtctcagggagaatgaaatctttactattttatctttaatggaccttttccgtatgggaatataaaattggagtcagtcaactataatttagttattaacggaaatcgtataatgtttgactatcagagattagttcatactaaatggaggttctataataaatgttggggtgacatcattaacggtgtcactaccaacattatttttttgcaaaaaataagcatacaaggctaacatgctttacaataaaagtgtcaaagtcctaaagaaaggatgtgatcttatatgcctactactggttatactgaatttttacataatgtaaaaaagaatatcttaaattgcaatatgaaattgaacagtatccaaatctacaatcttattaacttcttcaagaaagacctccaaggggggttctataatttagaagcttgcgtgacaaagtattacaccatttaagtgttcgtcgaatagtttcctctgaaacggcttttattggcattcctttcggtatacatctacgaagtaaaccattatgcctttcgttcgatccacgctcccaagcagaataaggtcgagcaaaataaatagacaaggtttcattttctaaattagatatctctgaaaactctaaaccgttatctgcagttattgttttgcatcagcaagctagattaacatctttaaacgtatttaaccatgcctgcagtgtttcttttacatcagtagcacgtgctgagggacaccgtaaagccacatacaatctgcttttacgctcaagtaaagaaattaaaacatggtctgtcttatcttttgttccacggacggtatctaattcccaatgtccgaattcctcgcgcgtttcaatattaggatcgcgaagttctatggatttaccaagttctcgcttatgttttctagaaatagattttcgttgagaatgccgcactaccaatggtaagtcaattgcttttatacctaatatgcctttgtgaagatagttatataaagttttagcacaaaccatttcattacgcataaacaaatccttatgttcagcatatccaacagtagcatcaaaggaccaatgatcatctagaaccttgctttcaatccaatttataaaagattctatagcaccaactttcatggtattagaagagcccacacgttgtctttcatatgttgcttgtccagaatcagctaaatatacaagttgagatttaccttgtcgaatttgaattacagtaccacgttttaattctgtatatatagttgttctagaacggccaagtgcacgtgaaattgccgtaatactatctcctagaacgattctcttttctaaataaaatcgttcttcgaagtttaagtgtttgtttgtacgtaatgtcgtgttatgattattatagtccatagtgattacctcggttatattttgattagacacctaaatcataacacaaggttcactatggatttttatttgttcaatttcattttacaattaagctaaataataaaatattactattcgataaaaataagttctaattatattaatggagaaacttatgaggctaggtttttcgtgaattgaatatatagaaaggttagagaatatgaatacaactatatatgaagccgtagctaaatataaaaaagatgatacattaccatatacagagtactttagtttaggggatttttcgactaaagatttagcagaaaatgcaataatgttagctaaacaacttccgggatttagagaattttgcgatgaaaacttttatattgaggaatttgttttaaatgatggagtaccaagaaattatagtgtagatgatcctatcaaaaacaatgaagtttttatattgtggtatgggtatgatgtggattcaatttatacagtggggggaactctaggtgtatttagtgaatatgaatatgctgaattagcaaaagagaaatatagtgcttgggacatatttattgttcatggattagacaattttggtattgggaaggttgtattaaacgaacgtcaatgggtagatggctttgtaaaagtttatgattaagtgcatatggcaatagaagctatttaaatacctttttgaacaagattatatgaacaagtaaagattttgtttttgctagactttaaaagtattacgtcatatggagtaatcatggaaatgtataagaatctaaagtctaagtttaataaattgtcttttagagttcatttgatactgatcgtacattagaggagtattgtaaatattactactgtttataatgagaagatggagcctaataaaatatatgcatataggtttattaaaagaacttggtcccaaattattaaaatatctgcttagtggcattgctgcagcctttatactaatcgtaattgtcggcatcactactcgatattatcattataatgacaactcttctgcattaatcagatatggatattctctctacaaagaggatttgattgatgagataaactggactcgcgttggtgataagtttatggtgaagaattctgattatactgactttaaggcaaagtataatcagagtaaatttttagattatatagatgataataaggacaaaattagggaaggtcttaataccaatagcattagagtccagttattagaagactttatacgaattaaatataaaatggtggactgataaagatggttttcgatagggttgttattaataaattaaaaataattatatttgtagtaggaatgatcataggctcatttagtggtgctcttgtattagagaaaatagataatacattagaatccatttattctggtagacaagctcttatttggaatgaatataaaagttttgatcatcgtgagcattttactatcaatgccatctatccttttaaatatgaacttggtagtgttagaccatactttattgttgatgcattgagtgatagtgatatggatacattagagaaatcattaagattagatggatggcaacaaatagagagtaatatatttcaaaaagaaactagtggagaagtattaaaattatctgtaaaacctattaacatgaatgaatttatgattgtatattattactaacttttacaaatggaatccatactattagctatgcggtaatcgtaataattaatgaatagttatataggtaaagttattcagaaatgtattagtggagttaggagcgattatgaacgctgggcgtatcttatgtagtattttacttggtatgtatgcaatatatattatacggaataatacaataactattgcaggcgcaaatactaagaaaagtattcttcttacgatgatacaattaggtcaattattgatgattgaattaatggctattttcggggggaggattttacatagtttttctattttttcgttaatacttgcagtccttctttggggagaaatgtttgcattaaagcaaaatctcaatgaatattttatgtgcaaggaagggaaaagctatggcattagtattataggaataggtcgaattgctgtgtctgtagggcagagcattttactaatcttattagcgatttttgcttggtaaaatttcttccgtatgaggggaggaatttaattcatcttttggccgttatagggatttataaaaagatgatacattaccatatacagagtactttagtttaaggtattttttagtttaatctggttgtgattgagatatttcgacaaagcataataggactattgttaaattttattagttagcttggtagagagtttatatgaaaaaagcttatatttttatagtgatagctattgtaagtcttggtatagctatatatcatcattatcatcaagtggcccataataatatagttgtttccacacagtctcatgaattagtagacacctcaattgatgaatcgatttctaatcgaattttagcagtatatccaactgaatcttactattactatttaggctacgatggaattggttgctatgatattaaaaatcatattttagatgtattagagttcgaggtttatggtgatgagagtggtccttttaaaacctatcatcctaaatctaagatagttgttaataggaagaataaactatctgatttttcaaaagaagatttaaataattttgaaaaaatgttaatgaattctgagcatggtgcacaatactttaataaacgatggtaccgttctggttatgaagccacttttttggatttagataatcatcttattattacgaatgatgtgcgaggtgtaaaagatacacctactaaaattttaatatttaatgtgagtggctttattatcattgataaagaaaccaatgatatgcaagtttattttgatgaaagtattgcaggaaaaaaagttaaagattctgaaatttcaatattaaagtatatgtatggtgaacatcttatagttctaaatagtatagatcaaattgaagagaatgagagaaatattttgttgcaactaagaaatcaatacattagtaaaaaataatttgcgtgagcgtagttagtgataaggttaaatttagatctagtgataattataaaggtgattttgggatatttaaccccgttggtgtagaatgacaacaaagtggtgctatcgcaacaactaatgcatatgtagaattctaaatggaagtagaggtcaataagtagatgtggaaaaagagattactgataattagtatattaggaaatattctttctctgtttttaattggtgtctattttttaactaactcttggttttttcatgctgaattagggagtacggttggtataaagcctgattatctgattcagttaaataatgaaggcgttttgtatgactatagacaaatgataagaattgcctctggtataaggtcatacaaattgataaactccttagaatcagataattatcatatatacaaatcaatttataatcatcagattttcattggtcaagttgatcaatttcatcaaaaatatattatttatgatgggtatttagatcactatttatttgtaaatgttaaatttaatatggatgaaaaacaatatgatgattttattggaagaataaaggtaatagatagatatgagaatcttcctcttagatatcgcaagttaattgaaaatggcaactgggaatatctttaattcattttaactgacacaggtatattgaattaggcctagaattatgtttaagaaatttagcagctaagggcgattctgcgcttgcgtgagagaataagcctatgcttatgaaaaaagcaaaaaaagatttttgtttcgtaataactatattggttttatttcaactgaaaattatttttaatgctataaatgataattaaaattagacttgggttggtgagtatgactagaagttattttaaattgaataggattccatttgtagttaaattttatattggatttgtcttatttggattcctactaattggacttgtttctttacacgcgtatattaaaaggccggagcaaatgcaaagccttcaattatacgagcaaaaattagaggatatatctgttaaaaaagtaagtgaagaatactatgcgtctggtcgagcctatcaaaataataatcttaaaattacatatgcctctattacaattgatgatattaaagggatactttcaaaacaaaatataggatggaatgaaataagtaagaatcgtatagttggacatgactatgatgctaacgtttatatcgagttatttaaagaagtagggtctaatagggtgattttaatattacaaagaagaaattgacattataggtgatatagcgggcttttagggatgaaatactgtagcgttagcacgtaataattggttagaactattgcatttataattacttgttttcattctaatatgttcttttaggattaaatataaaataataacaattaaattatttatcacaattagtgatagttgttatactgaggagctgtttctacggctcctttttaatattttatctatatcgaataattcctattaatatcactagaattttacgattttatgactgttttatgataaaataaaaggtatgaatacttcaacaactcggtctattacctacaatggtgacacaattgaatatgagttaacaatcaagcgtgtaaagaatataaacatgcgtgttcacaaggatggtagtgtccatatttcggcgaatgcttatgtaccagatcatcgcatcgatgcgtttgttatcgaaaatataccctttattgagcgggctcgttttaaattagaagcattaacggcacaacgcatagaggcattacaatatgtaacgggtgaaaccgtatctattttgggcatgcctgttacgctagaggtgctagaaacatctggcaaaccgcatattaagtttgatgggtctaatcgcatggtgatgttcgttaaatctgattacatctatgaagacaagcataaattaatgcaaaccttttggcgccagctaggggaaaaggtgtttacccattgggcgaaggtcgtgtatcaacgctttcaccagcaacatattgatgtgcccatgccaacggtaaagcaacagtgcatgaagagtcgttgggggtcttgtacgccatcaaagcagctcattaagatgaatatgcgtttattagaaggacctcaggcctatattgaatacgttatggtccatgagtttgcccattttaaatacttggatcattccaagaactttcacaatttagtggcccaatttttaccagattggaaagcccgtaagaaatcattaaatatctattttgcacatagaccgtaaggaggtgtaccatgaagccatttgtacatttacatagtcatacggaatttagtttattggacggcatcagccgtttgccggatatggtgcgccgcgcgaaggaactggaacaaccagcccttgccattacggaccatggcaatatgtatgcagccatctatttttataaagaatgtgtggcacaaggcattaaaccgattattgggtgtgaagtgtatgtcacagaaggtagtcgcctagaaaagccagaggggcgcagccgtgaacgtcttaagcacttaattttattggccgaaacgatggaaggctatcggaaccttgttaaaatcgtatcgaaagcctctacggaaggttttaattataagccccgtgctgaccatgatttgttgcgtcaatacagcaagggcattattgcccttagtgcgtgtattcaaggggaagtgcctcaatatattctgcaagataatatggatggggcccgccgagctgttgaatggtacatcgagacctacggtaaagataatttctttttagaaattcaaaatcacggtttacctgaagagttacgggctcagcaagtgctatgccaattagctgacgaatatggcctaggcatcgtggcgtccaatgatttccactatgttatgaaagacgacgctgatgctcaagacatccgcgtttgtattcaaacgggccgacgtcgcgccgaagtagatcgtttgaaattccctaatgatgagttctatctaaaatctggggacgagatggcggagctctttggacacatccctggagccttagaaaatacagtaaagattgcagaccgatgtaatgtagaatttaattttgatgaacaccatttgccgcactttgatgtgcctgagggcgaaacgtctaagacttatttacgcaaggtctgtgaacgagaaatacctcgcttatatggagatacatctgatgagcttaaaaaacgcctcgactacgaactcgatgttatcggaacgatgggctttgaagactatttcctcatcgtatgggactatgtgcggtacgcgcgtgaacacgatatccttgtaggcccaggtcgtggttctgcagctggttctgtagtagcttatttattaggtatcacagggctcgacccattacaatacgatttgctctttgaacgattcctcaatccagaacgggttagcatgcctgatatcgatatcgacttctgctatgaaaagcggggcgaagctatcgattacgtaacgcgaaaatatgggcaagctcgtgtgtctcaaatcatcacctttggtacagaagcggcccgcgccgttattcgcgacgtaggtcgtgtgctcgatttaccactagccgaggtcaatcgcattgcgaagatgattcctaatgaattgggtatcaccttagaaaaggccttaaagggtaaagatttaaaagccttatatgagacagaccctaatgtaaaagagttatttgatttcggtcaaaaactagagggcattgcgcgtaactcatctacccatgcggcgggcgttgtaatttctgcggaccctctagatgaccatgtgcctgtacaaaactctaatgaagaaggctttgtcactcaatatgataaggataatatcgaagaactaggcctgttgaagatggactttttgggcctccgtacattgactgttatgggggatgcccttaagctcatcaaggcaaaccgatgtattgacctcgatttagatgccatcccattagatgataaagcggcttgtgagctccttaccaagggcgatacatccggtgtattccaactcgaatccgatgggattaccaagctcgttatagatttgaaaccggagcattttgaggatttaatccctcttgttgcactctatcgcccaggtcctttgggctctggcatggtggcggattttatcgatcgccgtcatggtaaaaaagaggtgacctatttacatccgattttggaacctatcttgaaagatacgtttggcgttattctctaccaagaacaggttatgcaaattgcatctgccatgggtggtttctctcttggtcaagcagatttgatgcgccgtgcgatgggtaagaaaaaggaatccgtcctcaaggcgcagcgggaatcctttatacaaggttctatcaacaatggcatcgaagagtccattgcaaacgaagtgtttgacttgctcgtgtacttcgcaggctatggctttaataaatcccatagtgcggcttatgcgtatattgcgtaccaaacggcgtacctcaaggcgcactactttccagaatttatggccgctactatgacgagctttatgcaaaatatggataagcttacctactatatcaatgcatgtaaaaaacacaatgtgcaggtcctcggccctgatgtgaactattccttacgtagctttgctgtacaaggtgatgcaattcgatttggtcttgggggcatcaagaacgtaggggataatgctatcgaccgacttatcgccgaacgtgaggccaacggtctttatacgagtattaccgatttttgtcgtcgcgtagatagcaaggtcgttaataaacggttgctggaaagcttaattcgctgcggtgctatggacggatttgaggaaaaccgcaatcagttattgcacatgtatgaaagtgcacaggctgtaggggctaagcagcaaaaggatgctgccatggggactatgagtctctttggtgaaagcacggatgacgtcgatatgattccggtaccgaatttacctgatttatcggaagatgataaattgaaggatgaaaaggattacacagggttttatattacaggccatccattgcaaggctataacaaggaactgaaaggcctctttgaattagggcaacttcttgaaaacccagagcgttttgatggtcaaacgattacctttggcggtctcattgctgaaagaggggatagacctacaaaacggggcgatgtcatgagtattcttcgcatcgaagattactctggttcggctcaagtggtagcattcccgaaggtatttgctcagagtgaacaattcttggctgttgatatggtcgttaaggtgcgaggccgtgttgatgcggatgaaaagggtgtacagattattgcggaccgtattgcaccgctaaaggtgaattataacaatgcacgacaaatcgccatccatattcgcagtgcttatgatacgccagaaaatagtaatgcgttgaaggaaatactttcacaagcagaagggcaagtaccgacagcattatatttacacaaacaacgaaaacgaattaatttatcacctcaattatgctttgcacctacagatgaaatcatcgcacgcattgaagcggtattaggtgaaggtgccgtagaggtgcaatagagtatattaaataccatcccatttaggaggatatatgaaacgtacaaaaatcgtatgtaccgtaggtccgggcacggataagttcggtattttagaagatatgatacgcgctggcatgaatgtggctcgttttaacttctctcatggttcgcatgaagagcaagcggagcgcatgcaaatggtgcgtgatgcggcgatgattgtcaataaaccaatcgcattattgctcgacacaaaaggccctgaggttcgtcttggtctatttaaagaaggcaaggtgttcctcgaagcggggcaacaatttacattgactacagatgatgtagaaggcacgtcagagattagtactgtaaaccataaaggtttagtaggcgatgtgcatgttggcgatacggttctcttagctgatggccttgttcgattgaccatcgatgctattgaaggtaataacatcattaccaccgttcaaaacagcggcgaaatcggcaatcgtaaacgggtggccgtgccaggcgtagcgcttagcttgccacctgtatccgagcaagatgaattagatttgcgttttggctgtcaacaaggcgtggactttgtggccgcatcttttatgcaacgcgctaaggatgtagtggctattcgtcgcatattggaatctgaacaaaaggatattaagattatcgccaaaattgaaaatgcagaaggggtcaataatattgatgaaatcctcgatgtagcagatggtcttatgattgctcgtggtgatttgggcgtagaaattccggccgaagaagtaccggtattacaaaagatgatgattgaaaaatgtaatcgccttggcaaacctgttattacggctacgcaaatgttagaatctatgattcaaaaccctcgtcctacgcgcgccgaagcgagtgatgtggccaatgcaatcttagatggcaccgatgctattatgttatctggtgaaactgctaatggtgcttatcctgtggaagcggttacaacgatgacacgcattgcagaggtaacggagcaatccgtcatttatgatcataagagcagaacgcaggaaagcgatgatgtgacaaccactgaggctgtatgtttggctagcgtacgcgtcgccagtgatctaggagcggcagctattttaacatgcaccgaatctgggcatactgcgattagtgtagctcgtcaccgtcctgattgtaaaattatcgccattacaccgcatgatgaaacgattcgccgcatgcaattgtgctggggtgtcgaggctatcaaaggccgtgaaaatatcaactctgatgagatggtaaaacaggcgattaccggtgcacttggggcaaatgccatcaactctggtgatttagttgttgttaccgctggagtgccatctggttctacaggtaccacgaatatgattcgcgttcatattgcgggcaaggtattgttgtctggcaatggtatcttgcgtaaatccgctacgggtcgtgtatttattgctgctaatcataagaatgattatgaaagcttccaatctggcgatatcctcgtagtagggactatggaaccagagttgatgaatattgctaaacgagctggcggtattgtagccgtagaagatggttatacatcagatagtgctattgcgggcattacctatggtattcctgtcatcttaggtgctaaagatgctcatgacgtattgcttgaaggcgcagaggtcaccatcgatggcgaacgaggcaaggtatttgcaggcattgcgaatgcacgataagcaatatataatataaataggttggtcataaaaaaggagtacgactatggatgataaagaatggcgtacctttgtaaccgttgtggatgaaggtaatataacaaaagcggctgaaaagctatttgtttcgcaacctgctttgagctatcgactgcgtcatttagaggatagtgtaggatactccttgttgcttcgcaccacagaaggcattgcattgacgccacaaggtgaaatctattatgactattgcaaacgcatgctgcatgatagagaggccttagaccatgcattgacgtcgtctactggtaagattcaaggtaccttgaagattgcatcatctatcaattttgcagattatgaattaccagctttgttgaaatcgttccgcgaacagtatccagatgtacatattcaagttaagacagctttcagccatcaagttgtaaagatgtttaataccggtgattgtatggtggcgtttgcacgtggtggatatgaagtatcaggcaattcagaattgttattggaagaaccgtattgcttggtatataaagagttagtgccaccagaatcgttagagaaggtgccttttattcgataccaaaccgatgcatcggtagctaatatcattgaaaaatggtgtgccgagcattttgaagaaccccccattgtggcgatggacgtcaattccatgagtacatgtcggcattttgtgcgggcaggtctaggatggtctatcctaacctatatggggcttggatcttgtaaagacaaagatatttatgttagcccattgcgtagcaaggatggaacatatattacgcgtgataccaatatggtatacacaaaagaatcggctaatctaattgctgttaaaacgttcattgagtacgtacgaaattactataaacaacacactgttgtagacgatagtatttttagagaatatcaatcataacatgtaagtgcatgtatacatcttgttagaggtgtatgcatgcatttttttcatttacacctaaaaatctatgagaaaaatgcataaaaagtatgaatgacagttataaaaatttttatgacccctataaaggtaatctatttttcagaaaatgattaccaacgtataatgaaatcatactaaatacaagaattcataaagtaatagtcgcgtattacgaattacttgggtagtgttaggatgaacagtatatgcctatgtttataagaaaggaaaaaacatggaaagacttgtaaaattagccgttattgtgctaatcccaattatcctctggtttacaactccaccagcagggctttctgcggaagcgtggcgcctatttggtttctacatcgcaggtatcttaggtttgattttaaaaccatatccaattcaaattattttattatccgtattatctgcttctgcattattcatggataatgcaaaagatattttggtaggttatggctccacagcattgtggatgatcattgcagccttctccttgagcgttgcatttggtaaaactggtcttggtcaccgtgtagcttaccacttaatccgtgcattcggttccacagtattgcgtttaggctatgtaacagcgcttcttgacttaatcttgtctccagcaacaccttctaatacagcacgtgcagctggtatcgtatatcctattaacttatccattgcagaatctatcggttcttaccctggtgatactgcaaaacgcggcggctcctttatcttgatgaatggttacttcgtaacaaagattacgtccttcatgttcttaacagctatggctcctaatgtgttggcactggatttcgttactaagattacaggccttactatgaactgggttgaatgggcagtggctttggcacttcctggacttgtaatgttattttttgttcctcttgtaggctactggattgaccgtcctgaagctgtaaaaatcgacaataagaaattggcagacgaaggtcttgcaaaattaggacctatgaaaatgtctgaaaaaatcttggctgttgtattcattcttgctcttcttggttgggcctggccttctattggatattttttcccagctatcgcttttgatttgagtcctacagcagtagcattagttgctatgactgttgttttcttatccggcatcatcacatgggaagatatggttcaaacaaaagctgtttggaacacattcatctggttcggtgctatccttggtttatccacagctttaacaaaagctaaattctttgcttggcttgctacatttatggaagcaaacttggcactcgatgtgtcaccactcgtagtagtattgattctttccgctatcagcgttgtaattcgttacttattcgcttctagtactgcatatatcgcatccatgcttcctgtattcttaacggtaggtatggcagccggtgttaaccctgttatgtttggtctagtattgcttgctacaaatgcatttggtggtctcgtaactcactacggtgcatcccctggtcctatcatctactctgcaggttataataacattaaagaatggtggacagctggtggtatcttagcggtattatgctggattttactctttgtaataggtatcccttggtggactttcatcggtatgatttaatcatcatataattttatactcatcattgtttttacggcttgggtcagacttcgcgacggtctggtctttgccatttgatatattttttagtgaaaggatgtaacatggcacaattagtgaaagctgcgcaagcaggcttcgacgaaaaaaatgatgcattggttacggtagaaccgattgctagcggcatcgaaatcgaattgacttccaaagttatgcgtcaatatggcgaccaaattaaatctgttatcttgaatacagttaaagaagctggttttgacggtgtaaaagtaactgtacaagataaaaatgcttgggattacacaattaaagctcgcgtgttgggcgcattagaaagggggagcaaagcataatggctaacgataaaacatttccagaagtaaaaactaatccgcttacagaagcggctaaaaaacgcttatcccgttccatgatgttcgttcctggtaatacaccaaaaatgattaacagtgctgatatccacggttctgactctatcatgatcgatatcgaagattccgtgcctattacagaaaaagacacagctcgtcttttgactgcagaagcattgaaatcccgtaaattccgcgctgaaactgtagttcgtatcaaccatcctacacaaacaccttatggttatgatgatcttgatattatcgttccagcaaaacctgatatgattcgtttacctaaaactgaagatgtttctgaagttgaaatcgtagcgaagaaaattgaggaagtggaaaaagctaatggctggccagaaggtacaatcaatatcatcgtagctatcgaatccgttcgtggcttgtacaatgttcgtgaaatctgccatggccctcgcgtagttgctatcgcgcttggcgctgaagactaccgtgctgaccttcgtacaggtaaacataaaccagctgttgaattgttgttcgctcgtcaaacaattcttcacgcagcacgtgaagcaggtatccgcgtaatcgatactgtattctctgacgtaaaagaccctcaaggcttccgcgaagaagttgaattcattaaagcattgggttatgacggcaaatcttgcatccacccaagccaaatcaaaattatccacgaagtattcactcctgatgaaaaagaaatcgctcattccgttaaggtattgaacagctatgctgatgcattgcgcaacaataaaggcgtaatctccgtagatggtaaaatgatcgatggtcctatcgtagttcgtgcacaacgcgtagttgataaagcacgtgcagcaggcattaaagttgaattagaggaaggagcagaatacgatgttaaataaagtaggtcgcgatatcccaacaaatatcccagcactagaaggtcgcgaagtatatcaaggtgaattcgcaattgaacctaaagctaaacgtgcaggtaaacctgttcacatgagccgtgttggtacaaataaagttcttgcttccattgatgaagcaatcgaaaaagctggtgtaaaagatggcatgacattgtccttccatcatcatttgcgtaatggcgactatgttatgaaaatggttatggaacgcgttcaagcgaaaggtattaaagatattacaattgcttcttcttccttgtccccatgtcatgacttcttggtagaaatgattcaagacggtactgttacagcgctcgaaacatctggtttgcgcgatcgtcttggtaaattcttaacacaaaaccctggcgtattaaaacgtcctgtagtcattcgtcctcatggtggccgtgctcgtgctatcgaatctggcgaagttcatattgatgtagctttcatggctgctcctacagctgaccctcgcggcaatgcaactggtcgtatgggtaaatctgcatgtggtgcacttggctatgctaaggttgactctcactatgcagatacaactgttatcatcactgataacttggttgactatgtacacaactatgccatccctcaaacagatgtagactatgttgttcctgttgaaagcattggcgacccagaaggtattgcttctggtgcaattggtttcactaagaaccctattcaaattaaaatcgctgaactagctggtgaattccttgatcaagctggtatcattaaagaaggtttcgtattccaattgggtgctggtggtgctccattgactgtagcaaaattcattgctgaaaaacttcgcaaacgcggtgaagctggtggctttgctattggtggtgctactggtatcttgactggtatgcttgaagaaggtttgattaaagctatctatgatactcaaacattcgatactactgcagctgcatccttggataaaaaccctgcacacatcgaaatgtccgcttccatgtacgctaacccatggacagactgcactacaaactacctcgacgtagtattccttggtgctactgaaatcgaccttgatttcaacgtaaacgtaatgacagattccaacggtgtattgatgggcgcttctggcggtcactccgatacagcagcaggggctaaatgcacagttattacttgcccattgatccgtggccgcttgccaatgattcgtgacaaagtagcaactgtgattacaccaggctcctctgttgacgtactcgttactgaatacggtatcgcaatcaacccagctcgtactgatttgattgaacgcttcaaagatagcaacttgcctatctatacaattgaagaattacaacaattagcatttgatttagtaggtaaaccacaagatatccctgtatctgacaaagatgaagacatcatcgcaatcgtagaataccgcgatggttctatcatcgacgtggttcgtaaacctttataattaagtagtgctgagagtccaggggaatctgtaacagttttgccatcggctcatcatcctatgctgattagataatataaagaccctctccatagttctcggacttatggagagggcatttttgtatttttataatactttagtgctcacttttaaaatattcataagaattaatgcggtaaaaatggtacatagatatagttatacttttactataagaagattggagatctttaggaggtggtttctatgtaccgttgtattgccaatttagagattgacctagagggggtaggtgagttttatagtgatgtaggtgaactaactatgtatcaaataatatcagcttggctgcaggatgatttagatggacctaatcctgaagaaagggtgttcggtgtatcagagtatgccttagactggatgtttgtgttacctggagatatttcttatcgcaatctatttgatatggggagttgtaaacttggtaatcgttctgaaagtattgattatttatatgcgcaatttttacaaacattagaaagtatgaaacgatttgaacctggatataaatccttatgcttggattatataaatgtgatgccacagcatatagagataactctaacctgctgtaaaaatgtagactttttattattaataaagcgttggttacgtagttgtagtacttataaacatccgatatactataaggagaaagatatattttacattatgttttaatttaggagagcgtgtatgactcaagtatttaaacaagatttaactgatacctcagttcgacctggcggtttgttttttgttgagttattaatgcctaagcagtgtgatatgcctagccgtgatacaatggtagatgtatttacaaagcatttagggcctgttgattgctttagttatggatcggaatctgctggatttgcacctcagaactacaaggtacattatgaggataatgatgccgatatttcgccaaccttaatggtgatgaattgtgagaaaattgataaacctgtgctcgatgattttgagcgtagtcaggtttgggattgtccaaatgtagatgacttgctagatgagtgccaatatagagtatttgctacggatatgttagcttcaggtttagagcctaaagaacgggccgatatgctcgtgaaatatgtagatgcactgctagagctatatccatcttgcaaggccgttgtctttgggtcatcccgaaagttcttaagtcgtgacactattgaaaatcatccagataaaaatgtaacacgttttatttattatgccgtaaatgtgcgatattttagcattcaaggcacagatgacatgatggttgatactctaggtatgagcactttattctaccccgatgtgcagtaccattttcacggcatgaatcccgatgaaatcgtaaatcatgcgtatagtgtgttgtattatatctttgagcacgataatcctattgatgacgggcaaacaattgcaggcttagaaaatggagatatgaacccagatattaaatggaaggttcagtatgaagactccttaattcaacctgttcgtactgttatagatattaatatgggggaatatgcatctggaagtcgatagcctataatggagcataaaaattaaaaatatctactatcataatataatatgttactattgagatattttattaatattctatatattatattctttagggaaatatagcgtaataaaatatattattaatataaaaaactaattagctaatgagcatggggggtatatgttaacagctagggagcaggaaaaagctgcaaaagagtttgctcaacgttgggctgggcgcggagatgaaaagcaggatacacaaagtttttggttagatttattgcaaactgtttatggagttgcacaccctacttcttatattgagtttgaaaagcctgttgcattgaaacatactagttttatagatgcaatgattccatcaaagcaggttcttattgaacagaaaagtatcggaatagatttaagaaaggcatataaacaatctgatggtcaaatattaactccatatgagcaggcaattcgatataatggaaaagtggcatttaatgaaagagctaaatggattattacttgtaatttttccgagttcttagtctgggatatgaataatccctctgcacctgctgagagtatattattgaaaaacttaggaaaagaatatcatagacttcagttcttaataaatgtcgaacataatagaattcaaaaagaagtagaaatttctaaaagtgcgggggagttagtaggccgtatatatgagaaattgtatgaaaaatataaattagatactcaaaaaactgatgaggagattcatgaacatattaataagttatgtgttcgactggttttttgcttatatgctgaagatgcaggtctatttggcagcaaaaatatgttttctgagtatttgggaggaatgaaacctgagaaagtacgcaaagctttattagagctatttagaatacttgatactcctctagataaaagaagtccttacgaggaaaatatattattagaatttccttatgtgaatggcagtttgtttagtgaagctatagaaataccaccttttgatcaggatttattacaaacaatattgaatgatggtgctagctttgattggagtgagatttctccaacgatttttggtgggatatttgaaagcactctaaatcctgaaacaagacatgcaggggggatgcactatacaagtattgaaaatatacataaagttatagaccctttatttctaaataacttaaatagtcagtttaaaaatataatgtctttaaatagtttgtctaaaaaagaaagaattaaaagacttaaagctttacaaaatcatatggcgagcctttcatttttagatccagcagctgggtctggcaattttttgactgaatcatatctgtcattacgacgcttagaaaatgatatattacgtgaaactgttttggatagtgcgggttctgcactgttagggtttaatgaagctgaatttcatcctattaaaataagtatagaccaattttatggtatcgaaattaatgattttgcagtagccgtagctagaactgctatgtggattgctgaagctcagatgttgaaagaaactgagcatatagtgaaacgtgaaattgcttttttcccattacattcatttgtaaatattcatgaagcgaatgcattacaattagactgggaaaatatcatatcttcaaaaaaactaaattttattattggaaatccgccatttttaggatataagcagcagtctaaagaacaaaaggaagacttaagaccttttttaggaaatattaaaaatgtagactatgtagctggttggtattataaaacttgtgaatttataaaggcgaccaatataagagttgcatttgtctctaccaatagtatttgtcaaggtgaacaggctacagctgtatggaaacgtttatttgacgattataatttgaatatttgttttgcgtaccagtcatttgtttggaatagtgagtctgataatgaggctaaggtacattgcgtaattattggattttcttgctattgtgataatacaaataatcgagttctttattttgaggatggaagttataaaagtgtcaaatttattaatcagtacttattagatggtccaaaaatatttataaataaagtgaataagcctataagtcctcgtgaaaaaatggtatatggtagtgagccaagagatggaggcaatttaattctttcaaaagctgaagctgaaaaattagttttaaaaactccaaaactgagtaaatatattcataaatttattggctcggaggagttcataaatggtacccatagatactgtctatggtttgctgatgaatataatgctagagttgtagcagacaatgaagaagtattgtctagaatagagaaatgtagagcttttcgtttaaattctaaacaaaagcaagcttatgctagtgcatcaacacctcacttatttactagtattaggcaaccaaaaaataattatcttttaattcctatcgtatcatctgagaagagaaaatatattcctattggatatatgttcaaagatattattgtaaataatgcttgctttactattgatggagcctctcttttaacatttggtattttatcatccaatatacatatggcttggatgcgattggttgcaggtcgcttggaaatgcgatataggtattcaaaagatattgtttataatacatttccaatgcctaaaattacaaaacaggtagaattaagaattaaagaaacagctaaagggattttagctgtacgtgataagtataaggatctaacactggctgatttgtatggcaaaaagtggagtgcgtatattgatttggtggaggctcatcgagtcaacgatgttgcagtaatggaggcttatggattttcacctgatatggatgatgatgaatgtataatagaattaattaaattatatagcaaaataattgataagaactagtcaaatagtaattattaagtgtaataagtggaaacgtttatttcgttattttactgtgtgctagatatatttttagatatattttaatgatatatatttttttatttttgcttaaattgcaatatgaaattgaacagtatcccaatctacaattttattaacttcttcaagaaagacttccaagggcgttctataatttagaagcttgcgtggcaaattattacaccattgaagtgttcgttgaattgtttcctctgaaacggcttttattggcattcctttcggtatacatctacgaagtaaaccattatgcctttcgtttgatccacgttcccaagcagaataaggtcgagcaaaataaatagacaaggtttcattttctaaattagatatctctgaaaactctaaaccgttatctgcagttattgttttacataagtaagctagattaacatctttaaacgtatttaaccatgcatgcagtgtttcttttacatcagtagctcgtgctgagggacaccgtaaagccacatacaatctgcttttacgctcaagtaaagagattaaaacatggtctgtcttatcttttgttccacggacggtatctaattcccaatgtccgaattcctcgcgcgtttcaatattaggatcgcgaagttctatggatttaccaagttctcgcttatgttttctagaaatagattttcgttgagaatgccgcactaccaatggtaagtcaattgcttttatacctaatacacctttgtgaagatagttatataaagttttagtacaaaccatttcattacgcataaataaacccttatgtttagcatatccaacagcagcatcaaatgaccaatgatcagctagagtcttgctttcaatccaatttataaaagattctatagcaccaattctcatggtattaaaggagccaacacgttgtctttcgtatgttgcttgtccagaatcagctaaatatacaagttgagatttaccttgtcgaatttgaattacagtaccacgttttaattctgtataaatagttgttctagaacggcccagtgaacgtgaaattgcagcaatactatctcctagaacgattctcttttctaaataaaatcgttcttcgaagtttaagtgtttgtttgtgcgtaatgtcgtgttatgattattgtagtccatagtgattacctcggttatattttgattagacacctaaatcataacacaaggttcactatggattttttatgtgttcaatttcattctacaattaagctattatttattttgtataaggtgagagaaggtttattatgacaactgcaaaaaaagatagtttgtctgcaaagggcgtgtcaattcaagtatatacagaggattttaagaatgactatattagtctaacagacatagctcgatataaaagtgatgaacctagtgacgtaattaaaaactggatgagaagaaaagatactattgagtttttaggtttgtgggagagcttaaataatctaaattttaattcggtcgaattcgaccgaattaaatctgaagcaggatataattcatttactttatcgcctaagaaatggataagtctaaccaatgcaatcggcattatttcgaagagtggtcgatatggaggggcttttgcatatagtgacatagcttttgagtttgcttcatggatttcggctgaatttaaaatgtacgtcatacaagattataagcgtcttaaatcagataaaaattcaaagttatctttaaattggaatttgaatcgtgaaatatcaaaacttaattataaaattcatacagacgctattaaagaatatcttttaaatgatttaacagatgagcaattatcatataaatatgctagcgaagcagatttgctaaatgttgcattatttgataagagagctaaacagtggcgtgatgaaaaccctaaattaaaaggtaatatgcgtgactatgctaatttgcaggaattattagttttagctaacatggaaagctataatgctattttaattagtaagggcatttctcaaaaggaaagaatgatagaattaagagcattagctaaaaaacaattattgtcattaaaatccttagaaaagaaaaagcttatatctaaagataatttgtaggagaatatatagcagtactttggaatttcttgatattaataggagcgagcatatgactcaagtatttaaacaagatttaacagatacttcagagcgtcctggtggtatattttttgttgaattgttgatggcggagcattgtgatatacttgaccgtgagcatatggttgaggtgtttacaaagcatttgggcactgttgattgctttagttatggagtggattcagctggttttgcacctcaaaattataaggtgcattatgaagataatgatgcagaggttcctccaacattgatgattacaaaatgtgagaaaattgataagcctgtactagatgattttgaccgtagtcaagtttgggattgtccgaatgttgatgtattattagctgagtgtcaacatagggtatttgctactgatatgttagccgcaggcttagagcctaaaaagcgtgctgatatgctagtaaagtatgtagatgctttgttggaattatatccatcttgtaaggccgttgtctttggtccggcacgtaagtttttaagtcgtgaatcgattgaaaatcatccagatacagatgtaactcggtttatttattatgctgttaatgtgcgttattttagcatccaaggtacagatgatatgatggttgattctgtgggcatgagtacattgttcttgcctgatttacagtatcactttcacggtatgaatcctgatgatgtagtgattcatgcatataatatgttgtattttattttagaaaatgacaatcctgttggtgatggtgatactattagcggcctagagaatggggaattggattcaaatgtgcaatggacattgcagtatgaggattccctagttcaaccggtgagagcagtgcttgatgtaaatatgggtgaatatgcttctggaactcgttagttgttaatcgatgaaaggtgagagtattatgagtaatcaacgtatttttgatatggaacttgtgaaagttgaaagtttggagaaggctgttaggacgccattttatcaaactgattccacaggtggttcagtttgggttattaaacctggtcaaaccttaccaaagcattatcatcataattctgatgatatatgggttgtattgcaaggaacaggggtattttatccaacgccggatactgaggtgccttttacaaaggggcaagttatagtatctaaaaagggtgaatgtcatggtgcaaaaaatactggaacggaagatattgtctttgtgagtatcgttgctccggtgcctgctgattatgatcctgtttatactaattaatatgaaagcactttatagtattttcttatcttgtgatagagatatattcatactataaagtgttttttaggaacgataacagaaaatggggcactagtgaggtagaaggactcaaattctttataatttggttttgtgcaatgtatttttatggcgtagaataagaatttttagtataatataaagatagataacaaactatactcatactgcaatgtccattgcacatttgaatccaattaaactaaaaatagcaaggaggttcttatgaatccatatatgacacaaacgccaaatgctaatgatgtagcgttggtagaaagcatcgtatctcaacgactaaagggatccattctatggatggttgtgggcttattgactacactaggtattggtgtggcaaccttaatgaatccgtcttgggctcgttttgcagctagcaatttcaatattttattgattgcagaagtagccgtagtattcttgtttagcatgcgcacatataaagcaaatgttatgtctttatatgcgatgttctttatttacagcgcattgaatggcgttaccttatcacttgtttcgctagcgtatggtatcatggaagctactgtacctgcattgattggggcattggcattcttcgttgctttctctattgtaggtcttacgactaagaagaatttagctggattaacgccgtatttggtagcggctatctttggcatgattatcgtaagtctcgtgtttatggcagcatcgtacttttcgattccatatcttagctccattagctatagcacaattagtttgattcttggctacgttggggtcgtggtattctccatatttacagctgttgatatgaacatgattaaaaacagcgttactcaattggcactatctgaagatgaaacgattttagatcgtattgaaattgctggtgcacttagcttgtatctcgatttcattaacttgttcttatccttgttgcgtatctttggtaacagacgctaatatctgaatagtgtatgtgaaagcaccttatatactgttagaaatctttatggagattttacataacagatataaggtgctttttgtatgttacatattctaattcgttattcctatattctatataatatcattgacagaggacatttgtttttttaatatattatggtacgtatcatatagtaagtagaaaggattcatatgaactcatcatctgtaccagagcctcaaagtggggccattgatttcaaggattttacaaggcggcgtatgttgcatgtcatcctaccattatttattgtttctattattgcctttttagaccgtgtaaatatcgcctatgcaggcttgaccatgaaagagaatttaccatggttaacaccagaaatattcggtatgggcgcaggtatattctttattggctatgttttatttgaagtccctgcatctctgttagcatcgagatttaatgcgatgcattgggtagcgcgtatcatgtttagttggggcattgtatgtgtcctcatgacgacaatgactacggagtgggagttcttcttatatcgattcttgttaggtttatgtgaagcgtcattatatccggttatctattctttattgatacctaattggtttttaccgagagaacgggcaaaggcaatttcattaatgcttacttctctattattctctaacattatcggcggtccattagcaggcgtattgctcgatacgacattttttggattacatggatggcgtacgttgtttattgtagaagcattaccagctgttatctttgctttcatttttgcattctggatgaaagaaaaaccagaagaagccgcttgggtaactgatgcagagaaaaaatatatcaaagaagagcttgctaaggaagaagctgaaaaacaatccgtaaaaaaatacacaatttggcaagccttgaaagatccaaaggtattacgattagcattaatttatttcttgtgggttattgggttctggggattcagtttctggatgccacaagtgcttaaaagcttatccggatggccaccaagtgttgtagcttggtctattgccattccgatgagtgctgccttattagtacaagttttctgtggctattcctcagagaaacgcaatgaaaaacgttggcatgtggcgaccacattatttgttggtaccataggttttattgccacaccacatagtccatcacctgaaattagcttgttattcatctgtttaacggctgtaggcgtgtatggcggtatgggcgtatggtggacgatgccaactacattcttatctggcgctgctgcagctggtgctatgggtcttatcaattcatccggtaatatgggcggttgggttggcccttatatgcttggctttatcaacggtcatacaggtagctttacttacggttactatgtaatgggcgcttgtatgttcctagcaggtctattgattttgacactacctaaatctatggaacataaggatgactagataatatcataggacagtaatataaaaagagctacatcattcacattctcacacattgtgaggaatatgtttgatatagctctttttgtttatttttttacatctggtaccttgccaggattcatgtctaggttaagatctgtggactttaacggattaggatctccatcaggagaaataacctttagttctggatgcaaccattccagttgttttagttcccaatcatatctagcaccatcattttgcaattgccggatatatttttgtagttcttcaatttgatcactatgtttattagccatgccttctaaaatatataggcgtccagctacactatctacagttgaaccgtcgtggtcttcatcgacgcgccattgtagttcggatatttgaacttgctgaatgatgatgacgatgatgagaactataataatggcccacatgggcgtttctttagctttcaaaagggcccgcaatttagttgcgagcccagatggtttgttcattatttatgagcctccaattgtagaccaggtaatggcaatttggagtttacaaagtctaaccacaagcgggaagcgtgggagaggtaatgaccttttttccagattacatataaggtatggatgatttctggaacgagaggacgtacaactaccttagatcctacttctgtattttcgcctacctcagggcagaggcgagatggtagtaaggcaatagcaagatccgcacttactgtttgcaacatgaggtcacgttggcttgtttcgaatacgatatgaggttggaaacctgtgtgtttacatgctttgataatttcatcatgtaaattgaaatcgtccttgtgaagtacaaaggattcttctgaaagcatatccaatcgaatttctggttccttggcaagtgggctagttttaggaacgataacggataatgggtcagatgtgagatagaaggattcgaattccttaggatttggctttgtacagatgataccgatatcaatcaaaccttcttgtacactgatttcgaccttcttagaaccttgttcatataattctaaatcgatttgtgggtatacctttttaaactcacctaatagttgcgcaaagattggtgcatcggtaataggtgggataccaattcggatggaaccttgctccaaacgaaactcgttttcaaaatctgtttttaaatgttcaaacataaatactacgcgtttcgcgtgtgttaaaaagatggtacctccatcagtgagttctacggatttagcattacgcatgaagagaacaacaccaagttcgtcttctaaggctttgattgtacggctaatcgcggattgtgagatgtgtaagtttcttgctgctttactaaaactcttttgatcagccacttctacgaagtattttaaatggtggaaatccataactaaccccctaatatataaaagatattacaaacctaatttaaaaattgattttgataaatgagaataattattactaaaacgcaattagctattactttaagtaaagcatggatagcgatattggcaaggcgccaagcactgtatgtattgcgttgatatagctcgccacgttataatgagtctatagggctatatcaagttatgatattaggaattatggttgtgcccactacaaaatagtttgtactacataatgccataaatatatataacatatatattattgcattattttttcatgtacgcaagtttgtaatggttgttattcctaaacataatgatagattaagcaagtgttctatttttgctaaatgcttaaggaggcaataatcacatgagtcgtaaatttaaaactatggacggcaaccaagcggctgctcacgtttcttatggttttacagaagttgctgcgatttacccaatcactccatcttctccaatgccagaacacattgacgaatgggctgcatctggtcgtaaaaacatcttcggtaacactgttcaagttgtagaaatgcaatctgaagcaggcgctgctgctgctgttcacggttccttgcaagctggtgcattaacaacaactttcacatcttcccaaggtttgttattgatgcttcctaacttatacaaagtagcaggcgaattacttccaggcgtattccaagtagctgctcgtgcattagctgcacatgcgttggctatcttcggtgaccaccaagacgtaatggctgctcgtgcagctggctgtgctatgcttgcagaatcctccgtacaagaagtaatggacttgtctgcagtagctcacttgacagctattaaaactcgtgtaccgttcatcaacttctttgacggtttccgtacatcccatgaaattcaaaaaattcaaatctgggactatgaagaattaaaaccattagtagatatggaagcagttcaagcattccgtaagaacgctttgaatccagatgctcctgtaactcgtggtactgcagaaaaccctgacgtttacttccaacatcgtgaagcatccaacaaattctacttgaacgttcctgacgttgtagaacactacatgaacgaaatcaacaaattggctggtactaactaccaattgttcaactacgtaggtgctcctgatgcaactgacgtaatcgttactatgggttcctccgcacaagtagtagaatccactgtaaattacttaaataaattgggtcgcaaagttggtttcatcaacgttcacttgttccgtccattcgcaacagatcgtttgttgaaagctattcctcaaactgtagaacgaattgctgttcttgaccgtacaaaagaaccaggcgctttggctgaaccattgttcttagacgttcaagctgctgtagttgacggtggccgtaacatcaaagttatcgctggtcgttatggtttgagctccaaagacgttatccctgcagacatcgttgctgtattcgataacttgaatgctgaaaatggtaagaaattcttcacattgggtatcaatgatgatgttacattcttgtccttagatcgtgctgaaggcgtagaagttgaaactcctggtttgactgaatgtaaattctggggcttcggttctgacggtactgtaggtgcaaacaaatccgctatcaaaatcatcggtgaccacactgacttgtatgcacaagcatacttcgattacgactccaaaaaatctggtggcgtaacaatgtctcaccttcgttttggtactaatccaatcaacttaccttacttgattactgaacctcaattcgtagcatgtcaccgtcaatcctacgtacatgaatacgacttacttcgcggtatcaaaaaaggcggtacattcttattgaactgtacttggtcccctgaagaattgaacgaacatttacctgctaaattacgtcgtcaaatcgcagaaaaagaattgaacttctacatcatcaatgctgcgaaaatcgctgctgaaatcggcttaggcggtcgtatcaacatggtaactcaagctgcattcttcaaattgactgaaatcatccctgtagatgatgctatcaaatacttgaaagaatccgtagttacttcctatggtaaaaaaggtcaaaacatcgttgacatgaacaacgctgctatcgaccaaggcgttggtgctcttgtaaaagtagacgttccagctgactggaaaaacgctgttgatgaaggcggtcacaaagctaaaccaggctgtgaatcctgcccatctttcgttcaaaatattgcacaaccaatcaatgcacaagctggttatgatcttcctgtatccacattcgctggttacgaagatggtacattacctgctggtactgctaaattcgaaaaacgcggtcctgcattgttcgttccaaaatggatgccagaaaactgtatccaatgtaaccaatgttccttcgtatgtccacatgctacaattcgtccaatcttggcaactgaagcagaagtggctgcagctccagaacattttgatacaatccctgcattgggtgctaaagaccttcaattccgtatcgcagtatccccattagattgcttgggttgcggtaactgcgttgatatctgtccagctcctaagggcaaagctatcgtaatgacttctatcgattccgaaatcgaacaagctgaagcttggaactacgctgttaaccttcctgtaaaagaaaaccctatgaagaaggaaactgttaaaggttcccaatttgaacaaccattgttcgaattctccggtgcttgtgcaggttgtggtgaaactccatacgctaaattgttaactcaattattcggcgatcgtatgatgattgcgaatgctactggttgttcctccatttggggtgcttccatgccagcttctccatacacaactaaccaacaaggtcaaggtccttcctgggcaaactccttgttcgaagataatgctgaatacggatatggtatgtacatcggcgttaagaaaatccgtgaacaattgcttgaagtagctaagaaagctgttgaaacagcatctggtgaattgaaagaagcattggaacaatggattgaattcgctaaccttggcgcagctactcgtcaacgttccgcacgtttggtagcagcaattgaagctgaaggtgctacaactccagaattaaaagaaatccttgataagaaacaattcttaatcaaacgttctcactggatcttcggtggtgacggttgggcatacgatatcggtttcggcggtgttgaccatgtattagcttctggcgaagacatcaacatctgggtattcgatactgaagtatactccaacactggtggtcaatcctccaaatctactcatgaagctgctgtagctcaattcgcagcatctggtaaacgtactaagaagaaagaccttggcatgatggctatgtcttatggttatgtatacgtagcacaagtagctatgggtgcagataaaaaccaattgatgaaagctgttacagaagctgaagcttatccaggtccttccttgatcatcgcttacagcccatgtatcaaccatggtatcaaagctggtatgggtaaagctcaagaagaacaacgcaaagcagttgcttgtggttactgggatctttacagatacaaccctcaacttaaagctgaaggtaaaaacccattctccttggattccaaagaaggcaactacgacgaattccaaaacttccttaaaggtgaagttcgttatgcttccttggcgaaagctgctcctgacgctgcagaagaattattcgctaaatgtgaagaagacgctaaagaacgtcgcttaagctatgttcgcttacaaaaaggtttcgaagaagttaaataattaatttctctaaactgcatatacaagaggcatcctcattgaggatgcctcttttgcatctatcatccttatgaataggtgtatagtacacatgattttggtataatagatagtatatatgtgtattattcatgtattgtttatacaatatatgtttttaatgatagaggatattatgactacgaatacaaatgacgtacaacaaaccatttatagtgaattaggctataaatctatgccattcccatataccacaccagctactcttgaagcctatgcagctctcgtgggtatttcagcacctaaccctaaaactgcaagagtattagaattgggagcaacctatggtggcaatattatctcccaagcattatttaatcccgatgcaacattcgtaggtattgagctttcacaagaacaagtcgaaaagggtaacgaagtgattgccaatgcaggtttaatcaatgtatcccttattcaatcagacatcgcatctattggtagtgaaattggtacctttgattacattatcgcccatggtgtgtattcttgggttgatgacggtgttaaagatgcattgttgcgccttatcgatgaacatttagcagaggatggcattgcctacatttcttataatacctatccaggttggcatacgatggacgaagtacgtcaattgatgatgttcagcaaccgtgataaaacacagtttaatcacaaggaaaaggtattgcatggcaaaacgattggtagtatcgtaggtagtcaaattttaaaatatgacaatctaaaggaacgaaatagtaaattccttggtgctcttcgttctgttatgcaaaaagatgaatactatgttggtcacgatcatttagaacctaacaatgaccctgtatatttctatcaatttaatgaccatttaggagcgcataatttggcatatctatgcgatgctgatttaactttatctatggtacgtagctttgatgctgatattgcggatacactagataaactcgcacttaatgaccatgtagctcaagagcaatatttagattttatgctagatacgacatttagaaaatctattatatgtaaggctaagcatgcagaatctgtaacatacgacatgggaaatcctgagcttgtaaattctgtacctatgcgaaccattattaacagctttacctatacaattctcttcaatgaagaagcgttggccatgtttgaaaatgatatcgtacgcgatacattccagtccgttattaaggatggcggtcagtttaatatgatcgaggctttagccattgtgaaagctgctaatgatgctgctaagggcgatgatgcaagcttagaagccgctattaatgcgttatatgtagctatggcagaacatattgtacgcggtggtctacgtttcttgaaatacccacatcctaaagcttactatatggagggacaatcctttgtacctgctagatttacaaagtttgtgaaagctttagttgaatctggtacagacatcatgtatggggctacctctgaaaatgaagccgtggaaaatctgtccgatgaagatttgatgtttatggaaatccttaataaaccaaaggcaaaatctactattgttaatgcgattaaaaagaatatctttggcggcgcacaagctggtcaggcaaaaaatcaaacagctatggctgaagcgttctatgctgaattgacgaaacgcatggaaacattaggctatttagaaaataaaattaaataaaggtatttcctgtgtagcatatgataataatgtgcgatgggggatagataaaggctaattctcgatatataggattggcctttatttttatgttcaatattttctttttattttataaatattacattttgttatgttaagttgcataaaagatataggaaagatgaagaaatgcatgaaaaacacatgaagtaaacatgacttttatgatatactttgtatgagtgattttgtgtacatgtaataatatggtcatagtaggccatattttgttgttagttagtataagtatattgtaaaaggagtttttccatggcatctaaaaaggcagtactagtatatatactagaaatcctacgagatgaaacagatgcaaatcatacattatctcaagaggaaattcgtagcatcttagcaaagaaatatgaattgacggtagatcgtaaaaccttaggtcgtcatttaaatgatttatatgaatctggtaattttaatattgagtgtgaagaatccgcactaggtacagatggatcgattcgtcgcaccaatttttatatgattcatccctttgaagaggccgaattacatttgttgattgatggcttattagcatcacgtcatattagtgcaaatcagcgtaaagatttgatcgataaggtatctgccttgggaggtcgttattttaaatcccatggaaaacaaattaagagtacatctgattctcttgtgagaagtcaggacctattcctaaatattgatctcattgaaaaagcggtgacggaagggagaaaaatttcgttagtctattatcagcctagtacagataataaattatatcctaatcttgattatgcaggtaatgagcgaaattatatttttaatccctaccaattagtatctagtcgagggctttactacttggtaggtaaccacgataaccatgatgatatgtctacactacgtgtagatcgaattggcaacattaagttattggatattcgccgtaagcccttgcgggaaatccaaggctatcacaatcaaaatacctttgatgtagatagatacatgaaggaacatatctatatgtttggtggtgaatccgtaacggtaatatttgaagccaaacgcagtatcgttaaccaaattcttgattggtttgatggaaatgtaaaattcataaatgagacgcctcaaaaggtggagtgtcgtgttcatgtcaatcgagaggccttcaaatattgggcactacaatatatgcaaagtgtgaaagtattatcgccagcatcattagtgttcgatgtgcgtgaagctattcgtgatggattatcacaatatgtataagaagaagggctgtaagtataacagccctttattacgaaaaaggagctattgagatatcaatagctccttttatgcgtttttagagaatatgcaatttttctgcttctttataatcttttaatactggacgtggtggtaatttatcgaaaatgctgaccatataaatcgcaatagatgagaagataaatcctggtacgatttcataaagtccaaagaaggcaaattgtttccaaattagaactgtaagaccacctacgacgatacctgcaatacaaccacggcgcgtcatgcgtttccagaatagggagaagatgatagcaggaccaaaagcggcaccaaagccagcccatgcgtaagcaaccatcgtaaggatgaggctatctggatttaatgctaagaaaatggatatagccgctaccaacaatacaacaatacggcttacaagcacgagttctttgtcggttgccgttttgtgaatgatattagcgtaaaaatcattagcaatagcagaggctgttactaatagttgagcggatgcagtactcatgatagctgcaagcacagcagaccagatgaggccagccataaatggtgtaaataaacgttccgtcataacgaggaatatcgtttctgcatctgtaccaactaatttttctggtaacatatatacatgaccgatgaggcctacgaaaatggctgccaataaggaaaggataacccaaaccatagcgatatttgtggatttttttaattccttcgcatcggaaatcgccatgaagcgaactaggatatgtggctgaccgaagtagccaagaccccaaccaagggaagatatgataccgataacaagggcaaacatatcactcgtatcaccccagaggtttaatccttgagggaattcgctttggatgagttgcatcgtatcaatgggaccacctaagtacatggttgccgtaataggtacagctaagatggcgaagaacatcaacgccccttgaatacagtccgtccaagatacggcgaggaagcctccgaggaaggtataaaatactacaatgcccgccgtaataaatagagataccgtatagtctaaaccaaagatggtattgaataatttgcctcctgctacaaatccagaggatgtgtagatgaggaagaagattaatataaacaatgcggaaataacagctaccgaatgggattgatcgtggaaccgattttttaaataatccggcaatgttaagctgtcgctagctacctccgtatggttacgcaatctacgggatacgaatcgccagttggcccaggtgcccaaggtaagtcctacggcaatccatacaccggaaatacctgtagtataggcaaggcccggtacacccatgagcatccaaccactcatatcggaggcttcggcactgagtgccgtaatccacggccctagctgtctaccgcctaatatatagtcaccaatactgttcgatttgcgataatagtagaccccgatgtacatcatcagtcctaaatacaaggcaaaggcgattatgatcattatgttgttgtgtgtcatgcctatataaaacctccttagggttgttcaccacgttaaaatatatactaattattgtaccataaattgccattctataggatatgtaaatcatataatttattggtaaatagtgatgatattgttaaaattactaaacagtattatatgaaaataactcaaaaaatacctcaaaaaatgatacaataaataaatacaatatttcgttttgatatggcatataacatcgttaattttgtacacataggaaaggaggtataccgatggaggctattaattctcgtgatcgagcgttacaactactgcaaacctactttgggtatacatcctttcggccggctcaggaggcacctgtagagtctttattaaagaacgaggatgtagtggccatcatgcctaccggggcaggcaaatcaatatgctttcaaattccagcactttgcaaatcagggcttaccgttgtattctcgcccttaatatctttgatgaaagatcaagttgatggcttggtggatcaaaatataccggcggccttaatcaacagtacattaactcaaacagaattcaataagaccatgtacgatgtacgtagtgggaatattaaattattatatattgcaccagagcgattaggttctaattttttctgcaatgtgttacgctccatgccaatttctcaagttattgtcgatgaggcgcattgtatctctcagtggggtcatgactttagaccttcctatcgattgataggcgattggctggccagtttgcctaaacgtcccgtggtgggggctttcacagcgacggctacgaaggccgtagagaatgatattaaaacattattaggtctcgatcatgcgaatgtatatgttacgggatttgataggccgaatttatcgttttccgtcgtgcgcacaccaaagcggatggattacgtagtcgattatgtgcggcgccatagccaagaaaatggtattatctattgctctacgcgcaaggatgtagaacgagtctatgataatttgacgcgtgccggaatccaaaccggatattaccatgccggtttatctgatgagatgcgaaaagatatgcaaaataaatacgccttcgaccaattacaagtcatggtagctactaacgcatttggcatgggcatcgataagagtaatgtgcggtatgtgttgcattatcaaatgccgcgtaatatggagtcctattatcaagaggcgggccgtgctggacgcgacggtgcaccggcggaatgtattctgctctatagtgggcaagatgtgcgcgttcataagtatttgattgaacaaggtcatttagaaccacagcgtgagcaggtagaacttagaaagctgcagtctatgattgattactgtttttgtagtacttgcctaagaaaatatatgctcgcctattttggtgaaatcgttccgtggctcgaatgcagtaactgtagtttctgtaatacaaaaggggaacgtgttaatgttacgaaagaggcaaaggccatattccgtgccattatcgccaccgaggagcggtatggtgcctctatgatttcctccatcgtgcgcggagaacggactgaccgcattacgcgagcaggtcttgatgcattatccgtatttgggtatttatcggatgtaggggataaggagattaagggccttatacaacaatttgtagcctctggatacttgcgaagttctatggggaaatatccggtcttatccgtcaccgccggtgcagaagaggttctagcaggacataaagaggtagaagaaattaggcaagaggttatcgtgccatctcgtaaaacgaaaaaatcagcctctatctctcgctccgaagtaccccgttctggttctggtgggctatttgaacatttacgtcaacatcgcaaacaattggcatcgcaacttagcgtgccgccgtatattatattccctgacacggtgcttatcgatttagccaatatacggcctaaaacattaggtgagtttggcaatataaagggcgtaggggaagcaaaattaaagaaatatggactttcatttttagaggccatttcacaatataaggggtaataaattggcgtttctataacgctatattgagtgatttctaatatgattagggggaactatgagctcagcggatacacaatatctcaatattattgaaaatatattagatcatggcatatatggtcaaaatagaacaggcatagccacatataaattgccacaacaaattatgcagtttgatttacaagaggaatttccaattttaactacaaaatttgtggctttcaaaacggctgtgaaagaattgttatggatttggcaaatgcagtccaatgatgtgcgtaaattacaagatatgaatgtccatgtatgggatgaatggatgcgcgaagatgggactattggcaaggcctatggttatcaaattgctaaatacaaacaattggataatcttatcaaaactataaaagaggatccagatagtcgccgcatgattgttacattatggaatattgaggatttgcctgatatggctttgcaaccttgtgcgtatgaaacattgtgggatgtaggcaatggctatttaaactgcatgcttatccaacgcagtggcgatatggggcttggtgttccatttaatacggctcaatatgcagccctcttatgtatgattgcccaagtgactggtttgaagcctggtaagtttacccatgttattaataatgcacatatttacgaaaatcatgtggatgcattgtgcgagcaattatctcgtcgagatcaagcgttgcgtgcgccaaaaattcgtgtaaattcagatatcaccgatttttatgaattctcaccggatgatatcgtgttagaagggtatgaacatttaggtaaattggctatgaccgtagccgtatagggggatactatgttagcacttatcgtagcggtggcacatcatcgcgttatcggcaaggataattctttgatttggcatttacccaatgatttgaaattttttaaggaaaaaacgacgggccacgttattattatgggccgtaagacctttgaaagcttgccctttttattgcctaatcgggaacattgggtgattacaaaaaataaaggatttaatgcaccggaaggggtacgtgtattttcttcacccgaggctgttgtaaaggctgctaaagagattgatgtggcctatgttattggaggtgcacaaatctacgaagcctttttaccgtatgtagatgtaatgcatattacggaggttgaccatgaatttgaaggggatgctcatttccctgaatttgatgcgtcagctttcacaattacctccgttgtagaggggacggtagatgataaaaatacatatcctcatcgatttgtaacatatgaaagaaaaggacataactgatggaatcaatgtttgccattattgcaaaggaattgggtgttaagcctggtcaagtagaatcagcagttactctcttagatgaaggtaacacggtgccattcatcgctcgttacagaaaagaagtaacaggtgaattacaagatgaacaactgcgaactatcgaagaacgcattaaatatttgcgcaatttagaagcacggcgtcaagaaatcatcaatgccattacggaacaagaaaagatgaccgatgaattgatggcatctttgatgaaagccgtaaaattacaagaattagaagatttgtatttaccatatcgacctaagaaacggacacgggccatgattgcccgtaaacgaggactagagcctttagcagatatgattttgaatgatacggtcacatctggtaatcatctagatatcgcaagagaatatatttctgaagaggtgcctacaccggaggacgccattcaaggtgcgtcggacatcgttgcagaaatcgtcagcgacagtgcagattttcgcgctactcttcgtaagcgtatgtggaaggaaggttttatccaagcagaactcgtggaagataatgaacacaaggaccaattccttcaatataatgagtatgctgaaccggttcgtcagatgccgtcccatcgtatcttggcggttaatcgaggcgaaaaattaggggctcttaaattggccctaaccgtacccgatgaatcttatattcaatacatggtgcgtggtattactaacaatgaacaatctatttttagtgatgtgaaagctagctccgtagcagatgcgtataaacgcttgatgttccctgctcttgaacgggatattcgcaatgaattaaccgaatctgcagatgagcaagcaattaaggtgtttggtgtaaatcttaagaatttattgttacaaccaccattggcaggccatgtcattatgggccttgatcctgggtatcgtacaggttgtaagatggctattatcgatgcacaaggcaatgtactcgattatggtgcatactatttaacgaatagtgaaaaactaaaacaagaagcacaaaagaaattagcggaaaagattcgcaaattcaatgttaccttattgtccatcggtaacggtactgcctcgtatgaaactgagcaatttgcgtctaagatgattgaagaagaaaaattagattgccactacatcattaccaatgaagcgggtgcatctgtatattccgcatcaaaattggctattgatgaattgccagatttagacgtaacgattcgcggcgccgtatccatcgctcgtcgtgtacaagatccattggcagagtctgttaaaatcgatcctaaatctattggtgttggtcaatatcaacatgatgttaaccaaaaacaattaactcatacattagaccaagtagttgaatctgtagttaaccatgttggggtagagcttaatacggcatctccggcgattttgcagcatattgcaggcatttctggtacggtagcaaaaaatattgtagcattccgtcaagaaaatggtggatttactagtcgtaagcaactattaaaggtgcctcgcttaggtcctgcagcatttactcagtgtgctggtttcttgcgattaaatggtgctaagaatccattggataatacatctgttcaccctgagtcctatgagttggcagaacgtattattggtgaattaggttttacattaaaggatttacaagataaatcccaacttgaagcattacaggtcaaattaccattggttgatgtagataagatggcgcataagcttgatgcgggtattcctactgtgcgagatatcattgcagctcttgctaaaccaggtcgtgaccctcgtgaggatttaccagcacctctgacacgtaaacatgtagtaagtcttgaggatatcaaggttggtacagttgtaaaaggtacggtacataatgtggtagattttggtgccttcatcgattttggtttaaaaaccaatggtctattacatcgtagcgaactatgtaaggcaaaacaacatccttctgatgtacttgcggtaggcgatattattgaagctgagatcatctctgtagatgtaaagcgaaatcgtatcggattatccgtcaagtcattgagaaataaagacaagaaaaaggcctaattttattaggggaattcgtaaaaaattatacatgtcaaaattgaacatgattaaaaggagtcctttatgtaatagaggactccttttttgtgtactgtgttatcataaatagtgataagtatatcgattttggtatagaataaaactattgagaatataataaaatcgttatatcgaaaattataaaatagattgaaataattagatattgggtgtatgatgaactcatagaagataattaatagtcgttatccattaaaggaggaagtactatgagtttacatattagagaaagatatggtcttttaatcaataatgaatgggtacctgcatctgatggtgctgaatttaatgtatataaccctgctaatggcgagcaacttgctgtttgtgcagaagctacgcaggcggatgttgataaagctgtagcagctgcaacagaggcttttaaaacgtggaaaacagtttctcaagtcgatcgggcagattatttattgaaaatcgcagatgctattgatgcgcataaagaacatttggcacaagttgaaacctatgacaatggtaaaccaatccgtgaaacattaaacgtggatattccacttggtgcagaccatttccgttacttcgctggcgtacttcgcgcagaagaaggttcggcacaagtatttgatgaaaatacattgagccttgttgtgcgtgaaccaattggtgtagttggtcaagtggtaccttggaacttcccgttcctaatggctgcttggaaattggcaccagctcttgcggcaggttgtacggttgtcatcaaaccttctagtcatacatctcttagccttttagtattaggcgatattttgaaagaaatcttgcctccaggcgttgtaaacattattacgggtaaaggttctaaatctggtcagtacatcctagatcatcctggtttcagtaaacttgctttcacaggctctacagaagtaggtcttgatgtatataaagcggcatctgaacgcttgattcctgctacattggaattaggcggtaaatctgcgaatatcttctttgacgatgcgaactggaaacaagctcttgatggggcaatgctcggcatcctctttaaccaaggtcaagtatgctgcgctggatcccgtattttcgtacaagatacaatttatgataaatttgtagctgaactttctaaattatttgataaggtaaaagttggcttgccttgggatgaatctactcaactgggttccttgatttacgaagatcaagttaagaaagtacttagctatgtagaactagctaaagaagaaggtgctcgcgtcgtagcaggtggtgtacgcgttaccgatggcgaacttggtaaaggttgcttcgtaagacctacacttatcgtagatgctacaaatgatatgcgcgtagctcgtgaagaaatctttggtccggtggcagtagtgattaaattccatagcgaagacgaagtaatcgaacaagccaatgatagcctatacggtcttggtggtggcgtatttacacaaaatcttaaccgtgctatccgtgtagctcgagcaatcgaaacaggtcgtatgtgggttaatacatataactccatcccagcaggcgcaccgttcggtggttataaacaatctggtatcggccgtgaaacacacaaggttattttggaacactacactcaaatgaaaaacatcattgtaaatttgagtgataaaccatctgggttttatgatttagattaataatttaatagcttttccttttacttatatttgataagaaggcacctcgaagaggtgccttttttggcatagcttgaggccagtcttttatatatggatgtataccatatgttataattaagggcatataagaggtactgtagaagaaactggagagacaatgaatcatattctcatcaaaaaactgtataatccccaatatgatttattatctattaaggataaggaagaattattaagtcgaatcggaaaaatatataatttagagttactatgttttgatgaatttgatgcatttggtaaatccacctatacggcaatatatcgttcatatgatggcatagattttgtatttgttcctggggataccgttaggctcggtcttaattttgacaataaaaagttgcaagatatttttgataaagaaagcttaatggatcttgcctatgtatatttagatggttacgaagatgaaatttatagtgaagaggatattttaactaagattagcgaagcactggcagatgaggcaataatatctaacatagaaaattatcttacgcataattttacccaagagggtgaatttataatacatccgcttttagtacaaaaaacgtatagtgaaacctgttggatacctatttccgatgaggaacttatacaaaataaagagtggcaaaatatgattaaaaaagccgagataaaaggcctttctgaagttatggttcacaacacagtttgcttatataaaacagatgatagcaattggtgtggcaaatattatgaagtcaccacatttaagaaactgttacaaaacataaaagataatggatactctcttcctacacaaagagaatgggagtatttatctggcaaggggtgtagaaccatttttccttgggggaataatatagatttctctatgaatttaaaacatatggaatggatggataatgatggagagtatacattagaaaaggaaaacttttttggattgattatcggtgatgatccatactgcagagaaattgtatatgatgatgagggattttcctataaaggtggagatggtggccgtaatatatgtgggggattaggtgttgtttggggttattttccggtttcgccatactttaaagataaggaattatcaataggtgattatataaatggtggatatgatttctttaggaggattataagaattgatgataggtgaagctcaaggaggacatttaattgcaaagatatttaatggttctggtgataaagctacaatgaccaatgaactgctcatagaaaagataagctaatagcagattatgactcttcgctagaacaatggttgagtgctgctgtaggtggttatactttacatgttattggtattgaagctggtacacatatatctgtcaatcgaaccgttgttaaatgcgtaggatatcaaaatcaactttagaagggatgagaaataatgtttgttaatccatggcagttttgcgtggcaatagttcttatgatttaggggacatattttattacatatcgtttctggtgtcgtcgaaaaggtatttccgtagagattttgtcagttaagcctagaattattaaagaacttcctaattttacagttatttatggatatgatgttaagtatctattaaatggtgtagaatatacagctcgaagcctagagttttacattacagtattggttccagggccgatgatcccttatagtatgacgggaaaattgttacagaatggaaaggtaagtcttgataaagtaaaaacaaatatgacatatggcgttgtattgtgggtgtttgctattattttcttggctgagttatattaatagttatttatctaatcgaatagaggtgtatttattagaaatggataaacatgcctctattgtgtatttagacatatttaactattaattactctaacatagataaggattatattacatccttatttatacatgtctttcagctcataatacaatatggggtgtatcttcaaaactaaagcctatataagattataaaacttattaatcataggtgttttattgttattccaataatgatgttatagtaaatacacggttaatatcatatgtgtattacatatgattaccaccttaattatattgtcagtgatgaaatcaaaattatacttttttatatcatcattttagtacattcttagagtatcattcacaagaagttataaccttattgggggcagtaaaatcaaggtttgtatttttttatcaatacattttgtcctataaccccaattttctgtgcttcttatattttaaaggggctgcaattagaatgcggaaaaccgcattctgttacagcccctttcgagttattcattataattttgtttccatagcattagaagacattttttataatgtagttgattacgatgagtggaacgatactaactactaaggttattgctgtatcgcgtacagacatattgtattctgcaatacatagttttaataaagcaaatgcggtccatccataaactaaaacatttaagatgaatataactgttcttactagaccatatgggaatgtggcagtatagatgcctatcatgaacggcatgagcacgatattttgaactaacacaagtagagcatatacacttacaccatacatgaattgtttaattgtatctggtaagtttacgtttactgtagggtatgtacgctgacagtaaaaattaaagatatagcttgctagtagagcagggatgatagctttcaaaagtcctttaaatataaggcccaataaggtagtgaatgaaaaaatggtaaagaatttatagcctacaatgcttgttgtaatgcaagctaagatataggttaatattgccattgccagatacgtaataatacccattggtagagcttcactaagggtgcccgtggttttgagttcattgccacctttttctggggacaaggtgagtgttaatagatgtgtccaattgattccgttcataatttcctctctctctaaattaaaatgaatatatatactgattattataatcaggtatatgtatattaaatgaaagagaagcaatcgttttatgaaaatccttttaaagcactatttagttttgttgacgttaaatatttttaaatgttctggcagggtaggtgaaccatcagctgattttacttctacacgaatattcattgttgtgttgaactgaggatacatatttttacattcctcacaaagttgattgatgcgaagaaagagattttgaatatcatgattgtggaccgcatcatatggaatagtgaggctgaaactccaagcatcttctccgaaaaggtatctcctataagatacatagtttaattcttcatcggtgagatatttttgaaataaagggtatatggttaccaaaggaatatttgtataaatgaatttatctgtaatagggaggccgccaccatcgtaatttacgttttcttcctgtattaaaataggtagatatggataggcgtcgaaggttgcggtccaggtgtggttaatgtgtttttctatggtgtaaggcatatgagggtagttttgagatatatattcttttacttcctcagtagaatagtgtgtgaataggtggcatccagatgtggtgagtagtatagcgagaaacaccatagttgtaaaggctttatgctgtattttcatttcaatggatctccttcgattataaaggcgtattcattacaatagtattatacttaacataatttctttattaatattgggataagcggaatatttttctgtactcttccggtgcatcagaaccatcagaaggttttataataactctaatatatatatgttctttgaagtctggataggtgttagcatattctttgcagaattgatccattcgattgtaaaaatttgttacatcttggttttctatggctgaataggggataggcatttcaatatacaaagaagatgtgtcatatgtagcataggataactcttctgctgttagatagtttttcattaatgggaatgcagttattaacgggatattggttatcagtgttcgatcaacttgtggcacaacaggtgcagatgtgtgcaagacttcagatatttcaatgggcatttgtggatatttgtcaaaggtgatttgccatgtattgccccttcgtgactctaggtggtaggtcagattaggatagttcttatttatatattggtgtacctcatcctcactgtaatgggagagaagatgacaacctgttgtcattatgagagagaatataactaatggtaataatacaaatcgtttaagagtaagtggtttcattgtatgttccttttataatgctcttgaatgttcagtaaaattgtaataccttaaaaggcattgctttattattggcggaattttggggtatattatattaattatattatacctaaattatatgtttactcatatagttgattagtataagcggatatatgtattagaaaatagtttgatgtaatagctttcacaatcgaaatatgatatactattctaacgcgcataattcgtgcgcgataggaggaaacacatttagatgttagaaaaatttgaacaattaatgattagcgaacctgttctacgtgcgttaaacgatatgggctttgaagagcctacgccaattcaacaggaagctatcccagtagccatgagcggtaaagacatgattggtcaagctcaaacaggtactggtaagacagcggcctttggcctacctgtattggaacgcgtagacggcagtaatcgtcacgttcaagtagtgattttgtcccctacacgcgaattagctattcaagtagcagaagagcttaataaaatggctcagtatacggatattacggcattacctatctatggtggccaagatattaaccgtcaattccgtgcattgaaaaagaatccgcaaatcattgttgccacaccaggccgattgatggaccatatggaccgcggttctattaaatttgaagacgttaagattgtcgttcttgacgaagctgatgaaatgttaaacatgggctttgtagatgacatcaacaaaattttaggggctatcccagaagatcaccaaacattgctattctctgcaacaatgcctaaggcgattcgcgagttagcagaaacataccttacagagccaacgttgattcgtatgaaacctacgcaagtaacgatggatcttatcgaacaatactatatcgaggtacaagatcgtcaaaaatttgacgtgttgtgccgtttgttcgacttacaagcgccagagttggctatcatctttacacgtacgaaacgtcgtgttgatgaagtaacagaagctcttaaaaaacgtggctatatggcggaaggtatccatggtgatttatcacaacaaaaacgtgatagtgtaattcgtcaattccgagaaggtacaattgacattcttgtagctactgatgtggctgctcgtggccttgatatttccggcgtatctcatgtatataactatgatttgccacaagatcctgaaagctatacgcaccgtgtaggtcgtacaggtcgtgcaggtaaggcaggcgaagcctatacatttgttatccctcgtgaaattgaacaccttcatgctattgaacgtttaacaaaacgtaaaattgcaaaacgtcgtgctccatctttgggcgaagttttggaaggtcaacaacgtcttgctgttgaaagcttaattgaaatggctggcaatacagaagagttggcaccatttaaggtgaatgcagaagagttattgaatgatactgattccgttacattgattgcggcagcactgaagttgcttacgaaagaaccggatacaacacctgtaaatattacagaagaaaagcctttacgcgtgcgtcgtcgccgtgaaggtggtcgtggtgatcgtcgtcgccgtgatggagaccgtcgtagagatggggaacgccgtcgtgatgaccgtccgcgccgtagtcgtgatgatcgcaaaggtgaccgccgtgatagccgtcgtcgtgatgatcgtcgtagcgaccgtcctagaggtgatcgtaaacctcgtcatcaaagcgaaggttttaaaccatactttaaagactaatatggtgtgaactttgtttaatgtatattcatagtaggattgctattgaacataagttatgaaaacgtggattgtataaatccacgttttttattgcttaaaatctactggaatggtacaataaataataattattgtttgaaaatggaccatagagtaccgatatgtttccaagtggagaaaggtagattattatggatatcgcacaaattttgcgaagcgaagggtttaaggtaacccctcaacgaattgcaatttatgatgctttgcgtggtcatcacaatcacccaacagcagagatgatttatcatagcttgcgtcctacacatccaagcatgagtttagcaactgtatacaaaacaatggagatttttgaaaaaattggccttgttaaggtattggaagtgggcgatgaacgcgcacattacgattgggatacaacagctcatgcacatattcgctgtgttcgttgtaataaggtagaagatatgatgaatgtcgatctacatgctattgctgatattgctggaaaagctagtgcttatcaaattacaggacaacaaattacattcgaaggcgtatgcccagaatgtgcaaaaaaagaaagtcactaacagacgccccctgcgtataagatgcagggggtttttgagtaaaaatagagtggaaaggaaatttaatgtttattataggttcacatttatcaatatcaaaagggtatttacatatgggaaaggaagccactaagattgggggcaatacatttcaatactttacgcgcaatcctaggggtggtagcatgcgtgctctcgatgtggaggatatgaatagccttagtgcgtatatgaaagaacataactttggtaccttgttagctcacgcaccgtatacgtataatccatgtgcagcaaaggaagatttgcgcgcttttgcaaaacaatccatgaaagaagatttagagcgcatggaatatttacccggccagatgtataactttcatcccggcagtcatgtaaagcaaggtgttgaccaaggcatcgaatacatcgtagagtgcttgaatgaaatcttattcccaggtatgaaaaccacggttcttttagaggttatggctggtaagggtacggaaattggctctcgttttgaagaaattgctcgtattattgacggtgtaaaattaaaagagtacatgggtgtttgtgtagatacttgccatattcacgaaggtggttatgacatcgttaataatttagatggtgtcatcgacgagttcgatcgtattgttggtcttgaccgtttgaaagcgattcacttgaatgattcaaaaaatcctatgggggcacataaagatcgtcatgaaaaaattggggaaggtcatatcggtatcgatgcaattgcccgcattgtaacacatcctaaactgacgagcttgccgttctatttagaaacgccaaatgaattagatggttatgctaaagaaattgctatgttgcgctctatcgtagataatcaataatcaagcaaaataaattgagttatataataattggtataaactaaatatataaggtatagggagaactggaaagggggatgaaatgcgttttttacatactgctgattggcatttggggcgtattttttatggtcagtatttaacagatgaccaagctcatgtgttggagcatcagttctttactattttgaaagaggaaaaaatcgatggtatcttgcttgcgggggatgtatttgatagagcggtgcctcctattgaagccatcgaattgtgggattccattataacgcgtctcgccatggattataaggtacctctatttgtagtgagtggtaatcatgacggagcggagcgccttgaagtgggacggtctatgttaagccggtccggtattcatatttggggttcccctcatcatgcgttacagccctttgagtttgaaagctctgatggtaaggtggccatttgtcctatgccgtttagtgaaccgcgtcgcataggtgatgcgttggggttgagcgctagtgaatcgaaatcagttgatactgaggttgaagattcactattttcctatgtagaatctgatgaacaagagtcggagcccatatttaacttacataattatgatcaaatgtatcaggcttggagtgattgtctatataaacaagtgtcaaaagggatgcctagcattgccattagtcacgcctttgtgatggggggcgaagtaggtggttctgaacgaaccttgcctgtcggtggtagtgaacaggtaagccctcacgtttttaaaaactttcactataccgcccttggccatttacatggaccgcaacggatgggggcagaccatattcgctatagcggatcgccattgaagtattcctttgatgaacatgagcagaagaaatcttttactattattgatatggatacaaacgggaaggtagatattagtacaatccctgtagaggcaaagcgagatgtagtcatcttggaaggttattttgaggaccttttaaataatacagccctccaaacgaaacataaggatgattacgtgcaggcacgcctcctagatacgatgcctatcatggatggcatggctaagttgcgtcaggtttatcatcgatgtatgaccattgaattggcagggcgcatagcaacacctgtggtagatatgggagatgccgtatttaaagagctagatgagcgtcaattatttaatcagtttgctgaaaccgtgtggaaagagccgttaacagaggcggaacagtcatatatcgactctgtgtgggaccgaattatcaaggaggactagatgaagcctatatctttaactatagaagcctttggtccgtatcgagattcggttacattggactttagtaaattagaaaatcattctatgttcctcatctccggtccaacaggagcagggaaaacatccattttagatgctatggtgtacgccttgtatggcgaaccaagtggagaagtgcggaaaaccgatgctatccgcagcgattttgctgaacctgagcggatgacacgcgtagacttttcctttgccatcggagatgctcgataccgtgttgaaagattaccaaaacagatggtagccaaaaaacgcggtacaggtatgcgcgaacagaacgctagtgccactgtctatgaaatgaaagctggtgagtggaaggttatcgccacctctgcggctgacattcgcgatacgattcaacgaatcataggttttcggaaggatcaatttttacaagtggttctattgccacaaggggaattcagaaaactccttgtcgcctctacaaatgaacgggaggaattactacatacgctctttagaacagagatatatcgaaaactacaagaggctcttaaatcagcttatgatgacgaaaaagctggcattgaagaaaatttgatgaaacaaacggcgttgatacagtctattcctcacgatgaagagactccagtgctaactgtcgaacatgtacgtgaactattatctaatcgagtaccacatcgtgatgtacttgtagtagaacgagatagggcggttaatgaggtagaacaatttaatgccttgcgtaaggaatgggccctatataatcaagcgcaacaatctcttgtagaggctacatctcgattagatttggtgaaagctaaagaacctgaacgcacacaattgagtgaaaaggttcaattcctcaattccttatctcaagttcatgcattgtatcaacaatatattgataaacagtctagtttaacaacattagaacgggcactgtccgatgcagaaaaaagtgtggacactgctactcaacatgagactaactgtatagaggttcatgaagcgttagcatctcaagctgagacgatacaatctaagaggactactttggctcaactccaacaacagtctgaaaagtttgatgagttaggattgttgaaaaaaaagatgtctacactacgtggtaatgtaaaacaattggatagtaaaaaaagtgaagcggacctagagatacaacgccagctcatcaaacagatagaagtagatgttgagggtttacgtaaacgctttcaagagaatagtacaatactggagcaggttcctgttattcaagaacagcttaatcaggtgcacagatattctgagttggtagaagaaattagtcaggttcaaaaagaaatcgacattaagaatgaaatcgtatcaactctggatacaacagtgaaagaggcgaaggtacatttagagcggctagagcatttaatgcaagaagggcgcgcgtatgaactggttcctttcgtgaaagaagatgagccttgcccagtatgtggatctacagaacatcctcatttagcaactaagccagaattatatcctactaaggatgaggttgaagctgctcgaggtattcgtgataaagcgttacaacaacaagcgaatgaagttggtcaaagggatgcgttagtggggcggatgcatgaattatctaaccatatggacgcacaagtttcgattcttaagtcctctatagatggtttttctaaggaaaactttgtatcgcttcaacaagttctgttatctcaaatggaacgattcaaaacattacgtggtgaatctgaacagctaggcaagactatttctgatgcggagcgtaggttaagcaccgctaaggatacgttggctaaatcagaacttgcgcataatgaattgcttaaagcattgcatgaactagagattagtatcagttctgtacaagcaaaaatagattccttatcagagttgttgcctactacggatatagagttgtggcataagcaagtgacattcttagcatcagaaattaaagagtatgatgcgcagttaacagtgaccacaaaacaattagaggaggctcgagggcagctaagtgctaaacgaggtcgactagaaatcttatcttctcaagtaaaagaagaacaaaagaatctagattcgctccatggggaatatatacagtcattgcaatctatatcgttaagtgaaattgattttgtagaagcattgagtgattttaatgcgttagaggattttaaatctaagttatatgacttggaagaggcctttagtacagcacaagctgtatatgatgtggcactaaagactacggagactgtggttaaacctagcgatactgtttcggatgaagtatatgatgcagcggtagaacgtcgtgatacattggtgggccatttagcggcttgggataaagaaacacagcatatagaaactacacttgcttcactagaggaaattgaatcggctatgggtgaggcccgagagaaggtagccttcttaagtcgattgaatgatctcgctaatgggggtgaacaaggttttaaaaatgtcacctttgagcgctatgtattggggtccattttagatgaggttgtttatgcagccaatttacgtcttcaaaagatgagccgtagccgttactctttggagcgttcagactataccggtggcggccgtggtaagcaaggccttgatttggccgtaatggacgctttcacaggacaatctagacctgcgaataccttgtcagggggagaaacattcttggcctctatggcacttgccttaggccttgccgacgtgattcaaagttatgccggtggcattcatatggatacgatgttcattgatgaagggtttggtacacttgaccctgatacattggagctcgctatggaaacattggtacaactacaatcatcggggcgcctcatcggcatgatttctcatgtaccggaattgaaaactcgtatacctgctcatttagaggtcacacgtggtgatgatggcagcacagcaaaatttgtgattaactagctatagaattgccaaatgtgatactattaaaagaggataattcctacaaaaacatactgtatttataaaaggaggtcctatgaagttttcatttgctcataataatataaatgttaaggatcttgataagagtttagccttctataaagaggctttattacttgaggaatctcgtcgcttggaagacccaagcggtgcttttacccttgtatatttaaaaagtccatatacggcgcatgaattagaacttacatggttgcgcgattgggatcgcccttataatttaggggataatgaattccacttggcattttatgtagatgactacgaagcagctctaaaaaaacataaagagatgggtgttgtagcctatgaaaatgccgacatgggtatttattttatcgctgatcctgatggatattggacagaaattattccggcgggtaaatattaatggaatatatgttaactcgtttagagtggttggttggtcctgataaaatccaaacattaaaggatacatctattgcgctctttggtgtcggtggcgttggtggtggtgcccttgaggcgctagtgcgagccggtgtagggcgcatcgttattattgatggtgattccattgcacccagcaatttaaatcgtcaaatgattacgacacacgataccattggagaacgtaaggttgaggtcgcaaaggcgcgagctctttccatcaatcctgatgtagtgatagaaactcacgatattatgtatactgaggagaaatatcctggatttattcaaagcttgaacgttgattatgtgatcgatgccattgatatggtaacggcaaaactcaatattatcgaggtttgtcaacgtgaaagcatccctgttatttcctgtatgggcggcggtaatcgcttttacccagagaaacttatgattgcagatatcaataagtcttatacatgcccgttggcacgcgttatgcgccgggaactcaagaaacggggtataaaaaaacaattagttttattttctacagaaaaaccgacaaaaccacagttccgcggcgaagcaacgagcccaggaacatgtagttttgtgccaccagtggcaggttttatattagcagcacatgtgttgcgtacaattttggaggtacctgaacaatgaaacaagcaaaaatccatatggcaaaaggtggagacattgtaattgaattatttgataaagaagcacctggcacagtacaaaactttatcgaccttattaataaaggtttctataatggattgacattccatcgtgtaattcctggctttgtagcgcaaggtggttgccctaatggcaatggtacaggcggtcctggttacacaattaaagacgaattgattggcaatcatcataaacacgaacgcggtgcgttgtctatggctcaccgtggtcctaatactggcggtagccaattctttatcgtatacgaaccacaacctcatttagatggtgtacatactgtgtttggtaaagtaatcgaaggcatggatgtagttgatggtatccaccaaggcgatatcatggaaacagtggaagtaatcgaaggttaatctcatgaatgatgtatctgttaaacatccggagtggcttgatatcgatgtaaatgggactatatcacacggctatgatcaagaatggtttgatgatgaatggcaacgtttgtctggttgtggccctacatcggctacacaggtattgagttattctgaatttcgagatggcctattagatgtgtctactacggcgaatcatacattagcattagaacgtatgaatgtcgtgtggaactatgtaaaaccaagatttggtggtggcgtttataaaacgcaatggatggaacgcggccttagtcgtttgtttgatgataagaatttgccttatgaggtacacatgcttaatgtatctcctttttctgcatcccgcgtagaagtagaggcggcggcgcagtttattcacgatgcattatcgcaggatgttcctgtagcgttcttaaatcgccataaaggtaaagaacctgcgctctatacatggcattgggtgcctatttataagatgttcatggatggtgatgatattcgttgcggtatttttgatgaaggggaaatccgtgatttctcactagttcattggttgcaagataccatccttggcggtggattctgttatataactaagaaataatattagtattatgagagcgatggtgaaagctatcgctctacctatataggaggttattatgagtcaatggattacagaagagcaaacgcctcatttacgtctcagtgctgaagcagaagaggtactttattctggtgaatctgaatttcaaaaaattgaagtatttaagtctaaagaatatggcatgatgcttgcattagatggtgtattccaaacgtctgaacgggaggagtttatctaccatgaaatgattgctcatgtaccattgtttttgcatccaaatccagaacgggtactgattattggtggcggtgatggcggtgtagctagagaatgcgtacgccatgattgcgttaaagaagttaccatggttgagattgatggtaaagttgtagaattggcaaaacaatacctacctactatttctaaagctatgattgaaaacaatcctaagttaacagtaaagattggtgacggtattggctttatggcagaggctgaagattattatgacgttattattgtagattgctctgatccaattggtcctggtgaaggattatttacggaagagttttataaaaatacgttgaaagctctaaaagcagatggtttatttgtacaacaaaccgaatctcctatgcttcatcaaccgctcgttgagaaggtgtttggttatgtaaataatcatttcccaatcgctcgtttgtataccgcatacattccaatctatccggccgggatgcattgctttacggttggatctaaaaaatacgacccattaacatgggaaccaaatcgtgaacaaaactttgaaactaagtactataacaaggatattcaaaaggctgcgtttgcattaccaaattttgtaaaaaactatttgccaaataaataatttatatgtataatagggaagcaccattcgttaagaaacattttaacggtggtacttcctttttattaggatgtgaaagagttttatattagaagtttatagcttgttaatttcaaaactgaaagttaaatgaaattagaaaaagttattgacacaaacttctaaaacagatataattctctttgttacgaagacagtgtcttcgatacctacaaggtggtgggtatggtgaagcggttaacacggcggattgtggctccgttacgcgtgggttcgatccccactactcaccccataacctacacatcgtaatcattgtaggggtgtcgccaagtggtaaggcaacggactttgactccgttatgcgctggttcgatcccagccacccctgccaacatggttcattagctcagttggtagagcacctgacttttaatcagggtgtcccgcgttcgagtcgcggatgagccaccaaataaaactcacaaacgaaagtttgtgagttttctatctctaattttagagaatttggttatgatggtaagtatattgtggaaacacaagtagtcaaaaataaaacaaaacttcttaaaaaagtggttgacgttttatgagatgactgatatactttaaaaagtcgttagaacgttaaaacttctaatgtacagatctttgaaaactgaacaatgataggtaatcaatcatatgattgaacatatgccagagtgcgggttttgacaaagtcaaaaccaaccataattcaaagttacttaaatgtaacgacaacacataatgagctattcaaatagcttcaagatatcttggagagtttgatcctggctcaggacgaacgctggcggcgtgcttaacacatgcaagtcgaacgaagagcgatggaagcttgcttctatcaatcttagtggcgaacgggtgagtaacgcgtaatcaacctgcccttcagagggggacaacagttggaaacgactgctaataccgcatacgatccaatctcggcatcgagactggatgaaaggtggcctctatttataagctatcactgaaggaggggattgcgtctgattagctagttggaggggtaacggcccaccaaggcgatgatcagtagccggtctgagaggatgaacggccacattgggactgagacacggcccagactcctacgggaggcagcagtggggaatcttccgcaatggacgaaagtctgacggagcaacgccgcgtgagtgatgacggccttcgggttgtaaagctctgttaatcgggacgaatggttcttgtgcgaatagtgcgaggatttgacggtaccggaatagaaagccacggctaactacgtgccagcagccgcggtaatacgtaggtggcaagcgttgtccggaattattgggcgtaaagcgcgcgcaggcggattggtcagtctgtcttaaaagttcggggcttaaccccgtgatgggatggaaactgccaatctagagtatcggagaggaaagtggaattcctagtgtagcggtgaaatgcgtagatattaggaagaacaccagtggcgaaggcgactttctggacgaaaactgacgctgaggcgcgaaagccaggggagcgaacgggattagataccccggtagtcctggccgtaaacgatgggtactaggtgtaggaggtatcgaccccttctgtgccggagttaacgcaataagtaccccgcctggggagtacgaccgcaaggttgaaactcaaaggaattgacgggggcccgcacaagcggtggagtatgtggtttaattcgacgcaacgcgaagaaccttaccaggtcttgacattgatggacagaactagagatagttcctcttcttcggaagccagaaaacaggtggtgcacggttgtcgtcagctcgtgtcgtgagatgttgggttaagtcccgcaacgagcgcaacccctatcttatgttgccagcacttcgggtgggaactcatgagagactgccgcagacaatgcggaggaaggcggggatgacgtcaaatcatcatgccccttatgacctgggctacacacgtactacaatgggagttaatagacggaagcgaaaccgcgaggtggagcaaacccgagaaacactctctcagttcggatcgtaggctgcaactcgcctacgtgaagtcggaatcgctagtaatcgcaggtcagcatactgcggtgaatacgttcccgggccttgtacacaccgcccgtcacaccacgaaagtcggaagtgcccaaagccggtggggtaaccttcgggagccagccgtctaaggtaaagtcgatgattggggtgaagtcgtaacaaggtagccgtatcggaaggtgcggctggatcacctcctttctagggagacatacaccgagccaagagcttggatgtcacttaggtcgacactttggccgcctaacattgttcggttttgagagatctgtaaagactctcaattctacagatatgggcctatagctcagctggttagagcgcacgcctgataagcgtgaggtcggtggttcgagtccacctaggcccaccagttggctcatattacttgaaatacacattgtgtagagtacagacaaaagagctaaacataggtataactttaaaaagataacggattcttcggaatggattatcgagactaaagcgtaaccactcatgggggcgtagctcagttgggagagcacctgccttgcaagcagggggtcaggagttcgaatctcctcgtctccaccatttagtatttgacatctatgatgttaagtgctaaactacataagctgatttatacatcggcagatttgttctttgaaaactgcatagaagtgttaattattatatatttgtaaggtcatctcttagaatttctaagtaggttgacccgagcacataggaaataattctctgacttattggtgacgtacatgaaaatgtacggctacaaaataaacgacaatgtatctaatgcatgtcataaaatctaagtaaagattttaagggcgtacggcggatgccttggcgatatcagccgaagaaggacgcggtaagctgcgataagctacggagaggtgcaagcaacctttgacccgtagatttccgaatgggggaacccggcagtggttatgcactgtcacccatacctttgagtatgaggagggcacctggggaactgaaacatctaattacccagaggaagagtaatcaaacgagattttcttagtagcggcgagcgaacgggaaagaggccaaaccggagcgggcaaccgcaccggggttgaggacagtcatcaagtgtaaatgaggtagaagaatcgagttggaaagctcagccgcagaaggtgaaagccctgtaatcgaaaccttgcatacatgggactgtatccagagtaccacgagacacgtgaaaccttgtgggaagcaggggggaccaccctccaagccaaaatactgatatcgaccgatagcgcatagtaccgtgagggaaaggtgaaaagaacccctggcggggagtgaaagagaacctgaaaccgtatgtctacaaacagtcgaagtctgtatatatatcaggacgacggcgtgcctattgaagaatgaaccgacgagttactgttgctagcgaggttaagtggaaaacatggagccgcagcgaaagcgagtctgaacagggcgttcagttagtgatagtagacccgaaaccgtagtgatctatccatggccaggttgaagcacaggtaaaattgtgtggaggaccgaactcgtgagcgttgaaaagctttgggatgagttgtggataggggtgaaatgccaatcgaacacggagatagctggttctccccgaaatagctttagggctagcctcgaggttgagagtataggcggtagagcactgatcgggctaggggccataccggttaccgaacctagtcaaactacgaatggctatacttatactcgggagtcagacagtgaatgataaggtccattgtcaagagggaaacagcccagaacaccgactaaggtccccaatgtcatactaagtggcgaaggatgtggaatttccaaaacaaccaggatgttggcttagaagcagccaccatttaaagagtgcgtaatagctcactggtcgagagactctgcgccgaaaatgtccggggctaaagtatgaaaccgaagtcgtgtcatatgcagcaatgtatatgggtaggggagcgttctcatcggattgaagcagtaccgtaaggagttgtggactggtgagaagtgagaatgtcggtatgagtagcgaaaagaatggtgagaatccattccaccgaaagcctaagggttcctgagcaacgatcgtcgtctcagggtaagtcgggacctaagccgaggcggaaaagcgtaggcgatggacaacaggttgaaattcctgtaccggtgtgaatcgtttgatcgaaggagtgacacagtaaggtaggtcagcacgcgattggaagtgcgtgtttaagcatgtaggttgagttataggcaaatccgtagctctaaaagctgagatgtgatgacgagctgtttacagcgaagtgattgatcctacactgtcgagaaaagcttctaggtagagacacatcgcccgtaccaaaaccgacacaggtaggcggggagagaatcctaaggtgcgcgggaaaaccctcgttaaggaactcggcaaaatgcctccgtaacttcgggaaaaggaggactcatgtagtgtgaagggcagtaacgcgtggagcatgaatgagtggcacaagagaggcgcaagcgactgtttaccacaaacacaggtgcctgctaaagcgaaagctgatgtataggtgctgacacctgcccggtgctggaaggttaagaggaggggttagacttcggtcgaagctctgaattgaagccccagtaaacggcggccgtaactataacggtcctaaggtagcgaaattccttgtcgggtaagttccgacccgcacgaaaggtgtaacgacttgcgcactgtctcaacgagggacccggtgaaattgaagtacctgtgaagatgcaggttacccgcgactggacaggaagaccccatggagctttactgcaacctaagattgaacttagttaatgaatgtacaggataggtgggagacttagaatctagggcgccagtcttagaggagtcgttgttgggataccaccctttgattaattgatttctaacaggccgattaacaaccggctggacagtcttaggcgggcagtttgactggggcggtcgcctcctaaagagtaacggaggcgcccaaaggttccctcagagcggacggaaatcgctcgaagagtgtaaaggcagaagggagcttgactgcgagacggacaggtcgagcagggacgaaagtcgggcttagtgatccggtggtgccgagtggaagggccatcgctcaacggataaaagctaccctggggataacaggctaatctctcccaagagtccatatcgacggggaggtttggcacctcgatgtcggctcatcacatcctggggctgaagtaggtcccaagggttcggctgttcgccgattaaagtggtacgtgagctgggttcagaacgtcgtgagacagttcggtccctatccatcgcgggcgcaagaaacttgaagggggctgctcctagtacgagaggaccggagtggacgaaccgctggtgtaccaattatcctgccaagggtacagttgggtagctacgttcgggacggataaacgctgaaagcatctaagcgtgaaaccagccttgagatgaggtttctcatagcataagctagtaagatcccatgtagacgacatggttgataggccaggtgtggaagagctgtgaggcttggagctgactggtactaatagatcgagggctttacttaataacaataagcggaaatgtgcaacaaatatatataacttctatgtggttttcagagtacaaactctgacagattcagtggcgatagctacgagggtccacctgttcccatctcgaacacagtagttaagctcgtaaacgccgaaagtacttggctggagacggcctgggaggataggaagtcgctgattaagctaaaaaggctaaccgtatggttagccttttttattatatatacttacatgtagagtccgaccagggcacctgggaaaggtagggtgtgagctaacagaggagcgtagcgacgtatgggagccacacatcaccttcatccgaacgtaagatttctccagctgcaaagcagcgatgagaaatccacagtgaggagtgataggaagtcgctgattaagctaaaaggctaaccgaatggttagccttttttgttatccctcataggttatttatatgaatttagaatgacctatgaggggtttttcattgaaacaaaagcgcggttatgttatcctcgaatagtatgaagttataattttatattgtaagaaggttcttaatcatgttaataacaataggtaaacgtatagtatatacgatcattatttgtattgcattactattcatagcattaggaagtatgtggtgtttatcatcgcattataagctttatggtgttcccgttttaaattatcatcaagttaatgataagtatcattctgcactgacacttgatgtggcacagtttaagaaacagatggagtacttacataacgaagggtatcatacgattagcctcgatgatttatatgcgtatgtgacagaaggcaaggaactccccgataaaccgattgttcttaccttcgatgatggttatatcgacaactatgaggatgttttgcctatcttagaatcctatgatatgcaagcaaccatatttatgattagcgatgctgttaatacaaaacgttttatgtctatcaatgaattaaaaactatggacgctcataagtttattgtagaaggtcatactaatcatcatagtattttaacgcgtattgatccttctaaacttgataatgaaatcaaaggtggtaaggatacattacaggctttcatgggaaaatccatcgattacttagcatatcctggtggtttcaataatgcggaaattcaacgtattactagtgaaagcgggtataagatggctttcacagtcacaccgggaacggttaaaccaggtcaaaatttatatgcgttgccaagattggccatattccaaggtgatacaccgtatttatcattctggatgcgtttgcactgcgcgccatttattacttatacatggcaattacgagatacattacgggataatggatttacaaaattggctggtttaataccattattttaggaggatatatgtctcaagaagttttacatcgacctctcaatgtcgctgtcctaacagtttctgatacacggactatggaaactgataaaggcggaaataaggttcaagaattattagaagctgctaatcataatgtagtagctcgaaagattgtcatcgatgattacgatgaaatccgtaatgccattattccttggtgtaatgatgaatcaatagatgtggtcatttctacaggtggcaccggtattgccatgcgtgatgtgaccattgaagccgtggattctattattgaaaaggctatacctggatttggtgaaatttttaggtatctttcttttacggaggatattggtaccaaagctattgcatctcgtgcagaggcaggtgtaaattcgaatacattaattttttctattcctggttcggtgggagccgttactcttggcatgagtaaattaattattccggaaatgcctcatttggtgcgagaaatcaataaatagataggcacgcactgatttactatgctataattgtattgtaattatagaagctaacagtactgtatcaggaggatctccatggcttttaaattaaaaggaaaagaagaaaagttttttagtattttagaaaatcatgctgaacttacctatgaaagtgcggaaatgatggaacgcgttttcaaaggcgaagtttctaaagaagaagcattcttggaaattgatacaaaagaaaaagctgcggatgaattagttaatgaaacagttgatcgcttgcgtaaaacattcattacaccgatggaccgtgaagatatccaattgttgattgatcaattagatactacacttgataatatcaaagaaatcatggataaaatggttatgtatcatgtaggtaaacctagtgatggtgccattcgcatgagtgaaatcgtcgtaaaatgtgttaaacatatcaataaatctatcggttacatgggtagccttaaaaaggatcatgtgaaggtagaaggtcgtgtacatcaagtgttgaaacttgaatctgaagcagataatatttaccatgaagaaatggcgaaattatttacagaatgtacagatccaattgaaattatcaaatggaaggaaatcttaagctccatggaggatgtaatcgatggttgcgaagatttggttggtacattccgccgggtagtattgaagtatgcttgagtcacattacttagtttggctagtcgtattattagccctagcatttgactacatcaatggcttccacgatacggctaatgcgattgccacatctgtttcaacccgtgctattgaacctaaaaaagcaatcatgatgacggcggcacttaattttttgggtgctatggtaagtactggggttgcgaagacaatcggtggtgatattgttatgtctccatctcttatcaatagtggtatcatttcagcagcccttatcggggccatcgtatggaatttactgacttggtactggggaatccctagttcatcatcccatgcactaattggtggtatcattggtgccgtaggctggtcagtaggttttgatgctttaaatgaatcagggattttaaagattttcttttctctcatcttatcaccattagtagcaatggttggtggctatatcatcatgaaattgttgctactcctctttggtagattttctcctattgttttaaatgatagatttagatccatgcaaatcgtatcggccgttatgatggctttttcacatggttccaatgacgcacaaaaggcgatggggattattacattgacattactcagcggtggttatattgataccttagatgttccgttatgggttaagttatgctgtgcgactgcgatggcttgtggtacggctgttggtggttggaaaattatttccaccatggggacaaaaatctttaaattagaaaccattaatggttttgcagccgatttaaactctgctattactatttttactgctacattcttgcatttacctgtaagtaccacacatgttgtgagtggttctttgttgggggtaggtgcttctaagcgtattaaagcagtaaactggggcgtagcacgttctatggttatggcgtggttcgtaacgattccactatcgggtatagtagctgccattgcttatgaagtaggacatcttctatttggctaattcttttagaactacatataataaatgagaaggactattagtatcttactaatagtccttttttgtgatattaattacagttttataaaacaataccattgcagtattgttttatatcgtttatactaaatgtagtaatacgtagacgttgttattggaaaaggagtgcttatgaaattaaatcaagccacggactatgcgtttcgcatgattttgcacatggcgatgttaccatctggtcagaaggtaaccggcggtgtattggctgagcaagagatgattccagaacgttttttgcttaagataatgcgcagccttattgccgcaggaatcatgaaatccttccgcggggtggatggtggatttgcattaaatcgtgagcccaaagatatttccatgctcgatgtgattagagccgttgagggggatacgtatttacagcgttgtttgtatgatgtcggttcttgctcaaaagcatgtatgggccaatgtgcagttaatgaagctatgtctgttgtacaagctgaacttgtaagacagatggaaagtgtgactttcgataaattagctgtgcgcgaaaaagagattttagagaccatgaatccttgtgtatctcatgcgtaacgatgtaagacattcatcaagtgtgtatttttgagtcaattctaaggaggaaaagacatgtttgaagcactggatttagcacgtttacagttcgcgctaacatctatctatcactggctatttgtaccgtttacattggggatgacggttattgtagccattttagaatggacctttgtaagcaccggtaaagaagtttaccaaaaaatggcaaaattctggggtaaattattcttaattaactttgccatgggtgttgtaacaggtatcgttcaagagttccatttcggtatgaactgggctgaatattctcgttttatgggtgatatttttggtgccccacttgcccttgaagcattaatggcatttttcttggaatctacatttatgggcgtttggatctttggttggggtcgcttatctaataaagcgcatgctactgtcgcaacattagttgcattaggtaccaatttatccgcattctggatccttgtagcaaactcttttatgcaacatcctgtaggctatgtaattcgcaatggtcgtgcggaaatggaaaacttcgcaaccatcgtatctaatggttatgtacctggtcaatttgctcatattgtattaaatggctccatgacagcaggtgtcatcattatggcgatcagcgcatggcacttgattcgtaagagcaatgttgctttctataaaacctctgtaaaatggggtatggtaattaccttaattgctggtacattaggtgcttttgcaggtcatcatcaaggccaatatattactaaagaacagcctatgaaaatggcagctatggaagctctttgggaaactcaagatccagctccattctctttggtagctaatatcgatacaaaagcacaacaaaatacaggtgccattgaaatccctggcggcttatccttcttaacacaaaactcctttacatctggtaaggtagaaggtattaaagatttacaagctaaatctgaagctcaatatggccctggtaattacattccagatgttcctggtattttctggacattccgcatcatggtagcggctggttccattatgttattagttgctttcatcggcttggtattaaatgctaaaggtaaactcgtagagaataaaacattcttgaaaattattttttggatgttaccattaccttacattgctcaatccactggttggtttgttgcagaagcaggtcgtcaaccatggcttgtatatggccttcaattgactgcgaatggtgcttctaaatccgttacagctcctgaaatcatgactactatcattggttttacagttatttacatcttggctgctattgctgcattgtatttagctgtagagcacattaaaaaaggtcctgatgggcaaacaatttaccatgtagaagaaaaagaggaggcaagattatggaactaattatgaataaccttaatgtgatctggttcatcttgctttgtgtattgtttgcaggtttcttcttcttagaaggcttcgactatggcacaggtattcttctaccagtcattggtaaaactgacgttgaacgtcgtcaaatgattaatgcgttaggtcctatttgggatggtaatgaagtatggatgatcactgctggtggcgcattattcgcatccttccctcatgtatatgctacattgtttagtggtttctacatggcattgttcttaatgcttgctgtacttatcatgcgtggcgttgcttttgaattccgttctaaaagtgcaaatcgcacatggcgtaaagtatttgattattgtattttcatcggttctatcgttcctgccttattgtggggggtaacagtaggtaacttgatccaaggtacacctattgatgaaacgatgacatatgttggtacattctgggatttacttagcccttacactgtattatgtggtgttgctttcgttttagtgtttacataccatggtggtttgtttacatctattaaaacagcaggtcctatctctgaacgtgcacgtgcagcatctctcgttacaggtgtacctactgcaatcggtgtgattgcgttgattattgcatcctatgtatgcactgatttgtacagctctatcttagctactattttctgtgccttagctgttgtttgcttccttatttcttgggctgcagcacgtacgcgcaatacaaaatggggctttgtatttagctctctttccgttattttgattacggctacatattttgcaggtctattccctcgcattatggtatcttctttgaacccagcgtggagcttgaccattacaaatgcatcttcttctgaatataccttggcattaatgactgcggttgcagtggtatttgtaccaatcgtattagcatatcaaatttgggtatactggacattccgtcatcgtgtaacagaaaaagacttacattattaatataggtactttcaccgattgtgaaagtttgagcccttttgtgaggcgtgctgtagcggcacgcctcatttttatggtaagataaatgtaatattgataaaattagatttaaagggggttagatatgatacagaaaacggcgcttcgtgtcattaaaagtaaaaggctcgtattattggcactgattatgtctagtattttacaaagtctttctatagtaggacaagcttggttttttgccacattaatacataatttggtttttcttgatcatactgtgttggatgaatctaatacaattacatggcttgcggtattcattatattacgtttagttttttcttatatacaggaacatgtatcgtctagtttgggccattctgttaaatctattttgcgtaaagaagctcttgcgcatctatttagattaggtattcaacgaggagaatctcaaggtgatacgatacatctcattactgatggattagaacaagtagaggcctatgtttcgagctatatacctcaaatgctatatgcgattatcatcccactagtaatggggattgccataatggatacattgcctattatcggggctattttaataggtacagtaccattaattccattgtttatgattttgattggtaaacaagcggaaaagatgaatcaagagcaatgggatcggatgagtctcttatcaggtcattttttagatgtattgcgaggcattaccacattaaaggtgtttggtcgtgcaaaggaacaaatacaagtcatcagtcgactgtctaatgaatttaaagactctaccttacgcgtattgcgtgtggcttttctatctgccctcgtcttggaattagttagcacaataagtacagctatcattgcggtgtatttaggccttacactattagatggcggtttggattttcttccagccttctttatattattgttggctccagagttttatacaccttttagacaattaggagctgcttttcacaccggtatgtctggtaaaactgcacttgctaaatttgatgcttttatgaatacacctattgcattacctcgaggtggcaattgtcgtattcaagggacaattgaatccatacgcctagataatttaaattatacctatccagaaacaagcaatggtataaagaatattacattgcaggcatgtcgcaataaaccgattatgcttgttggtgaaagtggggctggtaaatcgacgattgcgcgaatattaggtgcttttttagaggctccttcgaacagtgtatatgttaatgatatagatctatcaacttgttctatggattggtggcgtacacaggttacgtatgtgtctcaaaaacctcatgttatgcatggtacgctacgagataatattgcctttggacaagatgtaagtgatgacgagcttttagaagcagccaaactagcggagctacatgatgtaatttgtgaaaagggtttggattttgtcgttggtgaaggaggcatgggacttagtggtggcgaattacaacgtattgccttggcacgtgcttttttacatggtggacaagttcttattttagacgaagttacatcccatttggatgtgaatacagaggctcaaatcagttgtgcattacagcgcttgatgaaggataaaattgttattcttgtgggacaccgtattcaaacgatgcagtgggcttctcagttatatgtgttgcgtcaaggtgaaataattgagcagggaacctatgaatccttgttggcacagaatggttattttaaggcgctagtagatgctgggactggttcgtttgtaatggatgatgaggatgtgtcatatgtttctaagcttgaggttccattgccacaacaacaagaggcattgagtaatagtaaagtcccatatgaagtcgatgaaactaagtatagtgatattgaaggttggaaattgttgttttccgtattaaaacctgctcgttggtccttagtacttgccttagttttcacttctctgaccgtattcatgaatgtggggcttttgagcgtatcctcttggttactggcatcggctgcattacaacctggtatcacttacttgagtctcgctatcgtaggtgtgcgcttctttggtattagccgtgctgtatgtcgttattttgagcggtatacgtctcataaaatggcatttcaaggtttgtatgggttgcgtgtatggttttatacctatctagaaccattggcaccagctatatttaaacgatggggcgcaggggatatgctcaaccgaattatggcggatattgaagtactgcaattcttttatttacgcaccttaattcctcctgtagcagccattgtattaactatattggtatcctttggtgtcggtactatagatgcgcatttatcaacgcttgtgtggtgtgctgcactgatgacaggtgttgtactaccgtatggcatatatcgttatcatcgtacatccttaaatatgatcagtcaggtacaaggtcacttcaagtcaacattgactgatacattagaaagtttagaagatatcattagttaccataatgaaaatctagttatggaacgtatgatgcaatctatagatgatgtagagtaccataagtggcgtatttctaaaggtatgaatttaggaaatacgatgtttattgctattgtacagattgtagttgtgttagcggccctattagcaagtaatgtattaactggcccttgggcaagtgttatggtcgtagtatgtgccattggtattcaagcttggtttgaagcgctgcagcctatgattgtatccgttcatcatggttatgaaagtttagtagcagttcgtcgattgttacaaattaaacatgcacctctgccaatcaaggatacaggctgtgtagatttagattctatggatacgatatcattgaaacatgttaattttgggtataatcactcatcacttatatataaagatttaacattagatataccaaaaggacaggctgttgctattgttggtgctagtggatctggtaaaaccacattgttttccttgttagaaaggctatatgattactctggctatatttcggtaggtcacaatgaattaaagagtgttacgattgattcttggcgaaatttaatgggatctatcacacaagacacttatatttttcatgccacactggaggacaatattcgccttgccaagccgcatgcaagtgcggatgaggtacaacgtgctgtagaacaagctgttttatctgatgtagttacccggttgccaaaaggcttacgaacaattgtaggcagtggaggggtaggccttagcggcggtgaacgtcaacgtgttgctttagctcgattattcttgcgaaatcctgaactgatacttctcgatgaaccgttagaggggctagaccaagtaacaagacgaaaattacataatgatattctagctttcacaaaagaaaaaactgttttatatattacacatcagttagaaggcttagagctgatggatcgtatcctctttatggaaaaaggtcgtattgtagaagatggaacctttagcgagttaattgctaagaaagggcgattctatgcatattgtcgacttacgatggccagtgtataagtggcagctgatggaaaggccttagtagatctctgtatatacctcgataaaatgggtaaattatggtataattgtaatgtttgaggtatataaatcttgtgtagtgtgcataaattggagcgactatgacaaaaatcttcaccaaattacgatcgttggtggatgacgcattaaatgaacgttctcctattattgaacaggatacgacacttatggctgcacctgtggagcgagaactatttgatcatagaattctctatattgaagaggatatggtcaatcggatgctccgtgctgcgtttcgaaatcattggttaatctattctgtaacctttgaatttgagccgaataaccaagtatttctctccattattactaaatgggggaatgtgattaatgtggaatttaccatcgaagatgtgtggttcgatgactattcatcttcctttgctattaagttagatactgctaatatagataccggtgggtttattttgaactcgattctccacctcctaggcaactggtgccttagcctatttggcatattttttaatcctattgctattggccgattaggctctactgtgcgatttgagaagaagggaattcttcaatttgatttagtacccaattctagaatcaaaaaatttattcctttgccagaacgtcatgtaggtagtacaggacctgttttattgggaaatcctaaaactggacagtctgtattgcaattagactattatgcatttcatgatccagtagatacatttacagttcctgacgtgccaacgagaacgagttgggttagatccattgatattgccgctgtattactgttaccaatcggtgtatggattacatttataattcttcatcactatttaccaactgagactttagagttttctttttctacatactttttaatttcattagggatttttattatatccttcttagtaatgaatattccacggtatgtatatatgtatgtagactctcgaaaacagtggcaaagtgcatttgtacataataatataaaaattcaattgcgtaagttacaccgacgcattttcatgcagcaagcctcgttgtctacagattgtgacgaatgtgtagcctctcaaagtcaagagcggattaagcaattattattacagattcgagacaaacggttcttagctaatcgattgaaaatagcagatgatgatcgtgctagaaaacaaaaggttaaatttatcattgcttatattgggtgtacattaatagaattaatgttgttgatgaattaactacatagcataacaaaaaggctgagcctcctggctcagccttttgttgttagactaggtttattatctttttttacgtcgttttcgtaccttttttcgaacctcttgttcctcttgtgtcggtggttctgtaattggttgtgattgtactggctcttgattcataaatggaggatagccatacttatttggctctggttgaccaggtaatacccaaaataggaatccgataatccacacgaataaatctaataaataatttaacggtgttaccgctgaataggtattgatgaaaataataatggtagcccataaaataccagcccaaccattaaatccaatatcatgtatccgtctagtgaataatccacaggctagtggaaataacatagcttgtaatgcgcctacaaaaatacgtgtagcccaatatgcaggtaacgttacgatgtagtcgattaaacgttcctcgatgatatctacgatatagaagagtatcatcaaagctatgaagagtatgataaattgtagtctgttaaagcgccccgaaaggttgaatatggtatagcccttacgtcgtccctgatatgctataccaaaacctactaagcagattagtacagttcgtagaactggatataataaatccatgaagtcccctttataaaaataaacataacgtatattttctatgtgtttaagtatatcatgaacaggctatttggacaatttaaacgaattatttggatagattagttaattctggtaatacaagttcaaaggcgataccatgtttcatggattttacgttatctacagtagcttggattgattttgtagtaaaattcatcgccagttgagcagcttcatgaacggtaaaaccacgcataatggcgccagataaaacagatgtaaaaatatcgccagttccagtagctttcacaggaataagaggaacagagtatgttattaccgtatcagttgaaccttcgtatacggcaatcgttgcatctgtgtcggaaggtacgctagtcataataacgagttcaggtcccaattggtgtagttttttacacatgtcgtgcaattcagcatttgaaatagaatcggtagagaatggtttatttaataaaaaacaagcttctgtgtaattgggttttacaatatgagctctagaaataagatggcgcatagcttttaccatatctggtgtatatatagaatagaggcgtccatcatcggccatggcagggtcgacaatgaccattttatccttaccgaagcgattaattgcttcctctacgagatggatttgctctggtgaggccaagaatccactgacgatggcattaaaatcaatttcattcttttcccaacaatccataaatgctgttaaatgatcagataaatcaacgatttcaaaatatggatactctaaatggttactcaatacagctgttgctaatggtactgcttggcacccaagagcgctgatgattggtagcataaccgttagagagcaacgtccgatggaactcatatcttgtatagtaagtattcttggtactgtagtcatagagacctcctcaatatagtatatatgtattgtactgtattcgttaaaacctgtaaaacgagtggaataatagaaagcccctgtaatgcatgatataatatgaagaatagatgagtttttaatagatgtagtttaaaagaaataaataaaaaataaaatatttattacaatattaaatctatacctttaaatttagagtcataatatagtataataatatagaaattttattgtatggaggagaatagaatggcaaggtatgttttacggcgcataggtagcgcacttgttatactgtgggtaattattagtattaccttcgttttaatgcatgctatacctggtggaccttttacaagtgagaaaaaattaccacctcaagttaaagctagcatagaggcgaaatatcatttagatgatcctttatggaagcaatatgctgattatattggtggtgttgttacaggggatttagggccatcctataaatatgaaggacgctctgttaatgatattataggtgaatcatttcctgtatctgcgcaattgggcctattggctctttgtgttgccgttgtaggaggtattgcagcaggtgctattagtgccatgcgtcctaatggcataatagattatgctattacatttgtttccacattaggtatttctgttcctacctttattattggtgcagttctagtatatgtggtaggttttgagctgggttggttgccagtagcgatgtggcgtggtccgtcgtatatgattttaccggtacttacattggccgcacagcctatggcatttattgcacgcttgactcgtagtggactgcttgatgtatatcaacaggaatatattcgcacagctcgagcaaaaggacttggtgcatggaatatcttaatccgtcatgctttaggtaatgctattttacctgttattacctatattggcccattagctgctagtttgttaacaggtagctttattgtggaaacaatttttgccattcctggtttaggtcaatatttcgtaacatctatttataatcgtgactatacggttattcttggtgttactgtgttttatagtactttgattgtagtcttgaatattattgttgatatgatttatccgattatcgaccctcgggtaacaacagagaaggagcgtgcgtaatggatagaaacgattttttacctattgaacgcgatacgaatattcgagaatcctcctttatagtgcgtcctaactggtggcaacgatttaagttaaatcgattggccgtagttggtgcaggcattatagccgttatgattgtgttggcaatctttggccctatgatttcgccatatacttatgcagatcaatccttagtagatgctaaccaaagtcctagcttagcacattggtttggtacggatacattaggccgtgatatttatactcgcgttatgtatggtgcgcgtatttctttaaccattggtattgtagctgccttattaaatcttgtaatcggcgttatttatggcggaatcgcaggttactttggtggtaaaacagatagaattatgatggctatcgtcgatgtattatacggtattccattattgctatacgttattttgttaatggttgttattggtccaggccttacctcaatctttatcgctttggggattgcatattggctcaatatggcacgtattgtacgtagtcaaattgtgaaagttcgtgaagaggaatatattattgcagcagaaacaatggggattcctaaatggcgtattctatggcgccacattttgccaaactgtgtagggcctatcattatcacattgacattggcgattccagatgccatctttacagaagcctttttgagctttattggtcttggtgttaatgcaccgatggcaagttggggtgttttggcatctgatgggattagtagtatgagatcttatccattccaattgatattccctgcattagcaattagtgttactatgcttggctttgtattcttaggggatggattgcgtaatgtatttgatccaaaggaaggggatagatgatgaatgatatattagtagatgtacgaaatctatccattaccatcgatacctttagaggccctttgcgcattattcgcaatcaggacatcatgcttagaaaaggcgaaattttaggcgttgttggtgaatccggctgcggtaaatcggttatggttaattctttgatgggcctactaccggaaggtcgtactaaaataaaatcagaaaaatttgaaattgatggtgaagattgtcaagactatgtagaagaagattggaatgaattgcgtggtacaacggtggccatggtatttcaggatccgatgaccgcattgaatccgatactgacaattggtgaacaaatttatgaagtgattcatcggagtaatgcctacggtgatgattatgatgaaaaggcgatagctctcgatttgttgaaaaaaatgggcctatctactccggaaaagcggttaaaccaatatcctcatgaattgagtggcggtatgcgtcaacgggtttgtattgccatggctgtagcgggccgtcctaaaatcttaatctgtgatgaaccaacgactgcactggatacaaccacagaggcacaaattttacgccttatgcagaccttagctgtagaagcgggaataggcattatatttatttcccataatttacgtgttattgcacaattatgtgaccgcgttatggttatgtatgcgggtaaatgtgttgagtctgctacggtagaggatttgtttaatgatccacgtcatccttatacaattggtctgttaatgtctttgccgcagggaaaatggcatggtgaattaaaggccattgaaggacaaccgccagatttgtatgaattacctcgtggatgtgcctttaatccgcgttgtaaatgggcgatgcgcatatgtggaaaacgtatacctatgatatccaatgttgggaataatcatgagtatacatgttggttagcaaagttggagggactttaatgggatatatttgggaaacagacaatctcgttaaaaattttaccctttctggcggattgtttagaccaaaacaaacggtacatgcattacaaggtgttagtctttaccaagaggaaggcgaaacactaggtattgttggtgagtcaggatgtggtaaatctacgtttgggtataccttgatgggcgtacatcaagccacatcaggttctatttatatgaatggaattgaagtaaatccatatattcataaagatataacgagggatatgatgcaaatggtattccaaaatccatatgcatctcttaatccgagattaaagattaatacaatattagaagagccattagagttaaaccctaattatacgcctcgagatcgtgtcattcgtgttaaagaggtgttagaacaggtaggtttagatatgtcttttggtgagcgatatgctcatgaattatctggtgggcaacgacaaagaattggcattgctcgggcacttattatggagcctaaatgcattattcttgatgaacctatttcggcactagatgtgtctatacaggttcagattatgacgttgttagagcgcttacaagctttacatggcatttcctatctctttatttcacatgatttgcctatggttcgttacattagccatcgcatggtggtcatgtatttaggggctgttatggaagaggggccggctcttgatatttatgagtttcctcaacatccatattcaaaggcccttacgaagatggttggagaagtggttccgcgggctccaattggcgctccattgaaaggagaaccggcgagtccgttgcatccgcctaaggggtgtttgtttagtgatcgttgtccagatgttgaacgtagatgtctagaagagcgaccacctctccgtgaatgggcggatagaagaattgcatgttggcatatttaatggggtaaataatggaacagttaatcgtagggaaatccttagaaatacaattggcagctttgcttgatacgttgccttcagatgccactgtatcctatatggtaacgcgtctgaatgaaggggaggaggctaccatagtagcttcttctaaggaaacgattgtccatactggtgctagtatggtaaaaacgctgattttggaatatgtatttcatctagcagcacaagaacaactcgatcttaacgatacgattgcattgagtcggagccctcgtgttgaaggggctggcgccttgatggaattggtgggtaatcatagttttagttatttagagctatgtcgattgatgatggtactcagtgataattgggcgactaatctattgatacaagccttgggcatggaaaatattaatgccagagctgaacaactagggcttgaacattttgaaatcaatcgtatgatgatggattttacagcggtaaaagaaaaccgagaaaattatattactgccatggatatggctgtattgttacatcatatatatgaattgcgtcataccatatatggccatgagatgtggaatattctggggcgtcaacagttcagagatatattgccatttcattggggggaggatgtaatattccatcataaaacgggttcgttagattgtgttgagcatgatgcgggcattatagaaacgatgaatggagatttttgttttgttttattaatgagtcatttatgtaatgataaagcaaaacaactaggagctcagatggggctcattatgaaagaatttgtagaggatgcattaccatgatggataaacgtaaattgcttaagctcgtggtactagcctttggcgtaagtatattgctactcgtctttgggtatactaacgggcctaagattgttgatgagcatacgatacgatatgtattggaacaagaaccatcaacactagatccggctaagtctagtacatcacctgaggcgaccgttcaattacagctatttgatggtttggttcgtttagatgataaaggcgagccagaggctgccatagcaaagagttggactatgtcagatgatggtacaacatatacattccatttgagacctaatctgaagtggtctaatggagaaccattaacagctcatgattttgagtatgcttggaaaagaaccttggatccggatacaggcgctgataacgcctatatgttatatgtgattaagaatggcgaagctttcaataatggcaaagctgatcgcaatgatgttggtgtagaagcaattgatgacgatacattagttgttaccttagaacatccaacagcatatttcttaaaattattggcctctcatggctattatccggtgaataaaaaaactgtagaaaataatgaaaattggggtaataatgcagaaacaattgtttctaatgggccttataaattgttgagttggcaacataatggagagctcaattttgtcaaaaatgaaaactattgggatgctgatgaagttgtaacaaaaacgatgaattggccgattagtgaatctcaaagtacacgccttactctcgttgaaggtggcgaagcggatatgatggtagaacctcctgtagcagatcaacaacggttagaagaagctggtttattgcacataggccctatgcttggtaactattattacctatttaatgtgaaagcagaaccttttaccaatcctgatgtacgtaaagccttttccatggttattaatcgtaaggaaattgtaaagaacatcgtaaaaggtggtaaggaagaagcgtatgcatttgttccatatggtatgcttgaaagcaatggaactgatgatttccgtgaagccggtagttatcttgtatatgaagatgtagagcaagctaaggaattgataaaagaggctggttatgatgaaaatcatccattgccaccaattacaattttgtataatacaagtgaaatgcataaagcgatagcagaagccattcaagcaacatggcataaagcatttggcgctgatgtacgattgcagaatcaagagactaaagtgttccttgccaatcgcgaggctggcaaatatcaagtggctcgtgcatcctgggttgctgactatggggacccacaaaacttcttagaagtattttctgctgaagataatgacagccaatatcatagtgaagaatataatgagcttatcgctcgtattcgtagcaccccagatagtgcagaacgtgatgcattgatgcataaagcagaacgcatgatttttgatgaatccttagttatgccattgtactttacgacacaaccatatgtatctaatggaaccattcaaaactatttctggactgtacttggtcaagtagactttaaaaaagcatataaataagatacactaaagacgtacaaattgtacgtcttttttgtattttacgatttatgtatggtcgtttatagttactattagtacatgaccttgtaaacaatgctatatatgtgaggaattatggagtggaagtatccaaggtgtttaaaaaaaggtatgactattgggtgtatagcacctgcaagtagtagtgatgagtctttagacacgatacaacaaatatgcgaggaacatggttatcagattatatttggtgaatcttgttatcgcactggcttgtatgggggcagccctgaggagcaggcacaagagtttgaatggatgatgactgctgccccatgtgatgcggtgttagcgttacgtggcgggtatggtacgatgcgctatattgatcgtcttgactacaccgctatacgtgaatatggaaagccatttattggctatagtgattgtacagcgttacacatgtctatcaatcgatatagtcgtcttgttacgtatcatgggccaatgggcgtagattttactaaatcacgaagtgaggatatacaccatttatttgaggtgttagaaggtaaacttcgtgttattgagcctttacctgagccacctcgaggggctattggtacagaactaggggacggcatattgcgcggtggtaatatgactatgctttccatgctgtgtggcacaccttatttcttagaggatgatagcatagaggatacgattttatttatagaggatgttggtgaagcaccatataaactagatcgtatgttacaacagtggagattatccggcttgttaagtcggataaaggggatgatgattggcacctttaccgattgcgaaggggatgaggacgaatctgattacgacataggttatgaagctcttcgatatatggaagaaaatagagcagtacatctatccgatccctttgtatgctatgtgccaacgggacatggtacaccgcatcagacattgccattaggtgggcatgttcattttcgatatatttctaatacaatcgtattatcgccttatacagaacaatgtacattataaggcggcatgaggatggatatatgaatttaaagaaccgagaaattcaagcgtgtaccataattgatggtatacaagatgagttgaaatcgatttcgttatttttacataacaaccctgaattaggtcaacaggaggtgcgtgctgtacaaacgattagctgttatatggagcaacatggctttgatacgatcgtagggctaacgaaatgccctgaattgcgtaccgctatgcgaagtgatataggattagatcgtttgcataaaatggcttttttaggtgaatatgatgcactgcctgaattaggtcatgggtgtggacataacttaatcgccatcatgagcatgggtgccgctatagcgtttagtcaaatcgctcgcgatacatggggaacgacattttttggctgcccagctgaggagaccattggtggcaaggtgtttatggctaatgaagggctttttaaaggctatgatggggctctcatcattcatccaggcggagagaatgaggtgggcggtacctcgctagctacccatcctctagaggtaacctttcatggacggtcatgtcatattgcatctttgactgactctggaattaatgcattggattgtgctgtcgatttatatcaatctattaaaatgatgaaacaggatatctttcccaaaggggccatcgtaggtgccatatttactcaggctggcactgcacctaatgtggtaaccgataaggctacattacggatgacagtacgtggcgctactgtatctgatttagaagatattattttaccagctattaaagcagaggctaatcgcattgctacaagctatggtgctactgtagatatgcatcactatgaacctttatttaaggatatgaggcaagatgaacgtttagtatccttgtttgatgaggtgatgactgagtttggtgaaagcccacgaaaattaccacccgatgaggctgatggcagtaccgatgtaggaaatgtatcctatgaagtgcctacagcgcagcctactttgaatataggaaatcagttagaagcacatactcctgagtttgcttgtgctgcagggtctccttatggattggaccaagctattaaaggtgccaagattatggccgttgttgccttgcgttatgcggaatcattagaagtgtaaattttgacatatctagtgtaatcaaggtacaataaatatattaattagtgtgaactaagccgtcttatttagacggcttttattccgatggagatagataatgagtgtattaacagtatcccatgtgactcatggctttggggcacgacaaatattagatgatgcatcgttccgactgttaaagggggaacatgtaggtttaataggtgctaatggggaaggtaaatctaccttcttaaacatcattaccggcaaactaccacctgatgaaggcaaaatagagtggtctaatcaagtaacggtaggttacttggaccagcatgcagtactcgaaaagggcatgacaattcgcgatgtattacaacgtgcctttgatgatttgtatgttatggagtcaaagatcaatgatgcatacaataaaatgggtgatgtatcagaagatgaaatgaaccgtctcttagaacaagtcggtgaatggcaagaaatcttagaacaacgtgggttctacgagattgatgcggtcattgaacgaactgcacaaggtttagggcttatggatattggtttagagcgtgatgtatctgagctaagtggcggtcaacgtacgaaggttttgttgacgaaactattattagaaaagccgaccatattgctattagacgaaccaacaaactatttagatgtagaacatattcattggttgcaaaactatttgcaaaattacgagaatgcattcattctaatctctcatgatatggaatttttaaactccgtagtcaatgtcatctatcatattgagcaagctgtccttactcgatatacgggggattatcatcagttccaagctgcttatgaagttcaaaaggcacaagcgcgtaaggcttatgaacgacaacaacaagaaattgagcgtatggaggatttcattcaacgcaataaggcacgtgtggctacgcgcggtatggcaaattcccgtgctaaacggttagaaaaaatggaaatccttgaaaaaccgaaggaatatattaaaccatcctttggctttaaagaaggtcgtacacctagtcgttttattgttgaagcctttggccttgagattggttatgacgaaccgctcacaagacctgtagactttcaaattgaacgaaacaaaaaaatcgctatccgcggtgtcaatggtttaggtaagaccacattattaaagaccattttaggactgttaaaacctgtcagcggtgaattagtgaagggtgatttcctcgaagtaggttattttgctcaagaggatgcaccatctaattcagaaactgcgttagactatatttggaatgaatatccggctatgacgaatgccgaagttcgtgcagcactagcgcgatgcggattgacgaacgaacacattacatctcaaatgcgtgtcctatccggtggagaaaatgcaaaggtgcgactctgcaaattgatgcagaagaaatataatgttcttgttcttgatgaaccgacaaatcatttggatatctatgctaaggacgaattggcacgggcattgcgtgaatttaagggaaccattgttctcgttagtcatgaaccggaattctatgaaggttgggttaccgatatttggaatatagaggattggacaacgaagatcgtttaggagggcctatgaatcaacttgcgaaagaaggtatagaacagtttttacgtgctctatccgttgatacaaaggcgccagagttagaaaaaacaccgacccgtgtaacagaattatatgaagagctgttttctggtgtcggaaaagagacaaaggaactctggggggaactgttttctacggactacaatggtttagtagccgttacagacattccattttattcaatgtgtgaacaccatctattgccattttttggtacagtagatgtgatatatcaaccacatagtggttgtgtagctggcttaagtaagtttaatgatgtaattacggtgttaagtagaaagccacaattacaggaacgcttgactcgagaaatcgctgatgctatagaacgtgatttatcagcagaaggtgtttttgtacgtcttaaagcaacacaattatgtatgttgatgaaggggactttgcaacaaggctcgcaagttgttactatagaaagtagaggcctattaagagaggctggctctttgcgagatgaagcattggctatgttaggaggcacaaatgtataaacgtagacaatatacttggagtgatggaaaatcattacgcttatttgaccatacattaattatgggaatcttgaatggcacaccagattctttttctgatggcggattgcataatacaccagaagcagcagttacatggactaaacaaatgattcaagatggggctgatgtcatcgatttaggtgttgaatctacacgccctggatgcactccattgagtgcggatgaagaaattgaacgcctcagcgtactactggatccagtattagaagcatcttctgttccggtgtccattgatacataccatgcaaaaactgcagattatgcattcgctaaaggggcgcatattctaaatgatatatggggattgcattatgattctgatatggcagctgtagcagcaaaatatcgtgtaccagttatcattatgcataatagcaatgatacaaattatgatgacatcattgaagatatgaaggcttattttttctcggctgttgataaagcgttaaaagaaggtgtacaaccacaaaatatttggctcgacccaggtattggatttggcaaaaccgaggaacaaaacattgaggtattacaacgtttaggtgaaattacggcttatgaatatccggtgttattggcacctagtcgaaaacgctttataggttcaatgctcggtggtttacctccagaagaacgcgatgaagggactgttgctgcttgtattacaggggtattccaagggattgatatggttcgcgtgcataatgtattgatgcataaacgagctctagctgtagcagacggattgttgcggggcgaataaggagtttactatggataaaatcatattaaagaatatggctttttatgggtatcatggtaatttagattctgaaaaatcacaaggtcaacgattctacgtagatgttgaaatcaagactgatttaacaaaaccaggtcaaacagatgtgttagaggattctatcaactatgttgaggtttatgacatggtagcttctattatgactggtgaaagttgtaatctcttagaacatataggagcattgattgccgatacattgtatcaacactttcaaggtattatcggccttagtgtggccgtacgaaaaccgtctgtgccgatagctggtgtattagattatgtagaggttgtaacgactcgaggtcaaatttaatgtacacatactatattagtgtaggttctaatataggaaatcgccgtcagtttattatgagcgcatatgattcgctttcaatacatcctcaagttcatgggattactagttcttctgttatggagacacaaccttggggctatacagaacaagatgtgtttttaaacgctgtttggcgtgtatctagctccttagaacctcacgatttactcgatgtcttacagtcattagagtgtgaggctcaacgtaagagggatattcattggggaccaagaacacttgatttggatattgtatatgccctatcggatgatggagcgtgtatgtatatcactgatgctcgactagtgattcctcatccctatttttgggatagactatttgttttggagcccttgctggagctagataaagagtttacatataatggagaatccctagatgataggattcgaacattaaagatataatatgagatgtgtattcataaggggttaaaatgaatgcaaaacgactgggctttatcattgttgccattcttttaatggggttgtcctattgggcaatgtcaatggttaatgatgatgtaaagtctgtgaaagttgatccagaacagcatacattaatggttacatcgaatgatgccattatatcgaagcgactgttggcgatgaggcaaatcggtgacaatgtatattttttaggttatgaaggttatggtatttataatgtaagggataataccattcgccttaatgcagttcaatttaagggaacacatattgatccaggacaactaaaaaactatcaaaagggcgtgcgccatgttgagaatataagtagttttcgggattttacagctgaagaacagcataactttaccgatatgttaaatgctacggataagggggctcattatatagagccttattatcaatcaggttatgaatcatctctcatcgatttggatacatcgttttttatcacgaataatgtaaagtcacttaaacaaagagatgctaaaatatatatattggatggttcaggatttatcattattgagcaatcgaaacaagaaattcagggatattttaatactcgtgttctaggagaaggaacaaaagggattccagatagcttgaaaggctattatggttctcaatttatacgaatctatgcattaaataaaatagatccagatgatttgactattttatggaatatgcgtaaacaatatgtagagaaaaataaaattgatgtacaagggcagaatttatttcctttagaattatctgacgtacattagctcaaagtcttgcgggtatggccttaattccatccattgtaggtgcagttatcgttattgctgtagtgagtttcttttttggaagggactaacaatatatttaaaaaaggactattatagtaagtggctataatagtcctttcaattatttataaaccaaatggtattgaggaggcccttatgaaattacgtaaagtaggtattatcggaactggacatgtaggctcgcatgtagccttttctttagctttgcaaggcgaagttgatgagttatatatgatggatattgatgaaaagaaagctaaagcacaggctatggatgttaatgatgcggttagttatatacctcatcgtgtaacggctacatctggtccgattgaagagtgtggtgattgtgatattcttgtttttagtgcgggtccactacctaatttatatcaagatcgcctagaaagccttggtgatacaatcgcagtactaaaggatgttattcctcgcattaaagcatctggatttaagggctttattatttctatatctaatccagcagatgtagtggctacgtatttatgtaaacatttagattggaatccaaagcgcattatttcgtcaggtacagccctagattctgcaagattgcaaaaagaattagctcatatattcgatattagcaatcgaactattactgcttattgcatgggtgagcatggcgcaagtgctatggtgccatggtcccatgtgtatgtacaaggcaagccgttagtagaattgcaaaaagaattgcctcatagatttccagaactagatcataaacaagttttagatgatgttaaaattggtggatatcatgtgttggcaggcaaaggctctacggaatttggtatagcaagtgccaccacagagttaattcgctctgtattccatgatgagaaaaaagtattgccatgttcttgttatttagatggtcaatacggggaaacaggcgtttttgcatccacacctgctgtcattggcaaggatggtatagaagatgttcttgaattacaaatgacagaggatgaattggctttatttaagaaatcctgtgcggttattagagaatatgcaaaaaaagcagaaactatgtaatgtaccttaaatatatttcaaaataaatctacttttatacaattttctacctataatttcctaggggttctgtggtataatttgttattatgtatatagttaatactatttttgggggcgctacatgaaacaatctgaacatcgtgaaaaaccgataaagcgtagacgggtgcaacgaaatcgacgcgctgaagatcgtaagattgtcattatgtgggtgaaacgcattgcagttgcagtaatggttatgcttttacttggacaagcatatcgcttagtagctatatatcaagaaaaacaacatattgaacaacaattgcaagaattgcaacaaagaaatgatgaattagaacaagaaaaagcaaagctacaagatcctaagaatattgaaaatgtagcacgtgagcaattaggcctcgttaaaccaggtgaagtgccatatgtaaaatgatcttgtcatcattagtgtagttttagtttatattttgaggttttattaggaggttgcatggcaatcgaagttggtagcgttttaaacggtacagtttccggtattacaaagtttggtgcttttatcgatttaggtgataaacaaacaggtttagttcatatttctgaagtagctcatggctatgtagaggatattaacgatgtactaaaagtacaagatgcagtgaaggtaaaggtcttatctgtagatggtagtaaaattggtctttccattcgtcaaactcaagaaaaaccacaagtagaggaacgccgtccagagcgccgtgtacaaagtcgacaaagtgcagagtcttttgaggcaaagatgaaatcattcttgcgtgatagcaacgagcgattacatgatttaaaacgcaatacagaaggtaaacgtggtggccgtggcggtcgtcgcgattaaaataaagagatggtttcggccatctctttgtgcatatactttaaaattgcaattatagtgggtaattaatagagggataataaggaggggcgactatgaaagctgctattatcgatgtaggttctaattctattcgattattactaggaacttatatagatggtcaatggcataacgaaccaaagcggttatggacaacgcgattaggcaaacgaaatgaagatggatcgttaacgacagaatcgatggatgcatcttataaagcgttttctgaaatagccaccctagcgaaagattatggcgtagaccattgtcttgcatttgcaacgagtgccgttcgagaagcatcaaatggcattgcgtttatggagcaagccatgacatattgctccatgacgtatcgtatcttaagtggtgatgaagaagcagtttatggatttaaaggcgctttacaagatcgtttagctgacggattacattatgcaaccattgatattggcggtggtagtactgagttggcgctcggttctaaagatagcatctattggagtcgctcctatccggttggtgcggtacgtcttagacctctttcggatgaaggccctcaacgagtatgggaagaaacacggtttttatgggaccccatgatgatagagggtacgttcggtgatttcattggtatcggaggtactattacaaccttagcggctattgatttaaaaatgacagaatatgatggccataaaattcaaggtcataagctttctagagaatgtatagaaggcattattttacaattgcgctatatgagccgtgatgagcgtttacatgtaccagggctacagcctgggcgtgcagatattattgtaagtggtgcagaaatactaacatcatttatggatgcttatgaggtgcctcatatttttgtaagtgaacaagatggtatggaagcattacaacaagaattgattacaagttatgatgagacagcacagtaaatcgactcctaaacaaatcaaacaactccatagaatggttaataagaccttaaaagattttagtttatttcctcatgaggcacgaatcttagttgcttgttcagggggcccagattctatggccttattaaatgttttgcaatatgtaaaggtacatagaaaagcacggtggactattggcgttactactatggatcattctattcgcagagaaagcctaagtgaattgcaaatggttgcatcctattgtaataagaacaatttgccattttggggtgttaaaaaggatattcccactatggccggggagcgaaaggagtcattagagactgttggccgatgtgagcgctataagtggttcaatgaattagctgagcgtgaacattatgattatattgtcactgctcatcataaggatgatcaaggggaaaccattttagcacacatattgcgcgggtctggtatcaaaggtattaccggcatgtctgtgataagtcatgattacgctgttcctatagttagacctctattggcggttacaaaagatgaaatactagaatatgctcgtttgcaggatattgaatattgtgtggatgcgtctaatgaagatgtgaaatataatagaaaccgcattcgtcatgaggtaattcctacgctacaaacaattaatcccaatgtagtagatgccttatgtagactgggcgatattgctcaagttgatgaggcgtatcttaatggtgaaagccagcgtttatttacgcagttagtacgacctgtagataatggatttcaggtatccaggcgtcgtatgcgtacactaccgctcgctatgcaacgacggttgtggcaattgatgatacccagtgtttcattatccttagcgcatcaagaacaattggcccatatcatacgtacgggggaagctaaaactttcaccattcaaaaagttacaattaacgcgcaatgtgatacaatacatgtgtattgcaaatattagatatagatccgggaggtcttatatatgcatcaagatgtaaaagaaattttatactctcaagaacaattagcaactcgcattcgtgagttaggtgctgagattagcaaagattatgctaatgaatctgttgtattagtcggcgttttgaaaggcgctattgttttctataccgatttagctcgcaccatcgatgattcagtagatgtatcattcgattttatttcttgctctagttacggtgatggtacaacaagtactggtgtggttcgtattttaaaagacttagatcgctccgtagaaggtaaaaatgtactcgttgtagaagatattgtagatacgggcacaactcttcattatttattggataatttgaaggctcgcggcgctaagagtgttcgacttgctgcccttcttaataaaccggaacgccgtaaaatggatgtagatgtcgattatgtaggctttacagttccagattattttgttgttggttatggccttgattatgctgaacaatatcgtcaattaccatatattggtattttgaaagaatctgtttaccaataatgaggtaatatatttataactaaataatggcgagtatttgttcgccttatatggtataatataataatgcatatcattatgcattattaggttatacattacatgtgaaaggagtaattttttgagtcaatttagtaaaaaactcgtcctttacttacttatcattgcaattgccgttttcgctatagattcccttgcagggcagaatactaataaggccgaaatgagttataccggttttgttcaacaggtacaacaaaaaaaggttgaatctgtaacgattacaaatgaccatggaatcaaagggaaattaaaaaatggtacagattttgtgtcctatgctccatctgatgatacgttgattaaaacgttgacagataatggtgttgagattactgctgcaccacctgaacaaccttcttggtgggttagtttattgggttccgcgattcctattatcatccttgtggttgtgttcttctttattatgcaacaaacccaaggtggtggcggtcgcgtaatgaactttggcaaaagtcgtgctaagatgatgggcgatggtaatgtaaaggttaaatttagcgatgtagctggtgccgaagaggcaaaacaagaattgacagaggttgttgaattcttgaaggacccaggtaaatttacaagtattggtgcaaccattccgaaaggtgtcttgttagcaggacctccaggcacaggtaaaaccttattagctaaggctgtagccggtgaagccggtgttccattctttaccatttccggttccgatttcgtagaaatgtttgtcggtgtcggtgcatctcgcgtgcgtgatttatttggtcaagcaaagaaaaatgcgccttgtatcatttttatcgatgaaattgatgcggtaggtcgtcaacgtggtgctggtcttggtggcggtcacgatgaacgtgaacaaacgctaaaccaattacttgttgaaatggatggctttggtgccaatgaaggcatcattactcttgcagcaactaaccgaccagatattttggaccctgcattattgcgtcctggtcgctttgatagacaagttgttgttggacgtccagatcttcatggtcgtgaagcaatccttaaggttcatgcacgtaataaaccattagcagatgatgtagacttaaaaacgattgctaaaaagacacctggatttactggtgctgatttgagcaatttgttaaacgaagctgcattgttagctgcgcgcttaaataaaaaggttatcaccatggctgaattggaagaagccagtgaaaaggttagcatgggccctgaacgccgcagtcacattgtgagcgaaaaggatcgcaaattgaccgcttatcatgaatctggccatgccatcgtggctcatttattgccacatgcaaaccctgttcataaagtaacgattattccacgcggttatgctggtggttatacaatgatgttacccaaagaggaacatgattataagactaaagcacaactattggcggacatacgcgtagcacttggtggtcgtattgcagaggctcttgtacttggagatatcagtacgggcgcatctggcgatttacaaagtgtaacgaatacggcacgttctatggttactcgttgggggatgagcgatacgttgggaccaattgtatttggtgaacaacaagagcaagtattcctcggcaaaaatattggtcatgaacgcaactatagtgaagaagttgcaagtaagatcgatgttgaaattcatcatattgtagatgaagcatatcgcgatgtagaacaacttttaacagataacatggatttcttacacaatatggcaaaggctttattagaagaagaaactattgatgctaaggctgttgaaaaccttcataaatatggtactactaaggctcctgatgaaacagaagcgcctacagcaagtcatatggatgcggtgatttccatgcctaatgctactgaagaaactaagacaagctctacagaatctgatgtacaatcttaatacataattaaaaggggctacctttaggtagccccttttactgtatgtgaaatgtttctgttatgacaaatcggcttataggacaaaaagtgtgtgtgaaaacccttataacactagatatttactagtgttataagggtttaatctttttctggagaagtttgagggtggacaaaaagtgtgggtaaaaacatcaattaacccttgtaattactgattaaaatgaggttatatcttcctatatataaacaaatatggaggaagagtttatgcgacaaataaaatgtcctgattgtaatgaaacatgtattaaacacggtgttttaaaatctggttctcagcgttggttttgcaaacattgtaaggtggcatttaccgttaaaattaataatttaagtaaagagttaagcctattcttgaattggttattcagcaccgatattcaagctgatatgcctggtaaaggtcgtacattcaggcgtaaaaccgctaaattttggtccatatggccattgccaccaaaagtggaagaagtacatgatgtggtatatcttgatggaatttacttagctaggaatttatgtgtattgatttgttgcaatgatactcatgttctaggatggtatgtctgtcgttatgagcatgctagagcttggcagtgtttaatggaacggattgccgaacctaaagtcgttgtgtctgatggtgctaatggtttgcctaaagcattacgtaaagtttggcctcatagcagtcaccaaagatgcctgtttcacattttttgtcaggttagacgatatacgacaagtagacctaaaacgttagcaggaaaggacctttatactcttgctaaagatttatttaatgtgaaaacaatggatcaagcttttatatggattaataaactttcggcgtggcgaatgacatattctgattttttacgagaaatgacgattgatgaattcggaaacaaacgctctacacatgagcgtttgcttaaagctgaatcatcattatggcgtctgattaggcaacaaactttatttacatttttggaatgtattgatattacaatacctacaacaaataatcgtattgaaggtggagtaaatgctcaactaagaagtatgttacgggctcataggggcctttcacttgaaagaagactaaaagcggtctattggtggtgctatatgcactcaccaagaccgctttctatttcagatatattaaattgtatgcctacagatgaatcgattgctgctatctacaaacggttatctgattattgccaaatagatcgttcaatccctcaatggggtgatgctcctgtttggaatgagctacatatgtctacagattttccaacttattgggattagtcacacacactttttgtcctataaccctgacaaatccttttattgtccatcacaggcatgtctcgtagccatcaattcttgagtgcgttgaatcttacgtttttgaaggtatcgttgggctagtacatttggcacagccacaccgactgcgatacctacaatagatagaatgccagtagtcccgttttgtgccatatacaatagacctgattcgtttagtgagtttatgtgtaatatatcaaatagaaaacgatagagcaaaatgccgggcatcagtgcgatagctgatggtacgactagtaccggaccagatgttcgtagccatgtggagagtttgacaaagatgacgctcattacggctgcaccaatgaatgtagcaccgggtaaggcaaatccatattctaaaagcattagattacgaattgctacgcaaacgacaccgcctagcccgatatagggtaatagtcgagctggtgaattaaatagtacagcaaatgaggcggcggaaacaaaggaaccaataatctgtgctatagaaaaaatatgaggcttaatatccacaaagttaaatgcaggcaatggactgaagtaaagcgccatcgccatgccgagtgtcatgctgcccacgatgagtaaggttctaatagctcgtgttatgccggataaaatgtggttgtttatagtatcgataaccgaattgataagtggcacacctggaatcatgaagagtgtacaacagacgaggacatataccagtgatcctaactcgatgaaggtatagaaaccataggcaataaacatggccgtaaaggcgcagatagcgttgcctaaatattcattaaatccaaggcgctgagatacgaccctcataaaatagccacataatgaacagatgaatgttactactaatgcaataatatccgcactgtataagtaagctaaaccagcagagcctaatgcgcaagcaatgccttttgcccagactggatagacgggaatcgtttgttgtagttttccaactaaacgttcataggtagttaaagaataatggcgttcaaaagctctccaagttagttttgatacggcattaatcatagccatattcggtatatgaatcggcgtttttcgaaacactgttatagagcgttcttcatgaaatatattaatcataatcgttgtataactaatgtggatatttaaataattgtgtggaatccccataaatgtagcagcttgttgaatctcagataccatacgtaccgtgtcagcaccacattccattaggagtttagcgatatttaataatacatccaattttcgatgaatatggataaagggggtctctaggacctcatttttttcttctaatgtaaattgtttcattgatactccttaatttcatcatcctttactcattatactattaatggcctgtaatatcattcattaatctatttgtctacctaatggggtataaaaatctagattttttgcatttttttgaatgattatttattaaattgataaataacacttgctttttcaagggcccacttgtacaatcgaattgtaaaccgacaggagaaaggggccttatcatgcgtgatgaagtactagaattcttaagacagaatcaaggtgactttgtttcaggtcaagatatgtctgaagcatgtcatgtatcacgaactgccatttggaagcatataaaagcactaagagaaaagggctataaaattgagtcctatacaaagcgtggttatcgtttgttggaggaaccggatttgttaagcccattagcaatgaaacaaatattgaataccgatatttttggtaaacgatatgtatatatggatacaactgaatcaacgaatttagaagctcgtagattggcgcaacaaggcgctgaggaaggcaccgtagtcgttacagaggaacaggctgctggtcgtggtcgcttgtctcgtggttggtattctccctttggaaaaggcttgtggtttagccttattctccgacctgatttcccccctgcggaggctcctaaatgtacgttgatggctgctgtggcgcttaccaaggcgtttcacaaaatggggcttgctgatgcaggtattaaatggccgaatgatattttggtaaatggtcgtaagcttgttggtatattgacggaaatgtctggatcgatggaggaaatttcctatatcgttatgggcataggggtcaatgttaagacgaaacaagaagagctaccggaagaaataaaacaaatcgccacatctctcttaatggaaggcgttgatattgaacggacagaagctttcaaaatcatcttagaagaattagaacaccaatattacgatgtgctagatagtggatttgaggataccctaaatgaatggcgtaagttgagcgttactttgaatcaagaaattgaggttagagcaccggggaatacatatgaaggtgtggcaactgatatcgatgacgatggaaatttattggtgaaaacgactaatggagaagttaaacgaattgttgcaggcgatgtttctatacgtccgcgaaaataggaggaatgcatgttattagtaattgatgtgggaaacacgaatattgttctcggtgtttacgataagaaaaatttagtaggacactggagaatttctacagatcgtgtgcgtaccacggacgaatatggcatgttgatgatgaatttgttttttcatgatcgcaaggttaacgcaaaggatatcaaggctatcattatttcctctgtagtaccgccattgatgccaacattagaacgtgtatgcttgcgttactttaatgtaaatcctatcattgtaggtcctggcacaaaaacaggtatcgctattaaatatgataatcctcgtgaggtaggtgctgatcgcatcgtcaatgccgtagcggccaatgctgtatataaggggccgttgattatcattgattttggcaccgctacaacttattgtgcagtccttggaaatggtgattatattggtggcgttattacgccaggcgtaacgatttcagcagaggctctgttccaacgcgctgcaaaattgcctcgtattgaggtaaaggacccaggtcaggttattaatcgtaatacggtatcatctatgcaatctggtatgttctatggttatgtaggacaggtagagggcctagtgacacgtatgaaagctgaaatgggtggtgatgtaactgtggtggcaacaggtggcttggcacagctcatcagcagtgctaccgattgtattgaccatgtagaaccaatgcttacattggaaggtctccgtcttatttacgaacgaaataaataatggtactataatagagttggttgtaattatagtatgaatgtataacaacaggtacggcttaggctgtacctgttttattaggtgaattataatgatagaaacatggaccattggcaatgtacctatccaaggtaaggctattttagctcctatggcaggggttagcgatatagcatatcgactgttggccaaagaacatggtgcctccatggtttgtaccgaaatggtcagtgctatgggtatcaaatataaaaatgagcgcacgcatgagttattgcgtatggaagcggtcgagcatcctgtatcgatgcaaatttttggttccaatccagaagcaatagcattgggcgcgaaggtggtagcagctgctggtgcagatattgtagatatcaacatggggtgtcctgttaaaaaggtcgtctctagcggtgacggttcggcgttgatgaaaacacctgacttggcggctcgcgtagcagaagccgcagtaaaagctgttgatgtaccggtgacggtaaaaatgcgtatcggctgggatgatgatcatatcaatgtggtcgactttgccaaacgtatcgaaagtactggtgttgcagctgttgctgttcatgggcgcacacgggaacagatgtatatggggcgagcggattggtcctatataaaagcggttaaagattccttatcaatccccgtaatagggaatggtgatgtatggactcctgaagatgcgcttcgtatgatgcaagaaacaggttgtgatgcggttatgattggtcgtggtgcacaaggcaatccatggatttttgagcgcactaatcactatttaacgacaggtgaattaagaccagaacctacctatttagagcgactagatatgttgctcaaacattttgaactactctgtcggtataaaggggcggctctaggagtaagagaaatccgaacacatgcgggatggtatatgaggggaatgcctgaagcagcttattggcgtaatcgtgtgaatacaattcacactgttgaaagctttaaaacagagctttcaacctatagagatgtattggaaaactggggctcacattgacaaatacaggggttcttagtataattgattaaaaattaaagatgaaagataaggtgtcatcgtactatgacactttttctattatttatatgtagaaagattaggagaatctatggcagacgtaaaagaaacattacttacagccgaaggtttgaaaaaacttgaggatgaattagcatattataaatctgtgcgccgtattgaggtgtcacaacgtattaaaacagctattgaatacggcgatatcagcgaaaactctgaatatgatgatgctaaaaatgaacaggctttcattgaaggttatatttctgagttagaaaataaaattaatacagcaaaaatcattgatgaatccattaagggtgatgtagtatccgtaggtagcaaggttaccgtattagatacaatgtacaatgatgaattggaatatgttattgttggttcttccgaagcagatcctttcaacaatcgtatttccaacgaatcacctgtaggtaaagctattttgggtaaacgtaagggcgatgaagtagaggtatccacaccagatggtcctgttactttcaaagtgttagcaattcaataatttttcattttaacaaaagaggcgataacatgagtgaagaaattaaaaacttacaagaagaattaaatgatcaaatgcaaattcgccgcgacaaattggctgaatatgaagctgatgggatttatccatttggtcaacgatttgtcgttaaagatcatgcaaaagatattaaaaatgacttcttgaactacgaagaccaacctgtagtcattgctggccgtttgatgacgatgcgttcccatggtaaaacagcatttgccaatattcgcgatttatctggcgatatccaagtatatttccgtaaagatgtattgggcgaagacaattacaaatatgtaaaaatgcttgatattggtgatattgttggtatcgaaggtcatgtatttaaaactcatagtggtgaagttacaatcaaagttgataaattaacattattgtccaaagcattgcgtccattacctgaaaaatggcatggcttaaaggatactgaacttcgctaccgtcaacgttatgtagatttaatcgtaaacccagaagtgcgcgatacattcattaaacgttctaaaatcgttgcgaagattcgcgaatacatgatgaacgatggttttatggaagtggaaacacctatgatgcatccaattccaggcggtgcagctgcgcgtccattcattactcatcacaatgcgcttgatatcgatatctacatgcgtattgctcctgaattatatctaaaacgcttaatcgttggcggtatggaacgcgtattcgaaatgaaccgttgtttccgtaatgaaggtatcgataatcgtcataacccagaattcacaactatcgaatcttaccaagcatatggcgatgtagaagatgcaattcgtttaacagaaaatcttgtatcctactgtgctcaagaagtactcggtacacaagaaattacataccaaggcactgaaatcaacttaactccaccttggaatcgtatcacaatggcagaaggtgttaaaaaatacactggtgaagactttgatgcagtaactactgtagaagaagcgcgtgctattgctgatcgtttgaatgtagaatacacagaaaatgatggtattggtaaaatcttgaatgcttgcttcgaagattatgtagaagaaaacttgattcaaccaactatcgtatatggccatccaaaagaaatttctccacttgccaaagcaagtcgtgaaaacccattggctacagaacgttttgaagcgttcatctatggtcgcgaattggcaaatggcttctccgaattaaatgacccaattgaccaaaagcaacgtttcttggatcaattgaaagaacgtgaagctggcgatgatgaagcgcatcgtatggatgaagacttcgtcaatgctcttgaatacggtttgccaccaacagcaggtttgggcgttggtattgaccgtcttgttatgttcttgacagactctgcatctattcgcgatgtattgttgttcccattaatgaaacctgaaacatctcaagtacaagaagaagaaataactgaataattttaaacaaaaggctgtaacaggatgcggtaaaaccgtgttttagttacagcctttttgtgtgtcagtaagtagatatacatggattgttgtgtacaatacaccttgcttattaataattgttatcaacatatgaaaaagtttatacgactatattctataatttaatgtaatattcatcttgcataaaactcataacaagtagaactatatgtataatacgtataattacacgctattaattaaattgcataaatgttagaatatacataaagataaagaatacacctaactaaatgagatagctatcaattactaaaggggtatacatcttatatttatgtacataagttccattaattttaattacaactcttactttaggaggaacgtattatgaaacacatgaaggttgcattttctcataaggcacaatattactttggacctttagacggccatgaaagtgtagatttaagtcaaaccgattttactgatataggagcaatcgttattagtgaaagtgatacagctatcttagataatgaaactgtaaaatcttttggcatccctgtattcttagttgtttttgataattctgttgatatcgatcaattcatggggaaagtggaacgtgtaattgatggttctagtacaaacttcgacttatataaacgtcaaatcgaagctgctgctgacaaatatgaagaatctatgttgcctccattctttagagcgttggctgattatgtagaagaaggtaactctcaatttgactgtccaggtcaccaaggtggtcaattctattgtaaacatccagctggtcgcgcattctatgacttctacggtgaaaacgtattccgctctgacctttgtaatgcggacgttgcgttaggcgaccttttaatccatgaaggtccagcatgtgcggctcaacaacatgcggcgcaagtatataatgcagataaaacatatttcgtattaaatggtacatcttcatctaataaggttgtattgaatgccctattaacacctggcgatatcattctatatgatcgtaacaaccataaatccatttgccatggtgctcttgtaatggctggtgcaactcctgtataccttgaaacagcgcgtaatccattcggttctatcggtggtattttggaacactgcttcgacgaaaaatacattcgtgaattgattgctgaaaaagatcctgaaaaagcaaaagcagagcgtcctatccgcttagcagttatccaattaggtacatacgatggtactatctataatgcgcgtcaagttgttgataagattggtcacctttgtgattacatcttcttcgactccgcatgggttggttacgaacaatttatccctatgatgaaagactgcagtccattgctcttggaattaggccctaatgacccaggtgtattggtaacacaatctgttcataaacaacaagctggtttctctcaaacatctcaaatccacaaaaaagataaacacgttaaaggtcaagaccgttatgtaaaccataaacgtcttaacaatgcatttatgatgcatgcgtctacatctccattctatccattatttgcagcacttgacgtaaatgctaagatgcatgaaggcgaagctggtaaaaaactttggattgactgtgtagaaacagttatcgatgctcgtaaatctgtattgaaacattgtaaataccttcgtccattagtacctcctgttgtacatggtaaaaaatgggaagatggggatactaaagaaatggctcaagatgtggactacttcgcatttgaaccaaatgctaaatggcactccttcaaaggttatggtaaaggccaatactttatcgatccttgcaagttccaattgattacacctggtatcaacgtagaaactggtgaatacgaagacttcggtattcatgccaatattcttgcaaactacttacgtgaaaatggtatcattcctgaaaaatgtgacttgaatactattttattcttgatgacaccagcagaatccaaaactaagatggacgatttagtggcacaattgattcgctttgaagaattaattgaagctgatgctcctatgcaagatgttttaccatcgatttactatgctaatatcgacaaatataaaggctatcatatccgtcaattatgccaagaaatgcatgatttctacaaggatagacaagttagtacattgcaagaacgcttattcttacatgactaccttccagaatatgtaatgaatcctcaagaagcgaactttgaattccaacgtggtaaaggcgaacttgtaccattagatgaagctgaaggccgcattgctcttgaaggcgctctcccatatcctcctggagtattgtgtgtacaacctggtgaacgctggtccaaaacagcttgtgattacttcttagcattgcaagaaggcatcaacaagttacctggctttgctcctgaaatccaaggcgtatacattacaccacaaccagatggaactaaaaaagcttatggctatgtattgaaaaaagaatttgaaaaataacactattgtgtgccgtcagagtttctctgacggcgccacaatcaataaaaaggtggtaaaactatgagtacaggcaaaaataaaatgtccgtattgcagctgacaattttaacagctgtaaatatgatgggctccggtattatcatgttgccaacaaagttggcgcaggtaggtgctctttcaatcgtttcttggttgatcacagctgttggctccatgtgtttggcatacgcatttgctaaatgtggtatgtatggacgcaagggtggcggtatgggtggttatgctgaatattccttcggtaaagcggggaactttatggcaaactatacctatggtgtatctcttttgattgcgaatattgcaatcgctatttctgctgtaggttatgcagcgacatttgctgatgcaacattaacaccattaatgactggtatttatacaattttcacattatggcttgcaacagtattgaactttggtggtgctagtattacaggtcgtgtatctagctttactgtatggggcgttattgcaccagtacttgtaattagtactgtaggttgggcttatttctccgcagatatgtatgtggcaaactggaatgtaaacaacatgccatttggtgaagctgctacaaactccatcgctatgacattgtgggctttccttggcctagaatccgcatgtgctaacgctgatgctgtagataatccagaaaagaatgtaccaaaagccgttcttggtggtacattaggcgctgctgcgatttatatcgtttccactaacatgatgtttggtatcgtaccagctagcgaacttgttaatagtaatgcaccatttggtttagcatttgcgtccatgttcaatggtacagttggtaagattgtaatgggccttatggttatgtcttgcttcggttccttgcttggttggcagttcacgattgcgaacgtatttaaaggcgctgctgacgaaggttacttccctaaattgttcagtaaaattacatctaaagatgctccagtagttggtatggtaacaattactatcttgcaatcttttatgagtttgatgacaattagtccttccttaagtgaacaattcgaaacattggttaacttggccgttgtaacgaatattattccttatctattatccatgggtgccgttatcgtattgatgaaagctgcaaaacgtgctggtagtgaacttaaaggtacgacattcatcgcctttatcggttccttatatagcttatatgcattgtatgcatctggttttgaagctatgacatacggttctattgtaacctttgcaggttggacattatacggtttcgtatccgatcgttttgatttagaacataatattggtaaatagtaccattaagctattgttataagaactttggcgatactatctcctttgaatagtcctctgctattagaagtatagaattctaatagtggggggctattttgtgtgattttaaaaatactcaatattagggtataataaaataatataggtataaaagggggtaattatggatatattagctgcaaggcgttccatagaacaacgattactaaagcaatccgttgcattaatgtcgttggtggccgttagtggtactattatgggtgtaattactggttctagtgccgtattattagatggtatattttcattcatcgatgtaatcattaagattatgatgcttatgacggccaaattggtagcgcgtgaaacaagtaaacggttccagtttggatattggcaatttgagcctcttgtgctcgttgtggaaggattttttatcctattgattgtattatacgcattgattagtggtataggggatttactaaatggtggtcgccatgttgatttcggtatagctatttactatgctattttctttactatagccgatacagcatattatttttatgtacatcgcattaataaaagtttacaatcgaatctaatcaagtttgataatgtgagctggtctgttgacgcatggcttgaggcagccatcctcatcagctttatagctgctatcttgttagaggatacatcatacagttattgggcggtatatattgaccctattgttttgattgtactagcattacaaatgacaccatctgttattaagattattgtaccttctacaaaacaaattttgggatgggcgccttcatccttgcatgatgaggtacaagaaatcatggatcgttttatggaaaaatattcatttaaggattatgtgacgagtgtacaggcttatggtaactcgcgcatcatagagattgatattctagtgccaaagaagtttccttatcaaacaatagcagaacttgatcgtattcgaaatgaaatagatgaagaaatcggaggtaatcccacagagaaatgggtcactatctccttcactgccacacgtaaatggatggctaaggattatcttctcgatgaagaagatgatgaataatgctatattttatggtatacttaaatgtattaaaatactaaattgtacgacataatagaagaggctgatactatgttagatttgaaatttgtccgagaaaatctcgaattagtaaaacaaaatttggataatcgtcatacaaagggtgatcttgatacctttgttgctgcgtatgatgaacgaaaacaattgattcaaaaggttgaagaattaaaggcattacgtaattctgtaacagaagaaatcagccaattaaaacgcaataaagaaaatgcagatgataaaattgcagaaatgaaacgcgttggcgatgaaatttctgaattagatggtcgcattcgtgaagtagaagaatctttgcgcaatgctgcgttgatgttgccaaatatgtgtgatgcatctgttcctgttggtgctgatgaagatgaaaatgtagaacaacgtaaatggggcgaaccacgtcaatttgattttgaaccaaaagcgcattggaatatcggcgaagaattagatattcttgattttaaccgtgctgtaaaaatgtccggtgctcgctttaccgtatataaaggcttaggtgctcgtttagaacgtgctcttattaacttcatggttgatcttcatgttgataagcaaggctatacagaaatgatgacaccatatatggtaactcgtgaaacgttgacaggtacaggtcaattgcctaaatttgctgaagatatgtaccacgttgagaatacagaatactttttgattcctaccgctgaggttacattaacaaattatcacagcggtgaaatcttgagtgaagatgaattgcctaaatattacactgcatttactgcctgtttccgtgctgaagccggttcagctggccgtgatacacgtggcttgattcgtcaacatcaatttaacaaggtagaaatggtaaaactttcaaaaccagaagattcttggaatgaattagaaaaattgacagataatgcagaagaagtattacgcttattagaattgccattccgtgttattacattgtgtactggtgatatcggctttggttctgctaaaacgtatgacgtagaagtatggatgcctgcacaaaataaatatagagaaatttcttcttgctccaatatgacggacttccaagctcgtcgtgcaaatattaaattccgtcgtggtcctaaaggcaaacctgaattcgttcatacattgaatggttctggccttgcagtaggtcgtaccgtagcggcaattttggaaaataatcaacaaccagatggttccgttgtgattcctaaggggttggttccatacatgggcggcgtagaaaaaattatgcctgccaaataaggaggtcccatgaaattctttatagatacagccgaatttagtgaaattaaagatgcgtactcttatggctttatcgacggggtaacgacaaatccatccttgattgtgaaagctaaacgcgatttaaaacaagtaatcaaggaaattgctgatcttgtagagggccctgtgagtgcagaggtcattgctagtgatgcaccgggtatgattgaagaagcgcatgagcttgtaaaactcggctctaatgtggttgttaaaatcccaatgactccagaaggtttaaaagctgttgcagtgctttcaaaagaaggcattaagacaaatgtaacattgattttctctgctaatcaagcattattggcagctcgcgctggtgctacattcgtgagcccttttgtaggccgcattgacgatattagcatggatggattgacattaattcaagatattgcggatatctttgctattcatggtattaatactgaaattatcgctgctagcgtacgtacaccattgcatattttacaatgtgcgaaagctggtgcccatattgcaacagtgccatataaagtgttgttacaagctatgaaacacccattgactgatgcgggtttagaaaaattcatggctgattggaaacaagctaatcaataagtaatataaacatctttttaaggaggccctaaaatggatcgtactttatctttagaatttgctcgtgtagtcgaagcagctgcacttcgtagtggtcgtttgttaggtcgtggtcaaaaagacgaagctgatggcttagcagttgatgcaatgcgtcaagcatttgactctgtccgtatttccggtaccgttgttatcggtgaaggcgaaattgacgaagctcctatgttatatattggtgaacatgttggtgcaggcggtccagaagtagatattgcagtagatccaatcgaaggaacgaatttgattgccaaaggccaaaatggtgctattgctgttatggcaattgctgaaaagggtggcttgttacatgcacctgacatgtacatggaaaagatttgtgtaggtcctcgtggtgctggcgctattgatattacaaaatctttgacagaaaatattcaaaatgtagctgcaaagatgggccgtaaggttgatgaaatcaacttggtaatgctagatcgtgaacgtcattatggtttaatgaaggaagctcgtgatttaggcgctcgtattatgcttatttctgatggtgatgttaaccctgcaatggaatgctgtatcgaaggttctggcgtacatatggttgtcggtactggtggtgcaccagaaggcgtattagccgcagcagcacttaaatgtgcaggtggcgatatgcaagctcgtttgaaaccaggaaatgaagaagaaattcgtcgttgtcatgaaatgggtgtcaaagatgttaaccaagtattgacacttgatgatttggttcgtactgacgatgtaatctttgctgctacagcgattacacgtggtaacttattgaatcctattcaatacttcccaggcggtgctcgtacgcatactattgtaatgcgttctaaaacaggcactgtacgattcctagatactattcatagagatgaaaaattaacaacattgaaagctcgttaatttctttgctttcagtaaatagtctgtgtagacccctaagattagattgataatcttaggggttttacttgatgagaaagcctaaaaaatagtataataatcgttagtatataacagtgtgacgaatatggttatacatgaacataaccattttgatataagaaatgtaggaggaattcttttggaaaagctcgttattaaaggcggtaatcagctgaatggtcgcgtgcgcgttagtagtgcgaaaaatgcggtgttgcctattattgcagctactttattagcatcaacaccgagtaaattattggaaattccaaatttagaggatgttggtaccatctcccaagttattgagtctttgggcgttaagattacacgaaacgaagctgatgatgaaattatcttcgatgcatccatgttgacggctaccgaagctccttatgaattggtacgcaaaatgagagcatcctttcttgtgatgggtccattattggctcgcaaaggggaagctaagatttctatgcctggtggttgtgctattggtgcacgccctatcgatttacatttaaaagcgtttgaagcattgggtgcaaaaattgaaatcacagaagattatgtatatgcacatgctccagaggggttacaaggcactcaaatttacttggatttcccaagtgtaggggccactgaaaatgtaatcatggctgcttctatggctaagggtaaaacagttattgaaaatgctgcagaagaaccggaaatcgttgatttagctacattcttgaatgcgatgggggctaatattcgcggtgcaggtacgaatgtgattcgtattgaaggcgtagaatccctgcatggtgctatccataccgttattccagatcgtattgaagctggtacatatttaattgctgcggctatggctggtggtgatgtattcgtagaaaatgcattacctgaacatttgaaacctgtagtggctaaattgaaagaagcaggcgttaccgtagaagaagatattgacggtattcgtgttattagcactggcaaaggcttaaaagctgtagatattaaaacattaccatatcctggattccctacagatatgcaagctcaattcatggcgtttactactattgcggaaggcacaagtacagtaacggaaactgtatttgaaaatcgttttatgcatgttgctgaattgcgtaagatgggggctcatatagatattgataatcgacaagctatcgtagaagggatgcaatccttacatggtgctgttgtgaatgcaactgatttacgtgctggggcggctttagtttgtgcaggcttagctgcggaaggtacaacggaaataggtcgtttacatcatatcgatcgcggttatgatgatttagtgggtaaattgaaaaggttaggtgccgatattgttcgggttgacgaataagaacaaaaggccaaaacagaatacaaagaaacgaagccggcgtaaacaagtgccggctttgcgtcgcagtcaagataatgatgcaaaagctaaaaaagagtcggttgtagagcgcacttcgcgagctgctatggtcaaggtaacggaattacgccgtaaagagcgccgtcaaaaacggacgaaaccgattgccaagaccactccagctatgacattgaagcgtattgtatcccctcagaatgtaggagaaacggtgtttaaatttggtcgttcccttacatttgatttgggtatcgatttaggtacagccaatgttttaatctatgtcaagggcaaaggacttgttctagatgaacctgcttgtgtagcgaaagatactcggactggcgatgtattagcagtaggtgaaagcgcacgtcgcatgattgggcgaactccaacgggaattgaagttatacgacctgtgcaggcaggcgttattgctgattacgatatgacggaatttatgctcaagtattttattcgttctgttgttcctgcatctcgtctcatgaaaacacgtatcgttgtttgtgttccatcggggattactcctgttgaaaaacgtgctattcttgaagcattactacgaactggggctaagaagacggttcttattgaagagcctttagcagcggctatgggcacaaatttaaatgaagcggataaggttggagctatggtcgtagatataggcggtggcactacggatattgccgtcctttgtgatacaggtgtcgtagtgagtgaatcgttgcgtattggtggggactcttttaatgaggctattattcaatatgtacggcgcaagaaaaagcttgtcattggtcctctaacggcggaagaaataaagatatctgcaggcactgtagaccggcgttctgaagagcgagaggtagaaattcgagggcgtgatgttattagcggtttgcctaagatagttacattacattcgctagaaatacagcgtgcattagagtctcaagttatgagtattcttgaggcaattaagtctatattagaaaaaacgccacctgaattggtggctgctataggcgatcatggtatcattcttaccggtggtggggcgttgattagcgggcttgaccgtgttatttctcgatctgttggcatagttgcttatttagtcgaattaccaaggtatgcggtaattaaaggggtagcaaaaacattagatgaaatgtcatcattgcgagatacattagaagacttacaatagaattagaaaagctgaggtgggaaaccgtctcagctttttgtattattgcgagaaatagtgtatactacaagtgaatagattgtataaaattaataataaagtataatctgatttgagttgttatatctagttctgatttataacagaatacgttaacatacagaatttataaactctctatatattgtaaaggagttcgatgatgatacgccttaaaacagccgctataatggcatctattatggtaacaactactgttactgcttgtgccggtgatttgacagccgtgcgagtatccgattatgatggcgcaagccgtattgtttttgatatgactgaattacctttatcctggactaagtcatataacgcaaaccaaaatacggttaccttgaacttagccaatacaactaataaaatttccaatgccgcagagcgtacaacacataagattggtgtgttaaagggtatgtcctttcaacctactaatgatggtttacaagtgagactatctgccaatcaatcgattaattaccatgctttcaccctatcaaatcccaatcgtgtggttgttgatttgttttcagattacagtcagaagacaacgaaaagtgtaggtgcatcgattcagactgctaacataaaaacagcagttaacgagggattgattcgcgcttatgcgatgacagttaacaatgatgcaccaatggtggtagcaagtgtgcccggtggaaagcctttgtcctcgatttcacagcaacacattgctgctgtcggtttatccgttccgggaaagagctttgataaaccgtattcggttagtgcatctggtgaggtagatttaaatcgcattcaatccgttggcgttcttcgctatacgccaagtagagggtattttatagaagagaagaaaccattgttgcaggctaagacacctaaatctacgttggtgattaccactgtaaatggtccacgtagaaataatgctcttacgctatatacatctagttttggtgaaagtacaaatacaaatgaattcggttatgaagtgacagtaagtaatgggaaggttcttaaggtgggaaatggcaattccgcattagggaacaatcaatttgtattgtctgctcatggtgcggccatagcttcattaaaatctttaaaagtgggcacgcctgttgtattacaaccacgtcaggaacttgcgaaggtagaaactgctggtggcgctatggttgaagggggcacactggttttacataatggtagttatgtgggccctaaagattctacgaatcgtagtcgaagttttatcggcacaacaaaggatgaaaagctcgttgtagccactgtagataaacataatgcttcttctgtaggtgttacactagaagaaggggctaatctattgacctctttaggggctatcaatggatttgaattatctaatcaaggcagtgttgatgtagaggttgatggccattatactcacaaaggtaatgaaacgcctagtacttatgaaaaaatacttataatcaagtaatgagttgcatacaattttgtttgaaaaaaagctagagatttagtataatatctttatgtattctattgtaaaaggagggatcgttatgaaaaagacacttttagccttagctgctttaacagcattaggtattacttctgtaatggcggcccctgtatcataccaaagtgtattaacaggtaaagttgcttctactgttgctgttggcacttctgttacagaaggtcaaacattggtgactgtagaaacattggcaggccctatggcggcagctaaatccacggtgaatggcactgtgactgcagttgatgttacagtaggttcagatatttctcgtgatcaagtcgttgtcactgtagaaagcaaataaaggagataggaatgaagttttctcattcttggcgtcggtatagaaaaacgatactggcgcttttcttctgtagtgctctatcatcggcacaggcagttgattttatgcctgttcaagatgtacagactggtatggaaggtatagcaaaaacagtaatagtaggggatacgatatcgaattttaatgttaaggtattgggcgttatgaaggataaaggcccatctggacatttaattcttgcaaagttttctggccctgttatggaacagaccggtggcattgcgcatggtatgagtggtagtcctgtatatattaatgggaaacttgtaggtgccgtagcatatggttggggctttgctgatggcacgattggcatgataacgcctatcgaagatatggtgaaattatggaatataccgtatgaaaagaatttgacaaatacttggtcagacaaacaattaattccaatgaaaactcctttgatggcctatggatttgatagtacatctatggagtattttaaatcaaaattaccacaatacaattacgaaacctatgatacagctagttctagtagtgatgatattgcaaagccgttagaggctggtggttctgtagcagcgttattggttgatggcgatttaaaactcggtgctattggtaccgttacctatgttgatggcaaacaaatggtggccttcgggcatccgttcttgaaacatggttccgctaattattttatgcataatgccaatatttttacggttgttaaaagttatgaatccgcctttaaactaggttctatgggacgtgaaatcggtaccgttactgaggaccgtggcgcaggtattgccggtgtctctggtactatttctagtgggattccagttcgctttcatttaaaagatatcgatatgggccgtgacaagcagtctaatgtaaaggttattgaagataaggatatgacacctacattggcggctacagcactgtataatatgttgaataagacattagatcgcagtggtgccggtactgctaaaattacctatacgatttcaccacgtaatggtgaacaaaaatcattaacgcgaaccaatatgttctacagttctgaatctattagtgaaaaaacggttgatgagttttacaatgttatcgatgtattgatgaacaatcgctttattaactatgaaattgcggatatcaatgtggaaacagaggtaacacaagataagaaaacggcaaaacttgtagatgcagctgcatcatcgacagttgtatctccaggggatacgattgtagttgacgttacattggaaccatatcgtggggaaaaagttaataaagaggtattcttcacagtacctaaagaccaacctttaggtaaatacaccttagaggttcgtggtggtggcgaaatcccattgccttatgtattggaaaaacaaaaatataatttgactgatgaagttctacgccgtttaaaagtttacaaagactttaacgatttgtttgatgaattacaaaagactgatacgaataatcaaattgttgtagaaatcttagaagatggcgttagtcttgtaaatgaagaggcttctacaagttctgtgaaaaaggtaaaacttcaaggtgtagaagataaaccaagccctggagatcttaaaaagaaaaaaggtagtgaagaccttagcgatggcaaagatgatgaaaagaaaaatgaaaaaactgctatcgacacagagtatattgttcaaggtgacggtcaatttacaatccaggttatgagtgttaaagaccgtgataaagcattagctaaacgtgctaaagaagctaaagaacaggttaagatggaacataaattggaattagaagatcaaggtaataaaaaagattccaaagcatctcaacataaaaaagacaagtctgttaataaaccatctaaggaaaaaccatccaaggataaaccagcaggtgatgcaccttcgaatgagaaaccatctaatgataaaccttcaaatgatccagtagagtaaaattcgaaatataagcaaatagtaagggggactgttgtgaattggcttgagacgataggccgcaatgtaatggccggcttatcgaatgtgggtactgctatgctacttctatggcagaccataaaacaattaaaaatgctcaatgcatggcatgtgctacaacagatggctcatcttggcgtagactcactaccgattattagtctgacactattatttgcaggtggtgtaatgacattacaaataacagatgtgttaattacctatggtgcacaaggtacggtaggcggactcatggccgttgcgatgggacgtgaattaggacctattcttgtaggcgttgtattagcaggccgtgtaggggctgccattacggctgaaattggtacgatgaaggttacagagcaaatcgatgcattacgcgttatggctgtaaatccaatcggttatctcgttgtacctcgcgttgtagcctgcatgattatggtaccaatcctcgcattttatggcgttgtcattggtattgcaggtggttattttgtagctactgctattaaggggttagcaccagccacctatttagattcgatacaaatgttttcaaccatttctgattttacattagggttaattaaatctagtgtttttggtgctgtcatcgctcttgtagggtgctataagggaatgcataccaagatgggggccgaagctgttggtttctccactactagttctgtagtaacaagtattatcttagtatttgtattaaattattttttatcaactctactcttttaatcgattatctcgaacgagggctttatgattgaattacgtgatgtggttgtagcctatgacacgcgtgtaatattagattctgttaatctgaccattaaagatggggagacgcttgttattttgggtggtagtggtagtggtaaaagtacgctattacgcttgattataggtttacaacgccccacatcaggccaaattattgttgatggtgtagatattactacattatctgaagaagaatttaataaggtacgtcaaaagatgggcatggtatttcagtactccgcattatttgactctatgtcagtaggggagaatgtcgcctttggactaagggaacataccaatctgagtgatgataaaattcaacatattgttgatgagcgactcggttgggttgggttgagcggatatgagtcttacatgcctaatgagttatctggggggatgaagaaaagggttagtcttgctcgggctatcgctcttgatccgacgctcatcttatacgatgaaccttcgtctggtctagaccccattacatcgggaacgattagcatgctcatccgaggtatgcaagaacggttgggctgtacatctatcgtagtaactcatgatatgcaatctgctttttatgtggctgacagaattgcattacttgataagggaaaatttatagaagtatctaaaacagaggattttaaaaactcacctaatcctaaagtacaacaatttattcatggtgaggcggaggctatcgatatcggaacaaggagagacagataatgaagtggacgacggaagctaaagtaggggctttcacaattgtaggtgttgtgttgttcgtgctgggcatcatatttgtggggcgtatagacgtatttgcaaaacctcagatgacgattaccggtgattttgctcaagttaatgggttgaaaaatggtaatcaggttaaattttctggtgtcgcaattggtacggtttctgatattgaaattacaccatctggtgttttggtgaagatgaaagtcgatgataaaactcaaataccaagcgattcaacattttccttaggatctgatggattcttaggggataaatttattcaaatttcacctggtaaatcaaccgtatatttacatgatggtgattccgttaaaggtgaaggggttgatgcgatggataaagccatgcaaagtgctcaaaaattaatggctggtacagaacaaatgttgcaatccattaataatattattggcgaccctaaaacacaagacgcattaaaacattcgttgcaatctacggctgtcatggctgacaatgcggtagcggttacacaaaatatggcagatgtgacggctcagctaaatcaagcggctcaacaatttaatgctgatggtaatgctggtaatgacatgcgtgctatcttgacgaatattaaacaaactacggatcgtgttgatcacatggcgcgttccatggaaggaaccgtaacggatccaaaagcacaagaaaatattaaagcaacattgcataatacggagcaaatttctgctcgtgtcaataaattgttaggtggcaaaccatatgcatctgaaaccgttaatggttcctcggaggctaatggttctgaaaaaaagtcatctattaaagtagaaccttctgtggatttactttataatacaaatcaagaagaggtccgtatcaatggtcgtgctcgcgtttacacagataaaggcatgggtgaatttggactttctaatattggtgatgataccgattttgatttgaatggcggtaaatttatcgcaaataaatggttagtacgcggtggtatttttgaaagcaaactcggatttggcattgactataatccacgtgggtcttttggtgtttctgcagctatgtatgatttgaatcatcctaaatatcgactacgttctgatatacgcttacataataatacgtatggtgttgtgcaaatgacacgtccatttggttcttcaaatggaggcacctactttggtattaaacaagtcttttaaaacacatatcgtgtggaggtatacgtatgaataagaaggccttttctttagccataatattatcgatggctacaacaggtgcattcgcaagtgacgttgtttctacatctgtcaataatggtgataaactcacaaaacttcaaaaagaagctattcaattaactcaacaacaattagctcaaaaagcttctcaagatgcacaacaatatgaagtcgcattaaacctaaatgaagatagcacagtttctcttgcactggctaataaccgcacggcaaaacaatccttgtgggattatcaagctgcaaaagccacagtaagtgctacagcagcaggaaaaaatcctaatgtatcctatgcatggcaaggcgctcgtaatcacggtgccaatactatgacggggagaactgttactagtaagactggtcaacatagcttcactattaaggcccctgtatttagccctgagttagatgctaatattgataagtctcgctttgctcgtgaaggtagtggtgctgcttatgaagaagctttacaacaagctaaatatgatgctatcaatggatactacacattgattatgtatcgtaacaaggtagacgtagcaaaccaagctgttaaggattaccaaggtcatgtggataatgtaaaggctcaatataatgtaggtcttgtagctaattctgatgtattggctgcagatactaatttggctgactctcaaacaaaccttgtaaaagcgcaaaatgcagcgaatttagcggaagcaaacttgaatttggtgattgcatatccaacacaaacgtctattacaacagcagaacatgatttgcaatacaaaccatatgctgttacattagaacaagcaaaagcgtatgctatgcttcatcgttctgctcttgtacaatctgcgatggctgtaaaacaagctgaagagggtttaaaagctgagaaagctggttatttaccaacagtaggtgtcgaagctggccgtggctatgctgatccagatggctactttggtacaagcagtaaatcttggcatattggcgcatccgctacatggagtttgtgggatgggggccaaacacaaaataaaattaaggttgctcaagatacattggaaaaggctaaggaagctaatttagcggctgttgataaggtaaatcttgctgtgcaacaagcataccttaacttgcgttctgcagaacaaacaattcaaagtacgcaaacagcagtacatcaaggtcaagaaaacttccgtattgcaacacttcgttaccgcgctggcgtaggcacaaaccttgatgtactcgatgcagaaactaaattgactgaatctcgcaataattatgtagatgctttatataattacaatgtaagtatttctgctcttgaacaagcaacaggcatccctttggatactcctgtaggtcaaggggcaagtattattgctaatagtggtgctgtagaacaattagcagcattagcgacagctacacctgcaaaaaaataatcatagagataatatacactctatttacaatgacgattgcttcggcggtcgtcatttttttatcgttgaatgaactgtattacattttgatttcataaaatttatacatcatatactattgaaatatcatagagtatggtaatattgatgtataaataagcgtaatttttttaggtgtggggtttcctatgacaaggaaaaaatggtgcctaattggtgcagcagttttaggattgggtgtagctggaatagctactaccatcaatccaattgcagagcgatatgtggcgcccatggtacaggaacaactacataatacagttagaggtacaattcagtatgattctatgcacatcgcttggaatggggatgtagtactgcaaaatgtatcattaagggatgaaaatgatcatttggtagcggccgttccgactatgaaggtatcaatgaaatggacatctgctccatctattttgatggggaattcaagtggtgcagccatcgtttctaccattactttagaaaaaccggacgtccatgtgtggcaactagctgatggatcttggaatgtaaattctttattggagtcatcctcaaaaaatgataagaaatcatttgatggcaatatcgtcattaatgatgctacaggtgctgttcgatttaaagatggcaatgtacataggctatccaatctagatggaaatatagccttaaatgttgatggtatgacaaaaggggcattaaatggacttttagatgaccattcgatcgctgttaatggctctatcgacatgaataaaatggatgattttgatttgtttgttcgagccgagtctgttgatatatcaggcattatgaatatggttccatccaataaaaatctctctataacatctggtatattacatgatgtaaaagcgcagattacggggcgtgatggcaagtattctatgtctggtaatttagcctttgatggcttaggtggtacctataaaaacgggtctactacataccaaattggacagggcaatggtaagattttcttccaaaataatactgttttaatcagtcatagtggctggtatgtaaacgatcaagccgttaaggtgaatggtttggtaacattaggggatgaggttggtttaaacttaaatgcggttgctgattccgtagctttagaggctttcaccaaaaatcaaattactggtaacgtaggtgcccgtgttcatatcggcggtactagtgttaatccctatgtatctggttctataaagagtgatgccatctcgtatgatagctatcatatcgatagtggagaggctaattttagttatttcgatggtacagtggatattcacgatgcttcgttatacattggtaatggtagcgtaaaagccaaaggacaatacggcattgatagtggtgaattttccattgatggtacgattcataatgcagaaatagctccatttacacaaaatttatctacacaggcatctggtattgtgaatggagaattttctgtaaaaggaaaaaatagtgatattacctccatagaaggtaatatagtgggaacgagtctatccgtgcgtggtatatctattgattctgctagcgttagctttaataatgtaggcgccttgacaaatatagccgttacgggggcgataggaaatggccaacttagtggatatggaacgattgataataatctattgaatctatccttgtcggcggattcattagatgcatctaatttttcaagtcttgttggtaatagtatatctggcaatattacaggccatgcttctattacaggcaatttagataatccatctgtaacaggtagtgttacaagtcctgagattgcctatagtggggctcactttaattccattaatgcaggctttactattaaaaatcatatattagaattaacagatacatctataggtgatggagatggcgccattactatagggggtacatttgatttaaattctaatgcacttaatatgcgggcacgtgctaaagctgtccggatagagaacttgattaggccgttttctgatgttccgcttactgggtggtttgaatctgaaaatgagattcgtggtactttagataatccatatgttcagggccatgttcatttatatgatggttcttataatggtaaattgattagtgatgcaaaggcagattatacattagaaaataagactcttacattacctaagtttactattcaaggatatggtgctgtcattcaaggttctggtactatgtcagaagatgccctaaatatcgatttagaaggtaaagatatagatattggtaggttattagtcaatactgattatgatgtaaaaggctatgtacaagctaaggggcatattggaggctctttatacaatcctaattttaatggatctgttacatctaacttcttaactattaatggcgaaggtatcaccaatatttctggtacattatatgcagatacaaccgttgttaatttagaaaaatttgaatttgatgaagaacaaggtggccattatatggcccgtgcaggtatgtctactgtgggcgataagcgactatttggtacattacaggtgacaaatggtcgtgtaagcaatctattatctttactggggaaaccggtggataaattagatggttctttgagtggtacagttgatttaggtggtacctatggcaatccaagccttaatgtggtgggttcaattaaggatgtaaccattgatactaaggtagtaggcgatgcaaagatagatgccagtctagaaaatcgtaagtttaaaattcgaacattaaaattacctgttgatgatggacttattgctgctggcggtactgttgatttagatggtgatgcagatttacaaattgcagttcgcgatgttgatatagaaccattcttaccgcttattggtgataatattaatgcaactggttccgttaccggtgttatcaatatgacaggggctacacaaaatcctaaggttgaattgtccgcgagccttgccaatggttcttataacggtatcgatattgatcaaggttttgtattggcaaccatggaaaatcatgttattaacgttcaacgtattcaaggggttaaagaagactataagctaagtgcatatggcaagattcctctagccgcgttgtatacgactggatatctcgatgcaaatgattctaaagcgatggatatgactattgactttaatgaggctgatatggctgttatccctttgattactcctacggtgaaagacgcaactggggcattaaaaggtgttgttcatgtaacaggaactattgatcaaccagaagcgtacggtactgtatctgttcgcaatggtaccatgaagataaagaccataggtaatgagtttaaagatattgatggggatttaattttctcaggtcaacaagtcgatttccaatctcgcgtgtctgctggtaaagggagcgctggtttagcggcaaagattaactggtcgggacatacgatgactaattaccgtgcagctattcaattggatgggttagatttagcaaacgagtatatttctggtccattaaaaggggaactctatatagctgaaaaagagggaattcctacattgatgggcgatttaaatctagagaatatgaagttcaaaattccactttccctagaaactagtgaaagtacgcgtaatttgggtattgatgttaatgtacatgctggtaaaaatgtacgactttatgatagatccttatatgatatgcgtattagaggggatgttcattttggaggatccgttttcgaaccttcagctagtggtcagtttaatgtagtaagtggtacttttaaatatctaagtcataccttcgatattaataaggggactgctacatttgcgacaggatcgtatctacctatgcttcagcttgatgcggaaacaaatataggtacgtataatatccagctcggtgtgaaaggtactgtggactatatggatttaacgcttaaatcagaaccttcattgtcgcgccaacaaattatttccatgttgacctttggtcgcggtgagccgtcgaatagtagtacaattaccaatgaagatgcaaatgcattagcagtagctagtgcacaaatgtttgctttcgggtatgtacaagatgcggtgcaaaatgcattgggcctagatcgtgttaatattacgacaggctccatagatccgaatgaacctactagtagggacacatcaggaaattataatattgaaattggcaaatatgtcttgccgagaacgatgattacctatacgcaaggtatcaataataaacaaaatagatacggtattgaatattcgttacgacgaagtgttaagtttaatgcttggcatacatcaaaaggtagtacctatattggtggacgttggacacgagagttctagcgatgatgactataatgaagaatctgaataaggaccttcattatagtcattttaatttcataaaattgaattatagtagtactaattcccagtattatatgatataataataaagatttaatactctttaaagagggataattttaggaggattttatgttaacaagcaaagcctataaacgtatgctagcagcatctgtgttgactgctgttatgggtactggcagtgtgtttgctgcagaagtacaaataggctatacaccagatatgaatgcaactgctacagcagatactgcaactactgatgatacaacgactaaagcagctgtatacaatgctggtacagaaaagggtgctaatacacaagataatactgatgcggcaattttagctgctcgtggtgacactacattatccactgatggtactgttgtacaaggttctgatggcacagttaccgttaataacggggctttaaaaacagacgataaacaagtaaaaatggtttccaaaactacagcaggtacagacttggataaggttgcagaaaacggtcaggcacaagccgtaacatctgttgaggctcaatacgttactgctgttagtgctgattctgttaacccatttgtaggtaaaacaattacaggcttatctatctctggtattcctgcagatcaagcggcgcaattaatgacattgttatctgaaaaggtaggcgatgctgtttccgttgatggtgtatttaaagatgtacaaaatttgggtaacagtggctatttctcagaagtgaaccccgtctttacatctgttccggaaggcgtgaaaattgactttgctgttgtgactaaccctgtagtacatggtgttgtgtttgaaggtaattctgtatacacatccgatgtattaactaaatatatggcaattcctgaaggccaaatcatgaactccgtatatgtaggccaaaaggtacaaggtatcaatgcagcgtatgctcgtgatggttatatgttagctcatgtagacggtattgctgtagatgacaatggtatgattcatatccatatcgtggaaggcattgtagaagatattgtaccagctggtaataagaaaactcgtaacaaagttatcactcgtgagttcgtacaaaaaactggtaaaccattcaacaagttcttagttcgtcgttccgtagaacgcgtgtacaacttgggcttctttgatgatgtaaatgtacgtatgttaccaggtgaaaaagatcctaacaatgtaattattgaaattgacgtattggaacataaaacaggtacaatcacattaggtgcaggttattctaaatccgatggcttgatgggtatcgttgaatttggtgaagataaccttcgcggtacaggtgataaatttaaagttcactgggaaatcggtggtaagaagaaatataaaaactaccaaatttcttacttgaaaccttggattgaccacagaggtacttctcttggattctcctttttcaaccgtgaagatgaatacactgactatgatagcgatggtagcgaagtagcagaatacaacaaaaaatccaaaggctttaatatctcctttggtcgtcaaacaggcgaatatacacgcgactacttaacacttgaatcccgctctgataaatacaaatgggataatgacgatagctctggattccgttatgatgcgggtactggtgcaggccctaataatagatggaataacggctcatatgattttgccggcatggattatgtaggtaaaaactttggtcgcatcaattccatttcatggcaaaaggtatatgactcccgcgataacatttatgaaccaactcgtggtcgtcgtatttcctacactgcacaatgggctggtcatggcttaggcggtgattttgatttctataaattcacagctgaaatgcgtgcatacaaaaaagtaggttccaaaaatgtattggccttccgtgcacgcggtggtttcatccaaggtgatgcaccatatagccaattgttcacattaggtggcgcagatacattacgtggttacgaagatgatcaattccgcggtaaaaatatgtataatgcgacattggaattccgtttccctatcgtgaaaaaggtaagtggcgtattatttacagatatcggtgatgcttgggatgctcctaatgttccttggtataaaaatactaagagctttaactatggcgttggtgccggtgttcgaatcactacaccaatcggtcctgttaaactcgactatggtattggcaaggataagaagaaattccacttcagcttcggtacacaattctaatattgagacatattatggtgaaagcaccttctatagagggggctttcaccaatatctctattatggcactcatagtgcgtagattaacagaaatgaggaatgttcattatgatgagaatgatgaataacaagaagaatgtgaaaatattctccattgttattgccgcaatttttattatcggtattggtgcgttagcctatactcaaatggctacacctggtactagtgctgctagtaatgtaggtgtaattgatatgagccgtttggataatcctgaaaaccctgtatatgtaaaagctgctaaggaatttactgattatcgtagtcaagtagcagcagatatgcaagcaaaggtagatgctgctcaagatgatgctactaaagctaaaattaagcaagaagcacaagctaatgtagaaaagaaaatggaagaaatgaataaacagatggctgaccaaacaatggaagcagctaaagctgttggtaatgcgaagggtttatctgtagttcttcctaaagatgcagttctttatggtggtgtagatattactgatcaagtactaaaaaaactagcatctgatgcaaaataataatgatacaaaggtaatcagataagggtgagcagtatgaagctaaataaacggtatataggattatttctgtttttagcagctgcactgattgcgatgtatggagcctatggatttattactaatcggcaatcttcagaagggccatctattggggtcgtacaaattgatgatgtactagagtttaatccgtcttatgaagattataagaatgcaaaagcagagttggaacagcttaaagctcaatatgccatagaacaggaggcgttgaataccaagtctgatctgcagaatgaacaacttaaatccttgtctctagacccgacattgtcggatgcgttaaatattgaattacaaacgcgaatcgctacaaaacaaaatcaacttaatgcacagctagatgctaaacgggctgaactggtacaaaaatacatgaaagagctcaaagttgctaacaagggatatgacttggagattgtaaatctacaattacaactatatgcttttgatagccgtgtttatatcgatgatgcgcagaaagaagcggctcaggcacaaaaagctgaattggaaaaccgacttcaaagcttgctggctaaacgtaaaccatccaattttgatatggattctatacgggctaaagtagatgcagaattaaaacctatccgtgatgcaggggaacaagaacttaaacaatatgccgagtctgtacaagctgaactagcaaagaaacgcgatacaatgatgcaaaatcaagctaaagcgattgtatcgacgaataatttgccagttcctcaagagtggaacgatagttgggcaaagaaattatcggataaagaggcagaggtaaatgcacttcatgaggctattttagaggatgtgcggatgcgcgttgctattattgctcaagaacgtcatttagaccttgttttgattgatcatggtggaaatatcaaagggctagatataacagatgctgtgaaagcgtcatatcgagttcagtaaggagtatacgatgaataagaaaatgaaatctttaattttaggtgcaacaatgattatggcattgccaattattggtggctgtggtagcaatactattggttatgtggattcccaaaaagttgtgacacaaactgcgaaatctattgagattaacaaagaaattaatgcaaaaggtaaagaacttcaagccaaaatcgatgctgctgatgaagcatctaaagcgcaagttacgactgatgcaaaacaagattttaatgctttcacaactgcaaaaaatcaagagttgaaacaatatatcgatcaacaagttaatgaattagctaaagagaaaaagctagatgtagtattgcttaaaggtgctgttgttggtggcggcgtagatgtaactgatgacttaatcaataaaatgggcaaagcatctgatgaagatattaaagctgcagaaaatgaagcgaaccaacaagaagctcaacaagcgcaacaaggtgatgctcaacaaggtgaagcccaacaagcgcaacctgctgaagctgcgcaatagtttagttaacacttgggggggacttaatagtggaaaagaccgtactggagcttgctcaacttattggtggtaaggtggttggtaatgaatcgttagtaatcacagaaacacgtggctttgaacaagcggcacctcaatcgattacatttgctattggtgaatatgtggaacacattggtttatgtaaagctggtgctgtaattttagagcaagaagcgcccaatgcaccgatgacacaaatcattgtagataatgcaaaggttgctttcgcacaagtattacaattatttcatccacctgttgtaataccacgtgaaatccatcctactgcaatcattggtgagaatgttaagctaggcgataatgttgctattggtgcctattgtgttatcaatgataatgcagtgattggtgataatgttacaattcgtccatatgtttatattggtcataatactcgtgttggtaatgattgtgatatatatactggcgccgttgttcatgaaaattgtatattaggaaatcgtgtcgtattacgcgccaaagcggtaatcggtggtgaaggctttggttttgctactgaaaatggcgtacatacgcatattcctcaagtaggtaatgtcattttagaggatgatgtagaaattggatcctgtacaaccatcgataatgcaactatgggatctacattagttcgaaaagggacaaaaattgacaacctagttcacttgggacataatgttgaaattggtgaaaactgtttcctcattgcacaagtgggaattgcaggtagtacgaaatgtggaaataatgtaatttttgcaggacaaaccggttgtacagggcatattacaataggtgacaatgcaaaatttgctggtaaaactggtattactggtaatgtaccagcagatgctgttatggctggttacccaatgcgtcctcataaggaatggttaaaactgtccgcttatgaacatcgcttaccagaaatggtaaaaactgtaaaacaattgcagaaggaaatcgatgctttaaaagcgcagcttaaggagagctaatacgtttatgtataggtttatgaagttgtttagtgcctttatttgcatgttgcctcatagttggcagtatgcaataggtacattgcttggtgaaattgcttggcttgctgtgcctcctaaacggaagcggttggcaatcgggcagattttgttttgtaaaatcactgatgatcctgttgaagcaaaacgaattgctaaggcgagtacgactcgatttggtcgtatgattatcgatgtattgagataccctgaaattaaagatggcggctataaagatatggtcaactttaccaataaggatattttggatgaagtcttagctgatggcaagggggctattctggctgcccttcatagcggtaactgggaattgcttggaggtgtactggcttctgaagggtaccctctaatttctgtagcgctaaaacaaaacggcgatgcagataaatttatcaatgaatatcgtgagcttatgcatcaacatgtgatgtataagacgagtgtgcgcgatatggtgaaagctttaaaaagcggtgcttttttagggttgattatggatcaggatcctggagaaaatggtgtattggtaccattctttggttatgaaacactaacagcagatggtcctgctgtattagggcgtatgcaagatgtacctatcatctttgtgaccatgcactatagcccttatacgggaaaacatgaacttgaagtacatccaccattatatgtagaaaaaacagatgataagaaacgggatgtagcaattactacgattaagctcaatgaatttattgaggattatattcgtcgttatccagaagattggttctggctacataatcgttggaaatggactcgtcgttactacggtgacaagattgatactccaccagatgtgtttcattaaaaaaatataaaaagtataatcggcgttgcagatgtcttaaaataaagctttgcaatgccgattttttacatctagtcagttgataaatagtcctatattcttgtaacagctatgcaaatagggtataatacagtatggtgtatagtagacatggaattagattatgaaaggacattcttatgagtaagccccaacaaacaattaaacaggctatttcatataagggaattggccttcatagcggggaacctgtaaccatggtttttaaaccagcacctgaaaatacaggaattgtgtttgtgcgctcagatatagagggaaacccctccgttcgagcacacattgataatgtgacgaacactatgcgcgctactactttggaacatggtgaagcaaaggttttcactgttgaacacgtaatggctgcattcagtgctatgaatattgataactgctttgttgaaatggactctcctgagccacctgttggcgatggcagtagtgccgtatttgttgacttaatccttcaggcgggaattgaagaacaacaagctgaacgacatgtgtataaggtgaaacgtagtcattccatttatgatggcgatagatttattcttatcgtaccttatgatggatatcgcgttacatttacatcgattaatccacatccgttgcttggtacgcaacaatgtgattttgatgtaacacctgagtattttgaagaacatattgcccgagctagaaccattggatttgtaaaagaattggaacaattgcaagccatgggcttggcaaagggtggcagtacagataatgctcttgtatacgatgatacaacctgtttatctgttccacgatttgaagacgaattagttcgtcacaaagcccttgatgtgatgggtgatttatatttattgggacctattgagggacatgtaattgcgttaaaatcgagccatgaactcaattctcgtttggctcatagtataatagaagaaataagggagacacagcaatgattcttaaccatgaagacattttagaaattttaccacatcgttacccaatgctattggtagatcgtattattgaattggaaccaatgaagcgtgctgtgggcattaaaaatgctacattcaatgaattgttcttccaaggccatttccctggaaatccagttatgcctggtgtactattaacagaagcaattgctcaagttggtggcattgctttattatatcctgaagaaaatcgtggattaacacctatgtttacaggcattgataaagtacgttttcgtcatccggtaaaacctggtgatgttgtacgcatggaagtggacattgtaaaaattaagggccgtatgggcaaggttgaaggtcgcgcttatgtgggcgataaactttgtgctagcggtgaatacatgtttgcccttgtataatagacttaaggagtgattgtagtgatagttgtaggcatggaaaatgcggaatccaacattcataacacggccatagtgcatccgaatgctaaactgggcaaagatgttgtcattggacctggtgctgtcatcggggaaaatgtagaaataggggatggcactcagattggtgccaatgtagttattggtggttggacaaccattggtaaacgttgtgaaatctatccaggtgcatccattggtttggaaccgcaagatttaaaatttaaaggcgagaaaagttattgttacgtaggtgatgaaacggttatccgtgaattcgttaccattagccgcgctactggagaaggcgaagaaacacgtgttggcaataactgtttattacaagcgtgtacgcatgtagctcataattgcattgtggggaataatgttattatgagtaactgtgcaggcttggctggtcatgctatcgttgaagatcgcgtggttataggtggcctcgctggtgttcatcaatttgtaaaaattggccgtaatgctatggttggcggtatggctaaggtggtacaagatattccgccttatgttattgctgatggtcaaccagctcgtgttatcggattgaactctgttggcctatctcgtgcaggtatttcggaagaggtacgccgtagcttgaagcaagcgttccgcatcatttatcgttcaggctttagcttgtctagagcgattgaagagatggaaatgcaacttgattcttccgttgaaattgaaaacttattacgctttttacgcaatgctgatcgtggcattatgcgtacccgtcgtgattaatatgaaactctacattatgtttatataatgtagagtttttttgtggttattttatactctttttagacgcatcctttttgagcaagaatgtaggaaaatacagtgcgtttatagctagaaaagcgttgaaattatagtaaaatggcgtgatttatagtacaatatagtgtatatgagtatgtcttaaaattatactcaaaacaaatgatttgacgaaaaattgtggaccatataaggcttcacataggaggtatagtcgtggccaaggtaggtttaattgcaggtattggcgttttacctgttgagttcatgcgggctgctcatatgttggggcatcaagttgtagtcatcggagttgtgcctgatacagatcctatattagagaaagaagcggatgctttttacaacattagtgtggctaagttaggtaaaatatttaaaaccttgaaaaaagagggcgttactgagcttactatgctcgggaaggtaacaaaggaaattttatataaaggcttatccttccctgatttaaaaactttgggtgtccttaaacgattgaaaaatcgtaaagatgatactattatgctcgctattgttgatgaaattgaacgagaaggtttttctgtcctagatcaaactgtgtatttgaaaccgttcatgcctaaggttggggtattgaccaaacgacaaccgacagaagaacaatggcaggatatttgtttcggctttgaattggctaaacagatgggcaagcttgatattggtcaaactgtagtagtaaagcataaagcagcaatggctattgaggctattgaaggaactgataaatgcatattgcgcggcggtgaactcggtagaggtgaggccgtagttgttaagactgaaaaaccaaatcaagatgttcgctttgatgtgcctgctgtaggtattaagacattaatgtccatgattgatagtggttgtaatgttttagctgtagaggctgaaaagacgatatttgtacaacaagaagatgtactagaaatggctaatcgccataatattattatttgtgctgtagatcaagcatttgtagatgctagaaaggaactatgatgaaaattatgttttctgctggcgaagcgtctggagacacacatggcgctagcgtggccaaagcgctttcacaaatagattccaatatagaaatgttcggtatgggtggcaccttgatggaacaagctggcgttcgtatcgtatatgatatcaaaaatctcggcgttattggcctcgtagaaatcataaaatcattgccaaagttctttaaattacgcacctatttaaaacgagttatgttgaaagaaaaaccggacgtactcgtatgtatcgattatccgggattcaacatgaaattagctgaagtagctcaccagttaggaatccctgtattgtactatatagcgcctactatttgggcttggcatagcagccgtggcaagacgattaagaaatttgttacaaaggtggcctctatttttccgtttgaagcggaagcatatcgcaagttcaattgtgatgtagaatttgtggggcacccattagtagatattgtgcatccatccatgactaaggaggaggcgatggactactttggggctaggccagaagcaaagcgcgttctattgatgccgggcagccgaaaacaagaggtgttatccctcttggatgtaatgcttgaaagtggggaacgtttgttacagtctcacgaagatgtacagttctttttaccgcgtgctcatacgattgaacgcagtgaattagaagctttcatcagtgaacgaaatgtccctgtaacgattacggaagaccacacctatgatttgatgcaaatctgtgatgtatgtttagctgcatcgggtactgctacactagaaacagcgatgatggagttgccaactgtattattatataaggtatcgcctattacatatggcatcggtaagatggtcgtaaatcttacgcatgtagggttgcctaatattgtagccggcaaggaagtcattccagaattattgcaagatgatgtctccgtagatgctatagtgaataccgtcttgcctctattagatgatttgcaagttaatcaacatatgcgctccgaattgcgcagcgtcaaagaaaaactaggtgagtcaggtgctgttaatcgcgtggctcaattgatttatgacctaggtaaggagaaaactaatgaatagttactcacgtttattgtattttgtgagaccctattataaacgaatgatatttgctgtattttgcatgattgtagcagctgcagcatatctcgtagtaccatggctaatcaaaaacgtcgtagaccaagtattacaagataaaaatatgtttatgctcaatctcatcgttggggccatcattttgatatttttaattcgtggctttgccacatatgggcaaacttacaatatgtcctatatcggtcaacgggttatcatcgatgtacgggaagcaatttttaagcatttacaacgcttgtccttatcctattttgatcgccgtaaaactggcgtcatcatgagtaatcttacaaatgacgtatctgctcttcaatcagcagtagtggataatctaatatctctcattacagagtccgttaccttaattggttctttagtttccatgttgctcatcgattggaagttaacactggttacatttattacggtaccaatggtgctgattatcataaatgtatttggtaaaaagttgcgtttagctggccatgatgtacaaggtcgtatcgctgatattacagctcttttgcaagaggtgatttccgctattcgcgtcgtaaaatcttttgcccgcgaaggttttgaagttaaacgctttgaagtagaaaatcaaaataactttaatgccgttattaaagctactaaattgactagcttattaagtcctatggttgagttctctgcagcgattgcggtggcagttatcctatggtatggtggctattccgtagttacaggaacgattacagctggttctttaattgcgttcttgatttatgctattaacctatcaaatcctgttaagcgtttgagccaagtctatggtaatatccaaaaagcgttggctgcagctgaccgtgtgtttgatattttagatacaaaagccgatgtagtggaaaaagaaaacgctatagaattgcctgatattaaaggcgatgtagattttaatcacgttagtttctcctacgatggtgaaaaaatggcattatgtgattttaacttgtctgttaaggctggtgaaagcgtagccttagtaggaccgtctggagcaggcaagacaacattagccaatctattacctcgtttttatgatgttacgagtggatctataacaattgatggtacagatattaaagacgtaacctttaaatcgttacgtaatcaaattgggttagtaccacaagaaacagttttatttaatgcatccattaaagagaatattttatatggtcgcttagatgcgagtgatgaagaaatttacgaagcagctaaggcggcgaatgtattagagtttgtggataagatgcctgatggtctcgatactattgtaggtgaacgaggtagttcgttatcaggtggtcaacgtcaacgcgttgcaattgcacgtgctatcttgaagaatcctaagattttaattttggatgaagctacgtctgctcttgatacagaaagtgaaaaacttgtacaagaagcgttagaccgcttgatggaaggtcgtacagcctttgttattgcccatcgtttgagcactgtacaaaatgcacatcaaattgttgtattaaatcaaggtaagttggtagagaagggaactcaccaagaactattagccttggaaaatggtttatataaccatctttattccgttcagttctctaataaaggataaacatgtactggatatataatgtattgctcatattttactggattggcctaattccggttatcctatatcgtcttgcttttgaagatggtttttatgagcgtataaaacaaagtgcaggatatatgcctgctacactattaaaaaaaatagaaggacgtcgtgcgatatggattcatgctgcatcagttggggagattgttgcaacgagtcctctcgtaaaagaaattaaacgagagtttccagaagcggtagtcgttgtatctgtcgttacggctacaggtcatgcgatggcacaccgaatcataccggaagctgaaggcataattttctttcctttagatttaccgtacttaacacgtaaaattttgcatatcattaaaccgattgctattttattagtagagacagaaatttggccaaatttcttgcgtatcgctgagtctgaaaagattccagttatgatggtgaatggtcgtatttccgatcgtagtatgaaacgctatcgctacattagtgctttcacgcgggaaatgttgagctctatcgaacgattctgtatgcaatcaaattttgatgcagaatatattgcacagcttggtgcgaaccctgatgaaattactgttactggcaatatgaagtatgatcaaacctatgcaacagtatcagaagaagaaaagcaagccttgttagacgaatttggatttggtcataatcaccctattattgtggcaggaagcacacataagggtgaagatgaagctgtatttgaatcatttaaacaggtgttagtagagtaccctaatgcaagattacttattgcgccgcgtgagatttatagaggccatgatgtacagaccttagcaaaacgttatggcttggaagccatttgtcgtagtgatatgaccgaaccggtgcataaggaaattcctgtagtagtacttgatacgataggggaacttggtcgtttgtacagcttaggcgatatcattttcgtaggtggttctcttgttaaaacaggggggcacaatattctagaaccagctgctcatggaaaacctattattgtgggcccgcatatgtttaattttaaggaaatttttaatctcttacattctagacatgcatgtgagcaagttaaaaatcaaaaagatttaactactatgattttacatctctgtaaacaccctgaattagcgaaagaaatggggcagaattgcttagatattatccgtgaaaatcgtggtgcaacgcgtcgcaatacgcaagaattacgtcaactatttgaatcacatcatattattccttaagaaatattggtgtaatcgatacggaaggaggtgcctactatgaatggtgaagatatttttaagagcattgtaagcggcgaagatcaatctatcttaggcgatgtagccagggctgggttatcacttcttagtaaggggtataaaaaagctgttactatgcgtaacgcaaagtttgatgcaaataaaggtgttgtaaaagtatcggtacctgtaattagtgttggtaatataacagctggtggaactggtaaaactccaatggttagacttatctgtgatattttaggacagaaaggctttcatccaactgtattgagccgtggttatagagctaaagataatagtcaaaatacaattatttccaagcatggatctattttagtagagcctgaggaaagtggagatgaggcttggctattagcgaaagtgctaccaaaatctagtgtaattattggtcgtaatcgtatagaatcggcacgtatagcaattgaagagttaggtgctgattatcttgtaatggatgacggttttcaacatcgagcgttgcatcgagataaggatatcgtattaatcgatgcatcgaatccttttggctatgaacatgtattgccaagaggattattacgtgagcctatggagggccttgtacgagctgatattattgtgcttacaaaagtagatcaagttgatcccggattggttgcagcacttagaaaacgattagctcggatggcgccacaaaagcctgtttatgagaccattcataaaccacgtgcagtctatacacttgaggcatgggctaatggtgatgaaggacatcctattggtactgatgccgatttacctattatggccgtaagtggtatcggtaatcctaaatcctttacgaagacgctagaaggctgtggctacgacgtagtacatacaatgggttttggtgatcatcatgatttttcggatgatgatgtagtagaaatttggaagcaagcttttgctcatcaagccaaggcgattatgattactgaaaaagatgctgttaaattaagtcagttgcatacaattgaagacttaaaaataccgattctagtgctatccataggtattgagttcatctctggaaaacaagaattcatagaaaatttagagatttagtgtataataataagatacgcaaataaaagaaatggggttttattgtgaatattggttgtgtgattccagctcgatttggttccacgagattgccaggaaaacctttggcagatatcgcgggtaaacctatgattcaacgcgtttatgaacgtgttacacaggcgaagagaccacaagtagttattgtggctactgatgatcaacgtgtatatgatacggttaaatcttttggtggtacggttgttatgactgatgcaaatcatccgactggaactgaccgattagctgaagtagcacaacaatataccgacctagatgttatcatcaatgtacaaggtgatgaacctatgattgatgcgcatttaatcgatcagttaggagaactttttgaagatgatgcacatctacaaatggctacagtagcaacccctttattaaaagaagagtatgatgaaccttctgcggtgaaggttatacttaataaacgaaatgatgcgatgtatttttcccgctccttaattccctatccacgtcatgattttgttaatgctcctttaaagcatattggcatttatgcatatcgtcgtcaatttttattagactatgcaaagatggagcctactgcagcagaacaaacagagtcgttagagcaattgagagcgttggaaaatggattttccattcgcgtcattactacagataaacgatttgttggtgttgatacaccagaagacttagctcgtgtaaatgaaatattcgagcaagaggagaaataaatgaaaacagtaaatgttggtaatatgacaattggtggcggtaaagggctgtttgtattagcaggcccatgcgtaatcgaagattacgaccgcacattggcaattggcaaagaggctaaagcaatttgtgaacgactaggcattccttatgtatttaaggcttcttttgataaagctaatcgctctagcttcaattctttccgtggtccaggcctagaagaaggtctaaaaattttagcgtccatcaaaaaagaattgaatgtaccagttgttagcgacatccattctattgaacaaattgaaccagcagcagaagtattggatattcttcaaattcctgcattcttatgtcgtcaaactgacctagtttacggtgctgctaaaacgggcaaatgcgtaaatgtaaaaaaaggtcaattcatggctccaaaagatatggagaatgttcttaataaaatgaaagaatcgggcaatgaaaatcttatgcttacagaacgtggttttagctttggctataataatctcgttgtagatatgagatcattccctattatgcgttcctttgattatccagtaatttttgatgctactcatagtgtgcaattaccaggtggggctggtacaaaatccagtggcaatcgagaatttgtgccaaatttggcacgtgccgctgttgctagtggtgtagatggtttattctttgaagtacatgataatcctgaggaagcgctttccgatggtccaaatatggtatatttaaatcaattcgaagacttattaaaagacttagtagctattgataaaatcgttaaacgataaggggcgatagtattggatattttagaacaggccgctcaagtgcttcatgaggaagcacaagcgatagaacagttaataacaacattagatcaaagttttgtaaatgctgttaacatgattcttgcatgtaaaggtcgtgttgtatgtactggcatgggtaaatctggacatattggtcgtaagattgctgctacattagcgagtacaggtacaccagcattatttatgcacccaggggaaggtgttcatggcgatctaggtatgattactgaagatgatgtagtacttgccttttctaatagtggggaaacaggtgaaatcattggtattttgccttcattgcgccgcataggtgctaaattgatttgcgttgtaggaaaacctgaatctacattggctaaaaattccgatgttgtattattggcgcaagttgaacgcgaagcatgtccgttaggattggcaccaactacaagtacaacagtagcattggccttgggcgatgctttggcggtatgtttactagagcgtcatcattttacgccggaaaacttcgctgttttccatccaggtggctcacttggaagacgtttattgttgactgttgaaaatattatgcatggtggtgaagataatccagttgtacacaaaggggcaaccgttcgtgatgctctgtttgtcatgacggaaaaaggacttggtgccactagcgttatcgatgaagatggtcatttaatcggccttgtaactgatggtgatgtgcgtcgcggtcttgattctggtagcaacttcttagagtggccagttgaagatatgatgacgaatatgccacgtactattacaaaggataaattggctgctgaagcacttcatgtaatggaaaaaaatcaacctcgtcctattacagtactacctgtagtagatgaagaaggccatgcaatggggattgttcacattacagacttacttcgtcgaggcattgtgtaatgaatattaagtggattatcctcgatgttgatggtgtattaacagatggaaaattaatctatacatcgagtggtgaagaaataaaggccttctctgcaagagacggattaggtctagccgctgctcataaagcagggatttccctaggcattataacggctcgcacatcgcctatggtagaacggcgtgctaaggaattaaaatttgatgctttattgatggggcatgctaataaaacggaggctctacgttctctatgtgaaagccatcatattgagttggcgcatatagcttatatgggtgatgatttaaatgacctaggggctttatctctcgtaggcttgccgatggctcctcaagatgcggcggctgaggttaaggaattggctcaatttgtatcaaatcacaatggtggatctggtgccgtgcgagatgctgttgaatatattttaaaagctcaaaacatgtgggattcagtcgtaaaagactatgctatggaggctcataaccatggtcaataaaggaggtgagcagaatgaataatgaatggcaataccatgtcgttaagggaattagttggcttgtatgtcgactgccgtataagctcattttgctcataggtgctagcttaggacccctgtatggagttattgcaaaaaagcaaaagctaagaggcattaaaaatataaaaattggcatgaatatgaatgacgaacaggcagaggctttaattgaaaagctattcaaaaacctaggtcgaagcgttatggaaattctgtatatgccgaatttgactaagaaatttattaatgagcatatcgaaatgcgcggtgtagagcatttggataatgctattaaagaagataaaggcgtcattgttcttactgggcatgtaggcaactgggaatggatgggggctgcgttagctgcacatggttatccatctacaactattgtaaaaaaacaacctaatgcacaatttacacgctttatgaatgaatatcgtgaaatggttggtctcgatgtgtttgccagcggtggtaatgaaatagtttctgctgcaaaagcattgaaaaagaagaaattattgggctttttggccgatcaagatggatatattcacgggttaccggtgccatttttagggcaaccttcttctgctgttgtaggaccggctacatttgctaaaaaattcggttctcctgtagtaccaatttttacatctagaaagcctgaaggcggacatattgttcatatcttgccaccattacattacaataatagtggcgatgatgatgtagatatgtatacgttgacagaagagtgtgtacgcgtaacagaagactttattcgtgaacatcctgatgagtggatttggttccaacatcgatggatgactaagatgagcgaaatcgttgattattataagaaactagagattcgggagagagcacatgaaaaacaataaaaaattaatcgctattgtcgtggctatcgtcattgctctagttggtctaatcgcgttcattttgcacgactctggagactcttcttctaaaggggctaataatgggcaactggtgaatttccaaggtgccgagcttcaagaagagaaggacggtaagttggtatgggccctatctgcagagaaaatcgagtatgaccctcgttcaaaatcgattgtactcactaatttaaagggtcttttctatcaagatgatgtgacaacaacgattacggcacctcatgctgtattgtctggcgatcatagttcccttgatattgatggtggtgtaacagctaccaatacggaaggggctaattttaagaccgatgcattacattttgataacaaaactaaaatgcttacatcaaaaacggctttcacttatgattcaaaagatattaccttaactggtgataagttagaaggtaatatgtcgttgaaacaaatcaaagcgattggtcatgctaaattgacgaaaaagtaaagttgaggaattgcgatgaataagaaaaaatatatgggattagctgtaatctcagcaatgatgatgctatctgttaccgcttgggctgccaatgaaggtccgttgaccattagtgcggatacattatcctatgatggtaatacaggtcgtgcagaggcatctggtaatgtagtaattacacaacaagataaaacgatgactggtgcaaatggatggtacaatactaaaactcgtgaagcatccctagaaggtggtgtttccatgattggtgataatatgtccatgtccgcacaatctgtacatagtgtaaatgataaccagttcagtgcagagggggatgttcatttgcaacgggataatcgccaaatctttggtgactctgttgagtacaactctgatactgaatatggtaaggtagtgggaaatgctaaattaattgcagaaggcactacattgacaggtaaccaagtagaaggttggttgaaagaaattcgcgccgttgcacaaggtggtgtaacatttaataatccagataaaaatgtatctggttcggcagatcgtgctacatatacgcaaacgcctaatcaaaatgatggggttgtattgcttactggctcagcacatgcagtacaaaatggcaatgtgttgaatgcgcctgagttaaaattgtacttgaaggataactctgcggaaacattaggcggacgtagtacattagttatcacaccgaactagtaaggattaatgtatgtatatagaaactaagaacctagtcaaaacatttaatggtcggaatgtagtagatggtgtaagtcttcatgttgaaaaaggacaagtcgtggggctattggggcctaatggggctggtaagactacatcgttctacatgattgtaggcattgaaaaaccgacgacaggtattattacagttgatggtaaggatatcacgatgttaccgatgtataagcgggcagcggaaggcattggttatttaccccaagaggcatcgatttttagatctatgactgttgaggaaaatattcgtgccatgttggaaacaacaaataaaaatcgtgatgaaatcgatcaaattgtaaactctcttattgatgaatttaatattggtcatgtgcgagatcgtaaggggatgcaactatccggtggtgaacggcggcgtgtagagattgctcgctgtttggctttagaaccgaattttatcttattggatgaaccatttgccggcgtagacccaattgcagttgccgatattcaacaaattattttacaagtaaaaaatagaggaatcggcattcttattacagaccataatgtgcgagaaacattaggcattgttgataaggcatatattttaagcacaggtaagatcttattggaaggtacacctgatgaaattgccaataacccaattgctcgtgaacattatttaggtaacaattttaaattataggagggaccatgcgcttattagataaatatattttaaaagcctttgtaggtccattcctatttggggtatttgcttttaccagtattttcattggtacaggtacattattccgcattgctcaatatataactgaatatggtgctccgctactactcgttatgaaagccttctttttagctatgccaagcattattttattgacattcccgatgtctgtattgcttggttcgctgatggctttcagcagactaagtagtactagtgaaatcgtagttatgagggctggtggccttagttttttacgacttgcaatgcctgtatatattttagcgttgcttatttctattggtgctgtagcatttaatgaatttgtcgtaccacgtacaaacaatatgtatcaaaccattgtgcgcgaagaaattatgaagaatgcatcgccacaaacgcaaaatcatattgtgctaaaatctatgaatggtgacaatcttagtacattgatgtatgctaaacactatgatagtgaaagtaaaaaactaagcatgattacggtgcaacaattcaatgacaaaggtgaactacaacaggtagaaaatgcggaaaatgctgaatggaatggccaagtatgggtcatgcatagcggtataatctatgacgtatcggctggtgaaggtgtagagcggacaatgaagtttaaagaacaagtattgccaattaaatcttcaccaaatgaagtacaacaagatcaacgtaaaccagaagaattgacgattaaagaattgcgtcatcaaattaaagcatataaagctgcatatacaaattctaataagttagaaatggaaatgtaccaacgttttaccattccgttggcaagctttgtatttgccttagtaggcgcaccgttgggattgcaaaaacaaaggtctagttcgtctatcggatttggtatcagtattttaattatctttatttactatggtgtcatgacctttgccggagctcttggtaagggtggtgcattaccaacgtggatggcagcaatgattcctgatacattaggtatcattgccggattatatttaaattggcgtgtttcacgctaatagatagtatgttggattacaatttattttgaaaggagggacaccatgcttgtaggattaaagattctcgttattatcgctatcatgggcgggcttattgcctatatgggtgataaactaggaacaaaggtcggtaagcgtagaatgtccctctttggattgcgtcctaagcatacatcgattattgtaacgattgtaacaggtctactcgttgcagctgcaacggttggtgttcttacaattacatcgcaaagcgtacgtactgcgctttttgggatggatcaattgcgggcagatatgaatcagctaacagcagaggtagctgctaaaaatgctgaattagaacaaggtcaagccctattggaagctaataaaaaagaattagcggaccgtatggctgagattgaaacaattcgcaaagaggttgaacaaagccgtcaagaattagctgatgcagaggctgcaaaggttgctacagaggcagaattatctgcattacaagcctcctatgatgaggcctctaaaaaattagctgccttggaagctacacgggctagtatggaaaaacatattgcggacttgcagaaaacacaagaagagttaaaaacggggattatccatcttagagaaggtacgattttattccaagttgatcaattattagcacaggctgtagtgcgtaatggtttatctcctaatgaagcgcgtgatgcggttaatagtattgtggaagatacaaataaacttgttcttcgtcgcttaggtgttgaagatcatggtgaatccgtcgtgtacgtggatcgtcaaaatattgaggtcgccatctcgaaaattgaagaatccaaaacgcctatggttatccaagtggtggcagctggtaatatcattgctggtgaaccagcagttgcgacgattcacgtgtatccacaacaatttatttataaatcaggtgacgtgattgctacgtctgttatcgatggtggtagtaatgctcaagtcaatatgcttcgtttcttgaaacaagtcaatgaagaggctaagtctaaaggggttataccagattcgttgtccggtgatattggtacaatacctggagatgaactattttctgcgatacgtcgcattagcatgctacatggcaaggtatatgtagaggcgtatgccgatggtgatacatattcatctggccctgtacacattaaattgcgtattacacagatgacagatacgggtaaacttataaaatcaaattagtttctatataaatggcctatgtattaagatttaatacataggtcttttattttgtgataaaatataactattgtattgaggaatgaggaaaatagtatgaataatatatcgtatatagccgctgttgatccagggaatgaaaagaccggtgtagctattctttcacaagcaggtgagttaatatatcgaaccattgtagaaactaagacatttaatagttcctttgaaagtatattaagtacttatcttggtatacatcatatcgtatgtggtaatggtaccaatcataagcatttgtatccatctatacaacaaattgggcgcaatcataaaattacgacgagtttgatcgatgaatcacatagtactgaagaggctcgaaaattgtattggcaatataatccacctaccggttggcgtagattcgtaccaaaaggcatgcaatttccacctgaaccagtagatgacttaacagcctatgtcattggtaagcgatatactaaacaattgaaggaagaggattataataaacttcaagactgtaaagtagaagaggatttagaagctaaacgtttagcggcaattaaaaaattatataatgaaggagatgcacatgagtaatgtgataaaaaagatacattggtccagtatactactgcgatgtatttggatgattataggggccctgatttatacggtgggcctagatctatttttagtgccaaataatatcatcgatggtggcgttgttggtatatctttgatgacagctgaacttacggggatatcgtttagtatatttgtagtattaattaatattccattcttgtatattggctatcgcattaatggcaaggtattcaccatatctacattgttttctatcgtttggatggccatattttcatcctttgcccatgaatttactccaattacaaccaatccttttttaggtgccatttttggtggtatcatacttggtattggcgtaggccttattatacgtaatgggggctgcttagatgggtcggaaatcgtagctattatttttgataaacgaactacattttctgtaggcgagattgtaatggccatgaatttagtcatcttaggggctgctggatttgtatatagttgggatagtgctatgtattccttagtagcctattttattgcctataaaatgatcgatattacaattacaggccttgaggaatcaaagggtgttatgattattactgatgcagagaattcagagaaaattgcggatacattaaatgcaaaactaaatcgaggcgttaccatattatatggtgaaggtggttatttgaaaacacctaagcatgcattgtattcagttgtaactcgtttagagattacgcgtttgaaggatgctgtatatgaagtggatccatcagcatttataactattcaagatgtacacgatgtatttggtggacgttttactaagagtggacattaagggggctcaaatgaataataaatttgtaaaagaaacattagattggatatatgccattgtattggcgctagttattgcaatggtcattcatatttttatcgtacaaccaacacgagtatccggtgaatccatggaggatacattacataatggtcaatatttaatcgttaccaagtggcaacatattatgcgtgatgtacctgattatggtcaaattgttattattgatagtcgagtgaaccgtgaacgtacatggacggatgatgtgaaagaaccattgatgaactatgttagtgttatcgataaatctgctcaaacaaatgatgtgtgggtaaaacgtgtgattggtagaccaggtgatacattagaatttaaagatggtcacgtatggcgtaatggagaagagttacaagaaccttatacaaaagatccaacaatgaactatagccgttctacacctgttgtagtacctgaaggacatgtttttgtaatgggggataatcgaaatcattcgagtgatagtcgattcatcggacctgtacctgtagatcatgtattaggctttgtagaatatgccctatagtagataatagtatataaaaatgtatagtcttacgtgttaaagctcaatactacaatgctttatatgagaacgtatattactaaattgtaatgtacgttcctttttatatattatatgaaatactatattgcttgcaatctatctcttttatacatataacgatgaatgatttgtataatcaatatcatttacaatgatattgaaaattgatattatttttatgttatgtgaattttatattgagaggtttagatgatgaataagaaaaatctatctttagcagttgccgcattatctgttgtgggcgtaacgacagcctttgctgccaatcctttttctgatgtaacacctgatagctgggcctatcaatccgtatcgcaattagctagtgctggcatcattaatggatatccagatggtacgtttaagggccaaaaggatattacccgttttgaaatggctcaaatggttgctaaagcgatggcaaaccaagatcgtgctaatgcagagcaacaagcgatgattaatcgcttagctgatgaattctctaatgaattgtctaatttgggtgtacgcgtagccgccttagaggaccgtgtagggaatgttaagtttactggggatgctcgtattaactatgttgaaaaggaaggcattgataatctagattcggaaggtaaatttgcagctcgtgtacgtttgaatatggatgctaaagttaataagaatacatctgtgaaagcgcgattaacgacaggatctattgaacttggtgatgcagcaaaagatcatactatgtcttttgatctagcttatgtggagcacaaatttggcaagaatcatatggtagatattggtcgctatacacaaagctttggtgatggtttaatttattctagtaactttgatggtattgggtatacaacacaagttggaaaagtaaaagtaaatgccgcttatggttacccaacactaggtcgatttagtaaggcctctaaagataataatactgaaatggcgcttattaaccttagtgcaccagtaaataaacacttaaatgtaggtggtatgtttgctcatgtaggtactactaacgttaaaatgggtaatggcaaaactattaatgattttaacaatgtatatggttttaatgcacaatacaatagtggcaaattcgcaactaatgctgagtgggtgactgcaacaggtcttaacaatagtgatgtatggaacgtaggcgttaaatggggcgactacaaaatcactaagaaaaactcctggcgtgtagctcttgattattacaatcaagaaaagaatgctcctgtattcaaaacacaaaaatatgaaggtaatgacttatatggtaagactcgccatgaaggctataaagcatggcagcttagtgcgtcctatgcaccagaaaaaaatgtaggcattacaacatattatggcttccatgccaaaacacaagaaggccataaggtaaatgattactatcgtgcagacttgttatttaaattctaattaatgcttatgaaataagatctatcagagatgataggtcttattttttattgtacgccgaataggcatgactaaacccccagttaaactgggggtcggtaaaaaattcttagagaaaaggaaagaacctcctagtggtaaaatgaagttggtctggcaaccacaacatttcaacataggaggttcaatgtcaatgaatgacgtaaaaagcttatcacatagtaaatggagatgtaaatatcatattgtttttgcaccaaagtatagaaggcaaataatttatggacggataaaagctgatgtaggtaaaattttaagagatttatgtaatagaaaaaatgtagagattatagaggcagaatgctgtccggatcatattcatatgttagtaactattccaccacatttaagtgtatcaagttttatgggatatttaaaaagcaaaagtagcctcatgatattcgataaacacgcaaatttaaaatataagtatggaaatagacatttctggtgtagaggatattatgtggatacagtgggaagatacgaaggagcgataaaagagtatattcgcaatcaattacaagaagatatagcacaagatacattaaactttaaagaatataccgacccgtttacgggtgagccggtaaaataggcaaaataaaagcccccgagtagggggcagccagtggtaatagagtggttgtcagatcattcaaagccctctttagagggccaccactagagaaagacccttatagggtcagagcaaaccacccgttcaacgggtggttatgattacaactgattaattaaaactatatttattagttattcatattaattggcatagtatgatagattaaaatacattattttatacttaaataaaatgaaattttataaaatttaattttgataaatatagataaatactgcttttgttgtataaaattatttcatgaaagaaatttcatcatatttaattgcataaaatgctttacaaatttgttgaccggatgtatattgacatcacagaaagacaacacactcagttgtggtgatatacaagaacagaagaagaggaaacgtggatactcatcaggatgttcttatatagattataactagatgtacagtcttctgataatatatatttttttctaaatttgttagtcaaaaagactatatcagaaagaaggaatctattatgaaaaaacaattcgcagcagtatttgcagcaacagctcttttaggtgtaacaagcgcattcgcagctaacccattctccgatgtaactcctgattcttgggcataccaagctgtatctcaattagcagcagctggcatcgttaatggttacccagatggtactttcaaaggtcaaaacgatatcactcgttacgaaatggctcaaatggtagctaaagctatggctaaccaagataaagctaatgcagaacaacaagcaatgattaatcgtttggcagatgaattctccaatgaattgaacaacttgggcgtacgcgtttccaaattggaagaccgtgtgggtaatgtaaaagttactggtgatgctcgtatccgttatcaaggctctgaagacaaaggcgtttacaaagatggtagcaaatccttaactgatggccgtgctcgcgttcaattcaatgcaaaagtaaatgataaaactgatgcagtagttcgtgttaaaggtggttatgaattcggtgatgcttccaatggtacaactgctaaaattgaccgtgcgtatgtagatcacagatttggtcaaaacgtatccgctaaggctggtcgtttcaaccaaacaattggtggcggtttaatgtacgatgatacattcgatggtgctcaattgaacgttggtaacgataaaatccaagtacaaggtgcttatggttacatgatggaaggcgctgcagaaggcaatgctaaatctgataacccatctgtatcttatgtaggtgttaaaggcaaaatcggtcaagaatcctccgttggtggtttctactccagattgtctagcggcaatttaaaacataatggtgtagcaactccaaatgatcatcaaaacgtatacggcttcaatgcggacttccgcaaagataaagtatgggttggcggtgaatggttgaaagcttctgacgtagctaattctcaagcttggacagctggtgtaggttatggtaactacgacatcgctaagaaaggtacttgggatgtgaaaggtcaatacttcaaccaaaaagctaatgcaccaatcgtaagctccacttgggatcaagcatatgacttaactaatacaaataacggttataaaggttatgtagcaacagttgattatgctgtacaagataacgtaggcttaagcgctggttatggtttcaactctaaagaccaaagcggtaaagacttatccgatttctatcgtgcagaacttaactacaaattctaattgataatcaaataacactattatgaaaaccatctcttaataacatataatagtatatataaaggagtcctccttagagggctcctttttgtatgtgaaaatggttacatgcaatatgtagtatgagtttataatgactcattcatgaagctatattaataaatagaaatattggaaatgtatttaataagtaagaattaataataatgatgtgaataaatatcattataagaaaaaatggataaatttgtataaaattttgatttttatgagttgtaataaaattagataaaatctaacttttccaagattttaaaaaataaatttttttaaatgagaatataaatgagaaaaaagggtttacatcaaaatttcttcgtgctaatatcatggcaacaagaggcggtaagcaaaacatactgaaatctcgatgaagaattatggtgaggaaacgtggacactcccaagagaattctaaatcttgaaattagaatgaattgtgaatcgcaacttgtgaaaacaattttattcttatttttcagaaagaaggaattcaactatgaaaaaacaattcgcagcaatcttcgcagcaacagcagttttgggtgtaactactgcattcgcagctaacccattctccgatgtaactcctgattcttgggcataccaagcagtttctcaattagcagctgctggtatcgttaacggttatccagatggcactttcaaaggccaaaacgatatcactcgttacgaaatggctcaaatggtagctaaagctatggctaaccaagaccgcgctaacgctgaacaacaagctatgatcaaccgtttggctgatgaattctccaacgaattgaacaacttgggcgttcgtgtagctcgtttggaagaccgcgttggtaacgtaaaagtaactggcgatatgcgtattaaatgggaagaccaagaacatgcttcctccgatactaacggtcgtgctcgtatccaattcaatgcaaaagtaaacgatcgcactgaagcagtagctcgtatcaaaggtgcttacacatttggtgatgctaatggttccactgcagtttccttggatcgtgcatatgtaaaccataaatttggcgaacgcgtatccgctaaagctggtcgtttcggtcaaacatttggttctggtttagcatatgactccactttcgatggtgctcaattcaatgctggtaacgataaagttgctttccaagctgcttatggttacttgacttcttccaacgtaaaaactacagctggtgcttctgtagataaagatgctaatgctgaagtagtatacttgggcttaaatggtaaagtaggtaaacacgctgatgtaggcggtttctacgctcgtttcaacgatagcaaagctttaggtgttaaagctgaagatggcggtagcgcaaactataacgtttacaaaaacgtatatggcttcaatgctaacactaactttgacaaagtttgggttggtggcgaatgggtaaaagcttctaacgttaaagactccacagcttggactgcaggcattggttttggcgactacagcatcgctaaaaaaggttcttgggacgttaaaggtcaatacttcaacgctaaagaaaacgcacctgtattcgattccacttggaaccacaaatacatccaaaacgctaaaggttggatggcttccgttgactatgcattacaaccaaacgttggcttgtccgcatactacggcttcgactggaaaacagctgacagcgctaaaactgacaaagctgacttctaccgtgcagaacttaactacaaattctaatttgatagttacaaatataaaagggactccttcgggagtctctttttttgtaccccttataaatggtataatagataaatacagtaattatataaggaggtctgctgatgaatccttctttttcacatattcagatggtggccatcgattgtgatgagacattgttgcgcagtgataatacggtgtcagagtatactaaggatgtattgcatcaattgcaagagaaaggcattcgtatcactattgcaacggggcgcatgtaccaaacggcaaagcctgttggcatttcattgcagcttggtaatgtgccgatgatattattttctggaggcctcatccaagaattagaatcaggtcgtaagctatttgaacggactgtgccattagatacggtacaacggatttggaaaatagcaagtcaatatggttggcatattcagtcatatgtagatgatcatctattgtgtcatcatcaggattggcaatcggatgtatatgaacgtcaaacaggggctaaagctgaatttttaggcgattcgttgtatgaactttcacgagagccgaataaattaattgctatagatactgttaaaaacatagattctatcattgatacattgacgcccattgtaggtgatacggctacgttagtgcggagccaaaaggattttttagaaatcattgcacctcatgtatccaagggcgatgcgttagagcagttagcacagcaatatggaattggtttagaacatatcatttcctttggcaatgcagagaacgatatatctatgttatctaaaacggggtactcagtagccgttgaaaatgctgtggatcatgtaaaattggtagcctgtgaggtatgtgggcatcataatgaagacggcgtagctcattggattgaagaacatttattataatggagtaaggtatggaagcatttcgtttattaatcgtaaccggcatgtctggtgctgggaaaacacaggtattacaggctttagaagatatgggctacctttgtgtagataatattccgcctgtattaattccaaaactgagtgaaatttgtcgccaaggtggggtccgcaccaatcgtgtggccctcgtcgtggatattcggggcggtgaattctttgaagctttatctgcttcgttagagaccttgaatgagatgaaggtagattatgaaatcgtgttcatggatgctagtgatgaaaccttgattcgtcgttataaagagtcacgccgtagtcacccgctcgcaccaagtggtcgcattacaacaggcctaagaaaagaacgtcaaattctagattctgtgcgccataaagcggattatattatcgatacaacggatatgaaaaccgcatccttaaaggaatacttgaaaaaacgctttactcaagtggcggataaacacggcatgtccgtaactgttgtgagctttggctttaaatacggcttgccattggatgcagatatgatttgggatgttcgtttcttgccaaatccgttctatattccagaataccgtcataaaacggggcgtgtacaggttgttaacgactatattcactcctttgatgtaacggatgaatttaaaacacactattttaataccatggatttccttgtgcctaattatgagaaggaaggcaaagcacaatttattgtagccgttggttgtacaggtggtatgcaccgctctgttgccatggcagaggctttgtatgctcatttattagaaaaaggttatcgtgtcacggtggaacatcgggatatgatgaagaataatgtggaagaagattttaatccacatcaagcagatctaggggattaaaaggggattatatgttacgaaaacgttggttccggtggttaattccgggccttaatataaaacgttggcttgctctctatagcttaggggtaggcttattaatcataggcatttcactattatttaactatcaatggttatcgtatatagaggatattgttcttgcctattcctattccttaacgggatattataattacaatgtattgattttagtgggcgcagtacttattggtatatcggctattttaattttagttggtacgagcaaggttattaaaaccattatccgcgctgttttaccagatccatctagcaaggtatcagatattatctttcaaaatatccgccttgataaaggccctaaaatcgtagttattggtggtggtacgggcttatccaatttattgcgtggtttgaaagctcacacatctaatttatcggctatcgttacggttgccgatgatggcggttcttccggtcgcttgcgagaagattttaaaatgattgcacctggcgatttacgcaactgtcttgtggctcttgcagaacaagaaggggttatggaaaatctttttcgctatcgttttgaagggaacaatgagctctctggtcatagctttgggaatctctttatcactgcgttggcacaggtttatgatggcgatatagaggaggccctcgaagcggctagtaaattattgcgtgtccgcggtcgtgtcattccgtcgtctacagaatttattcaactcagtgctgaactcattgatggcacaattgtggatggtgaaagtaatattccacacgcaggaaagaagattaaacgcgtatttagtagtcctgaacatccaaaaccagaaggcgctgcattgcgcgccattgatgaagcagatgttatcatattagggcctggtagtctctatacgagtatcattcctaatttattgaccgacaaaatcgcggaccatgtgcgtgctagtaaggccaataaaatttacattgccaatgtaatgacacaacctggtgaaacgtcaggctacacattggctgatcacgtacaagctatcatcgaccatagtgggggaggcatcatcgatacggttctcgccaatgatggacctttgccaattcaaatggtagaacagtatagcgcagttggttcagaacctgtggccatcgattctaaacgtttacaagatatggggattcgcacggttagagcaacgctcattagccaagaaaaaccggctattcatgacccagaacgtttaggtaaggtccttatggatatcatatatgctatgaaatcagatatggaaccacgggtattagaatattatttacgccgtgctgatcattagaaaggaaaacctatgtcttttgcagaagatgtaaaaaatgaattatgtgcctatgagcctgaaacggataccgatgtggccatgaagattgaagcatcctgcttattgcgcatgggtggttccttattgctcggtatgaagggagctatcggtatacgactagccactgctaataatgcggtggctagacgtttgctaggtatacttaaaaaacaatacgaattgccgacccatgttatggtgcgccaaggtttaaatttgcggaaaaagaatatgtatacattaacggtggatccatcacaagaggggcgtcaagccttagaaaatttggcattgtggcctgttaccgaacagttgccacggaagtggttacactcaatggaggcgcgacgcgccttcttgcgcggcgcttttttagggggcggatccgttaataaaccacaaagtgattaccatctagagtttatgacgggcaacgaagcttttgcacgagaaattgtatatgtattgaaattatttcacattcatgcaggcctaacagagcgtaaagaagaatatgtggtatatcttaaagaaggcgatgcggtaacaaattgtttacaggtcatgggtgctcaatcggcattgatggaatttgaaaatgtacgcatcatgaagaccgttcgcaatcagatcaatcgacaggtaaattgtgagactgcaaatttacaaaaaaccgtagatgcagcggtacgtcaagtgaaagccatccgtatattggatgagcatataggtattgatgcattgccggataaattgaaaattgtagctagattgcgctggaataatccggaagcaagtttaaaagaattagaagaaatgatgaatggtaccttatctaaatcaggtattggacatcgtttgaaaaagttagaagcattggcccttacatatgatcctatggggctggaagaggtttaatattatgttattcaagaaaacatataagctagcgacgatgttagcagttatgggagcattaacaggtcatgcagcaagcgatattgatttgaactccataggatatttttcgtttactccattaccagcggaattacaagcacagaaggatacattgctattatctgatagtcctgaatatgtaggtcccgtaggcggcgttttaagtgctggtagcattaatgggaaagggcgtatctacttttaccatgtaaatgaaatggctgaacctcataagattgccattatcttggagaataccggtaatgaaccaaatggcattgccgtgtttcgtgaactaaaatccatcgccacatcagattattttgcggcgggccgcgatttatcacgaaaggaattagagcaaccattgacggataaaccattgtattcctttgtgatgcctcccaaaagtcgtcaactcgtatttactgatttagaacactccccaatacctaaagatgctttatttacaggcatcgtagatttgcaaacaagtgctcctgtatttgcacgggttatgatgattcctatgaatctgaactctattgagtcctcgtattgggtgaataatttgcctatagaccatgtgcggttgcgtggtactttcaccggtgctgagcgcgaaatggcagtaacaaaagaatataacaccacattaggtggcgcctatgtggaactgggcaatgatagagaagaccgttttgtagaaggcgtggatgagctcgataataaagcctatgtaaaggacgcagggaactatggtatttcttataccgttaaaattcctacaagtggcgaggatcctttccgcctctatttcaatccattaggcggcggttattcgggttcttttactgtgaaagcacaacgtcgttggcagaaggctcctagtgaaagcatgacctatcacatcggtggtgacgacggactgatggcattaggtcataatactgtattagattctcgatacatggggaactattacggtggtgatacgttgaccatcgatttcatgccggctggtgcttcgaatttaccagttcgttttttactgattccagaagcgttagccaaccctcaatatgcgcgcgtattggctactaatgaagctggtcagcgtgcattagaagcagaggcgcaaaaagaagcagccgaagcagctaagaaggtggctattgaagaaaaatatgtagcagcgaagacgcaaaaagaagaacaagctcatcaattagcagaggcagctaaattagcggctgaaaaggcagctgctgcccataaagcagctcaagatagacaggctgagcttgataaacgagatgcagaggaacaagctaaactcaagacaaaagccgatgcagctgctgaacgagcacgtgctaaagcggaagctgatcgacaattggctgaacaaaaagctaaggctgatgcccaaaaagcggaagcagcacgcattgcagcagagcaaaaggcgaaagacgatgcggctaaggctgaagcggctcgtattgcagccgaacaaaaagccaaggctgatgctcaaaaagcagaggcagcacgcatcgcagccgaacaagcagctcgtgaaaaagcggaacgtgagcaagctgctcgagaagcagccgagcaaaaagctcgtgaatatgcagcaaaattagaggcacaacgtttagaagcgcagcgtaaggctgaagaagagcgtattcttgctgaacaacgtgcagaagcagctcgtattgaagcagagcgtaaagcggcagaacaagcggctaaaaacgaagcagaacgccaagaagcggctagaaaagcagaagcggcgcgtcaagaggcggctcgtcgggcggaggaaaaacgcaaggctgcagaagccaaagcagaggctgatcgaattgcagccgaagcaaaacgcactgaagaggctagaaaagccgaagaagctcgtcaggaagcattgcgcaaggccgaaatggctcgacaagaagctgctcgtaaagctgaggaagagcgcctagcagctattgcaaaagctcaagaagaagcgcgtaaagccgaagaacgtcgtattgcagaggaagcaaaacgggccgaagaagcacgtaaagccgaagaagcacgccgtgccgaagaggctcgtaaggcagaggctgcaagaattgcggaagcagaacgtattgcggaagccgctcgtcaagctgaggaagctcgtatccgcgaagaaaatcgcgctgcagaagcggcacgtaaagcagagcgtgaacggattgcgaaggaacaagcagaagcggctagaaaagccgaagaagctcgccaattggcagaaaaacggtaccgtgaatacgaaattgctcaagaacaagccaaagaggcacgccgtcgtgctgatattcaacgggaagctcagaaaaaagcagctcaacgggctgaagaaatccgcttagctgcacaacgacaaattatcgctaagcgaaacgcagaaattgcacgtcaaaaattggcagaagaacgtgaagcagcgcgtattgcagcacaaggaggtaaacgtcgtagctttgctgagttagatgatgttaatgcatcggccaatcaagatgaagatactacacaaaatgcggtatctattgatcagttgacaagaaaacaacagtaaacgaatcggtgaatttacatattaaatcggatgcctgttaaggcatccgatttgtgtttcttcatgggaattacattgactttcacaggtaatttcagtacaatgaatagagataagtgcaatatacagtacgagatactgtagcattacaaaatcccttttaaattggtccagagaggctaaaaaaggacatatagttgaagcgccctcaagggcttctttgtgcaaactattcgaccttttgccctggggcaagaggtcttttttgttatacggttaggaggcaatcatgggacaagtgagcttgcatggcaaacatttgttagggttacaacatgctacacctgaagaaattaaattaattctagatgtagcgaaaaagatgaagaaggttgttttgtctgatgacaaaaaaattccttacttgaaaggtaaggcgattatcaatctattcatggaacctagtacacgtacgcgtagttcttttgaactagcaggtaaatatttaggggcagatgtaatcaatattacaccaagtggttcctctatgggtaagggtgaaagcttccgcgatacattattaacattgtcctatatggggacggatgctatcgtaatgcgcagtagtgcagaaggggctcctctctatgcaacaaaagccgttgatcctatcattatcaatgctggcgatggtgcccatgaacatccaacacaagcattgctcgatatgttctccatcattgaacgcaaaggttcattagaaggtaaaaaagttgttatcgtaggcgatattatgcatagccgtgtagctcgctccgatgtttacggtcttactaaaatgggggccgacgttcacttggcaggtcctcgtactatgctctatcctgagcttgaaaaaatgggtgttaccattcatcacgatgtgcgtgaagctgtaaaagatgcagacgttgtcaatgtacttcgcatccaattagaacgtattcactccgctctatatccaacaaatcgcgaatatgcgcgtatctttggtatcaataaagatgtattaagcctagcgaaagatgatgttatggttatgcatccaggcccaatgaaccgtggccttgaaatttccccagatgtagcctactgggatcaatccgtaattcaagaacaagtacgcaatggtgtatccgttcgtatggctgtattgtacttaacaattcatggaggtgacggtagtgagcttgcttattaaaaatggtacggtagtcaatccggcaaaacaacaacatgaagtagcagacgttctcgtgaaagatggtaaaattgcagccatcggtcaaaatttaagtgcagatggtgctgaagtatatgatgcaacaggacttattgtagcaccgggtcttatcgatattcatacacatttgcgcgaaccaggccaagaagcaaaagaagatttccattctggtacacaagcggcagctgctggtggttttacacgcgtcgtgaccatggcgaatacaacaccagtagtagataatgcggctcttgtacgaggtttgaaaaaacaagctgaacttactggtgtcgtaaaagtagaattcatcggtgctgtatctaagaaccttgaaggtaaagaacttgctgaattaggtgatatggctgaggctggtgttgtagcttactctgatgatggtcactatgtagaaagcgctgctttcatgcgccgtgcattggaatattcttccatgttcaataaaatggttatcgaccatgcagaagatattagcttgactaaaaatggtcatatgcatgaaggtttcgtatcttatgaaatgggcgttatcgggcgtccagctgtagctgaagatttggcggtagctcgcgatattttactagcggaaatgacaggtggtcatatccatatcgctcacgtaagtagtaaaaatacggtggatatggtacgccgtgcaaaggctaaaggggttaatgtaacttgtgaggtaacaagccaacatctatcctttactgatgaatatttgcgcgaatataatccggcttttaaaatggcaccgccaattcgttctgaagatcatcgtcaagcattgctagacggtttaaaagatggcaccattgatgctattatcactgaccatgcaccacatgcatttgaagaaaaagaccacgaattctgctgcgctccaaatggttttagcgggcttgaaacatccttggctggcgttattactaatgcctatggtccagataaacttagcatcgaccaagtggtgtactacatgagtacacgtccagctgagttgatgcatctagatgcaggtgtgttagaagttggtaaaccagcggatattacagtattctctactacagaacaatggactgtagatagaaataaattctatacaaaaggtaaagtcagcccatttgatggcatgattgttactggtaaagcaaaacttaccgttgtagacggtaacatcgttatgaaggagggcgtggtcctataatgaaaggcaaattagttctggaagatggttccgtatttgaaggttccctattaggcggcgctcctacagtgggcgaggttgtgtttaatacaggcatgactggatatcaagaaattttgactgacccatcctatgcggatcaaattattacattaacatatccactcgttggtaactatggtacattaaatgctattacacaaggtcctaaaccatactgtaaaggctttatcgtaggtgaactatgtgatttcccatccaattggcaaaatgaaggtttgttcagcgaatatttacgtttgcatggcattccttgcctctatgatgtagatacgcgtgctattactcgtactattcgtaaccatggtgttatgaaaggcgtacttgtgcgtgctgattatccgatggaagatattcaaaaattatttaaacaagatttgcctacagaccaagttatgcgcgtcactacaaaatggcaaggcatgcgtggcgataaaaatgcagaattccatgtggctgtaatggattatggtgtaaaagaaaatattcttcgatccttagagcttgctggttgccgtttaactgtattcccagcagattctaaagcagaagatgtactcgctgttaatcctgatggcattttcttggccaatggccctggagaccctcaagatttaggttatgcagtagaagaagtgaagaaaatgtttggtaagaaaccaatctttggtatctgcatggggcaccaagtattggcacaagcatacggtggcactacattcaaacttaaatttggtcaccgtggttctaaccaccctgtacaagatcttcgtacaggccgtgtatatattacatctcaaaatcatggctttgccgtagatgattcttctttgcctgattatattgaaatcacacatcgcagtgtgaatgatggtactgtagaaggtatgcgccacaaagaattgccaatcttctccgtacaataccatccagaagcgtcccctggacctactgataacctatatttgtttgatgaatttgaagatatgatgagaaagggaaaataatatgaccacagaagcaaaaaaagtactcgtaattggttctggtccaattattatcggccaagcagcagaattcgactatgctggtacacaagcgtgccgttcccttcgtgaagaaggctataaggtagtattggttaactctaaccctgcaacaatcatgactgatacagatattgcagaccgtgtatatgtagaacctattagccttgaattcgtaacggaagttattaaaaaagaacgcccttggggcttattggcaacattggggggccaagtaggtctaaatatggccgttcaattatcagaagctggcgtactcgaagagtatggcgttaagttgcttggtacgacattagaagctattaaacatgcagaagatcgcgaattgttcaaggaagcgatgaaggaaatcaatcaaccagttcctgaatccgacatcttcaatgaccttgaagaagccgtagcctttgcaaatcgcatcggctatcctatcatcatccgtcctgcttatacattgggcggtactggtggcggtattgcgcataacgaagatgaaatgtatgaaatcacacgccgtggtttgaaactttcaccaattcaccaaatcttggcggaacgttccgttgcaggttggaaagaaatcgaatacgaagtcatgcgcgatagtgcagacaactgtatcattgtatgtaacatggaaaatatcgaccctgtaggtgtacatacaggtgactccatcgttgtggcaccaagccaaacattgaacgatattcaataccaaatgcttcgtactgcatctgttgacatcattcgctatttgaaaatcgaaggtggttgtaacgtacaatacgctttgaatccagatagtaacgaatatatcgttatcgaagtaaaccctcgtgtatcccgttcctctgcattggcatctaaagcaactgggtatccaattgcgaaggtggctgcaaaaattgcagtaggcatgacattggatcaaattaccaatgctgtaacaggtgaaacaaaagcgtgcttcgaaccaacacttgactatgtggtaactaaattccctcgttggccatttgaaaaattcaatttggcggatcgtacattgggcactcaaatgaaggctacaggcgaagttatggctattgaccgtaccttggaaggttctttattgaaagctatccgctccttggaaatcggtttagaccatattgagcttaagaaaattgctcatgagtccattgaacaattgattgaacgtttacatttagtagatgatgaacgtatctacgttgtggctgaagcacttcgcaaggggattagtgtagaaaaaatccactacattactaaaatcgatacattcttcattgaaaaaatcaagaatatcgtcaatgtagaaaaaacgttaactgaacatggtttgactcaagatgtattgcgtctagctaaacgttactccttccctgatactgttattgcgcgctatgcgaatacaacggcagaagacgtaaaggcgaaacgcaaagaatggaatattcttccaacctataaatatgtagatacatgtgctgcagaattcgaatctaaaacaccatactactatagtgcttatgcacaagaagacgaagttaaaccactaggtgaaaaatccgttgtagtacttggttccggtccaattcgtatcggtcaaggtgtagagtttgattactgctccgtacattcctcttgggcacttcgtaaagcgggttaccaatccattatgatcaataataacccagaaacagtgtctacagacttcgatatttctgattccttgtacttcgaaccattaacagtggacgatgtaatggaaatcattgataaagaaaaaccagctggcgttattgctcaatttggtggtcaaacagctattaacttggcgggcccattggctaaacgcggtgtaaaaattctcggtacatccgtagatagtatcgacatggcagaagaccgtgaacgttttgacgaattattggcaaaacttggtattcctcgtccagtaggtgctcttgttacatctgatgaagaagcgcaagaagcagctaagaacttaaaatacccattgattgttcgtccttcctatgtattgggcggtcgtgctatggaaatcgtatataatgataaagaacttgatgtatatatgaaggaagccgtagtagcgtccaaagaacatccagttcttatcgaccgttacatggttggtatggaggtagaggttgatgctatttccgacggtatcgacgtatgtatccctggcatcatggaacaaatcgaacgcgccggtgttcactctggtgactccatggcagtttatccagcacaacatttgagccaagaaattatcgatcaaatcgtagattatacacgtcgtatcgcaattggccttaatgttaagggcgttcttaatattcaatacatcgtggctgatggcgaacttaatgtaatcgaagttaaccctcgttctagccgtactgtaccatttatttctaaggttacaggtattaatatggtagaatgtgcaactcgaattgctcttggtgaaagcttaaaagatttaggcttgccacttggtcttgtacctaataaaccatatgtggctgtaaaagcaccggtattctccttctctaaaatgggtcttgtagaaatcgctcttggacctgaaatgaaatctactggtgaagttatgggtattggtcgtacctattctgaagcattgtttaaagctattaatggtgccaacatgcgtattccagaagatggtacaatccttatgaccgtagcagaccgcgacaaagcagaagcttgtgaacttgcaaaaggtttcatcgaccttggctatcacatcgaagcgactggtggtacaggcaaatacttcatcgaacatggtgttaattgcaaggtcgttaataaaatccatgaaggcgaagacaactgtgctgaccacattcgccaagataaggtggatctcgtacttaatacattgacagctggtaaacggcctgaacgtgaaggtttccaattgcgccgtctcgctgtagaaatgggtacaccatgcttaacaagtcttgatacagctcgtgaagtattgcgcgttgtagcaaaccgtaaagatgacgctaactacaatgtagaagcattacaagattttgaattggagtaataccatgagtggctatgtagaacagggcgaagtcgttcgcaatgagcaaataggctctgatgtgtggattatggatattcacgcaccaaaacaagcagcagaagcaaaggtagggcagttttgtaatgttcgcgtagcggactctacggcgccattattgcgtcgccctattagctatgctggatttgatgcacaaaagggtaccattacccttttgtaccgtgtcgtaggtaaggggacggatattatgactcgcctcgtgcctggtgatacattagattgtttaggcccgttgggcgaaccatttgtaacatctgagaatatgcttctcgttggcggtggcgttggtattgcaccgatgctttgtattgcgtcccatttacaagatggcgagtctgcacacgttatcttgggctttagaaatgaaagcgaaaccttctgggctgatttgttcaaggatacagctgtacaggttcatatcacaacagatgatggcagtgtaggaacaaaggggttcccaacagctattatgcctgaactaattaattctaatacattcacttccgttatgacttgtggccctacaccgatgatgaaaggtgtggctcaagtggctaaagagctcaatgtaccttgccaagtgtccttagaagaacggatgggctgtggtacaggtggttgtttaggctgtgcttgtgatggcgtaggtggtaagcgctataaggtttgtaaagatggtcctgtattcccagctgaggaggtgttcttttaatgagtgaacgcgatttaaataacaccgttacaccaaatccaaaactcgccatagattattgtggtattaagatgaaaaatcctattatcgctgcatctggtacctttggaaatggtcctgaatacgctggttatctagaccttagtaatgaggtgggggctatctctgtgaaaggattaacgcctaaaggtcgtcatggtaatccgggccctcgtattgcagaaactccatctggtgtattgaactgcattggccttgagaatccaggggcagagcattttgttacggatattttgccagaacttaagaaatatgatgtaccgctactagctaatatgtctgctggtacagtagaggaatttgcttggatggcagaaacactatctgtggatggtattgcaggccttgaagtcaatgtatcatgtccaaatgtagagagtgaaggtatggcatttggcgtagacccaaaggttgttgaacaagtaactaaagcggttcgtaaagtaaccgataagccggttattgtaaaactttcaccaaatgtaacagatatcgtggaaattgcaaaggctgtagaagccggtggtggtaatggggtcagcctcattaatacattgttaggcatggctattgatattcaccgtcgcaaaccattgttaggtaatatttatggtggtctatctggtccagcagtaaaacctgtggcgcttcgcatggttcatcaagtctataaaggggttactattcctattattggcattggtggtattatgagtggcactgatgctatcgaatttatgatggctggtgctcaggccgtacaagttggtaccgctacgatggttgatccaaccgctatttctcgtattgctcgtgaaatgggcgattatgtggaacgatataatctaaacagtattactgatattattggtgccgtacatcaatcatagtcgagctataacaaaagcaggaattggcgattgatatgtacccattttcctggacacatattatttactagcctaaacacatggatgcttccctgtattttacagggggcatccattttgtttttttctgaatccttttatcattgtaatagttgatgtattcttcaattgcccccgcaaaagcattgaatgatggatattccatttcacagccataatatatttccgttttcaacctaccgaaaaatgtctccattacagaattatcataacagtttccttttctagacatagactgaataattccatgttctttaagtgcgttcctaaaatatttatgttggtactgccatccttgatcagagtgaaaaatcaatcctgaaagattaggatactttttgaaagctctatctaacatacgagaaatctgttctaaattaggccttaatgccaagtcataggaaataacctcattcgtgttcatatctaagataggtgataagtaacactttccccatggaaagttaaattgagatacatcagtagtccatttttgaaatggagctgttgtactaaagtctctattgataatattatcggctattttgcctacttgacctttataagagtgatatttttcttttggtctctttcctgcgagccccatgattttcataagtctttgtactcgtttatgattgactataaaacctcgattaagaagttcttgatatacacgacgcacaccataacgtcccttatgctctgtaaaaatcttttgaatttcctctttaagttgtatatttctttcatctacaagatctactttagagagctcaaaataataggtggatttagccattcccatagcttttaaaagatattttagttgatatccttgctttcggagtgttttgataatcgctgctttttcgccttgagacgcgcagcttccttttcttctctcaaggcaatctctttttttatgacttcattttcagctttaatataagcattttcagctcgtaagcgaatgagttcctcgtattcactctcattgagttgtctaggtgaaatattctttgttactttcatgtcagaatcctttggtcgtcgccctttaggcttattgataagaccattgtatcccaaagtcttgtatttatgaacccattgatatagtagaccactattaattccagcaacaatagctacggaacgtaaagattccccagctaatacttgacatactaactcatatttatcctctgtagaccaattcttttttactcccttgaattgtcaagtcaaatgcaactctactgaatgataaacctcgtatggagttttccaatttaagcatttgcgcggtctaagatttatttctttcatttttgcttcaacatagctatctgattgattaatatccacagttttcgggaaatattctctaagcaatccattggtgttttcgtttgttcctctttgccaaggatgatatggtaatggaaaataaaattctactaaattcaactcctgactaatttctgcatgtttagaaaactctttccctctatctggagttattgtttctagaggttgattttttaaaagcttaatcatcgcttgtttgactaaaaatgcattcttttttgcaatttttttacatagcagatacctactttttcaatcagttaatgttactaagcaagccttaccagtctgccccataactgtatcagcctcccaatcacctaatcgttctcgattatttgcaggagctggtctatctgtaattaaattactaatttgaatttttccacgtctttcttcataattttttgtatgacgacttttaccacgatgtcgtagtttgcgaacaactcctctatttccatgtgataattctttttcatcaaaacgaccattatatatttccctgtaaattgtattgtaactaatagtgaagcttgaattttcaaatttcaatcgagaggagatctgttccggagaccattgatgtctcaaaaataaattctttacacattcatatagacttggattatctagcttttttcttggtttacaattaaagcgtctatttttatatctgtcatgggcttcacaaggtatgtactcgccattttgactatttcttttgatttctcttgatatagacgatttatttttcccaagtaaaattgaaatttctgtttgattttttcctatatcaataaaatgttttagaatttcgcgctcttttagtgtaaaatgagtataatgattcatggctcctcctgatttttagatgtctttgcaaacactattttatcagaaagccatgaatctttttttagttgcacttagattataaattcaagccataaaacttattaatatctggaccatgcaactcctcttgtttagcccaataccttatttgttcatgaaaagaatgaggcgatactccatttggtgtttctggccattcaccttgatagaataattctattgctttctttttaaattcataactatatctcatgaaaataccccctttactgagtgtccagtaaagggggtacatatcagatgccagttcctgcttttttgtgtatatgtaattatttcgtatcaatattggtaaatgtattatacgtaggccttatagaaatctataaattgttgtgccaccggtgaaagggcatgaccttttaaggttatgaatgcttttttgtagtcaccggaaaattcaggtaatttaatgcgtgacattttgcggtgatttaccatttctttggcatccattgggaccagtgctaccgtacgaccggatgatgcccattcaatggccgatgttttggtagtcgtaatagcgctcacatttagatgttccatatccgttaaggatgattgcataatcattcttacagatccaccagataaggagagggggcattgtttaatatcatcccaggtaatggtatcgtgttcgcgatcagtccaaaacacatcgcgtctaaacaatgcgtatagatgttcctcttgggttaagagaatatcaaatttttcagtatctaccatttggatattagcaattccaatttctgcactgccactgatgagctgttttacgacattggtcatgagtccttcgtaaatctcaaagtgtacagatggatatttcatggagaatgccggcaaatattgttgtacgatgggggtggaacgggatgcggaggtagcgatgcgcagcgtaccttcgatacgtgaatttaactgttgtactgcattatacgtggattcttcaatagaacataattgctgtgctttttcataaaaaattttacctgcatcggtaagttgtaaattggaacctcgttgacctcgtttaatattgatgagttgagctccaaattctgcctctaaatactttaactgcttactcaaagccggttgtgtaatgtggagaatttctgcagcttgtgtcatgtttcctgtttgaacaagggttataaaattgtgataatacgatgtgtccataaaatccccctttaatacacaaatcataataattaaaatttataactaataaaggaatagttattttaccttttaagaaatgtcatatatactatacacatcaagagaataaaagcacataaaaagttgttttaataatctcatcaatatttttgatatagttgcattgactaggaaagtgagtactactatgggcgtagtaaaaagaacattaagtaaagcaattcgcaattgggaagcacgtagattaatgacagcacataatgctggtgttagtcgtaaaaaacaattagaacgcgtatggccacatccattgacaacggaaaaacgtcatgaaatgaatcaaggcattactggtttagttcataatggcaactaattagttagtgtacgaattgattgaacacttaatctagtggtaataccacttcgatagcatctaatacattacaagtagcagctccatgactcatgtcttggagctctttttgtatccgttctatatcgataggtggcactaagatcgtaagatctattttttctccaaaggtagcatcataatgtagttgggcatcttgtagatagcgttctattgtgccatatagtgcatagtcaataatcgcttgtaattgtgttcttgtggtatgcaattcttttggcgcaagacgcaatgtttccgcaacggagtgggagtatgcacggattaatccaccagctccaagttttatgccaccaaagtagcgcgttaccacaacggctacatttgtaatacctgtttttttcaagacttctagcataggctttccagcagtgcccgatggttcaccattatcggacgagcgttgttgttcttgctttggtcctaatgcgaaggccgtacaattatgccgagcatcccaaaactctttattgatacgggcgataaaagattgcgcatcctcttcggtactacatggatatacggtagtgataaatctggatttctccactacatattcatggcggaattctttggcaatggctatgaattccacggtagagctagttgtatctggcatttcctcacctccattcttattgctaccactatagtatttattcatcatcatcactttattataagctatttataaaggtaatgtatagattatgagcgataatgtttaataatatatatatttatttacacaatatatagcgctacaatcgcaattattaattcccttacagaaaaggaataaccctctagttttagtaggatattgacgaattgagaatctatgttattataaatagtagatatatgagtattagttcatgtgataaatattacaaatatactgtatttatcatattttatgaatctctgatttgaattgttttgaaggaagttatatatgagtacaaaaaaacaagagtttgacattacgggcatgcattgtgcagcctgtgtaaaacgtgttgaaaacgtcgtatccaaggtggatggcgtagcttctgtaaaggttaacctactaacccgtaaggggagtgtagagtttaaggatggcgctaccgtagaaccacaacaaattatcgatgccataacgaatatcggttttggtgctactgaagcggatgaaacgaaacaagaaatagaaaaggttaatttaaaaccacatattacacgccttattattgcggcttgtatggcggtaccgatgatgatcaacatgaccttgcatcgttttggtattcaagcgttgccggtttgggttgaatttgtattagccactatcgctcaatttggcccggggctcatgttctataagagtgcatggagtgccgtaaagaatggggctcttacgatggatgtcctcgttgtgatgggtacgactgtggcatatctatttagtatttataactggcagttccatccagaacttggtcctcatggtatttactttgaaacctctgcatggcttatcacatttattcttctaggtaaattgttagaagaggtagccaaggggcgtacgtctgaagcgcttcaaaaactaattgctttgcaaccggcaacggctcatgtattgcgagatggtgaatttgtagatattcctacctctaaggtggtagctggcgatgtattacaagtgcgcgccggtgaaaagattcctgtagacggtactattacagaaggttactctaccgttgatgaagctatgcttacaggtgaaagcttacctgtagaaaaacaagtgggctctgaggttattggggcgactatcaatttaagtggtgctttcacaatggaagcaaagcgcattggtagcgacacgatgttatctcaaattatcaaggtcgtagaggaagctcaaacatctaaagcaagcattcaacgtattgcggatattgtggctcaatactttgtaccaactgttattggccttgctgtactaactggtctcgtgtggtactttattgtaggcgattctatcaatgtagcccttattaatgcgaccgctgttctagtaatcgcttgtccatgtgcgcttggccttgctacaccgacatccatcatggtaggttctggccttggcgcagaacatggtgttctcatcaagagtgcggaatatcttgaaaaggctggtaaactcgatgccatcgttatggataaaacaggtactcttacacaaggcgtgctcgatgtaacggcattcaaaaactatagtggtgatgaaagtgtgaacatgtccatcatgatggctcttgaaagcggcacatcgcatccgattgctaaggctatggtttattatggtgaagatcatggctacaaggggaaggctgttgaacttgaaagctttggcgatgtaccgggtaaaggcttgcaaggtgcctaccaaggcgtatctgtacaacttggtcatagccgttggatgagtgaacttggttatgatttatctaaggtgcaagatgatattcaacattttgaagaacaaggtgcatctgtatctgttctcgctgtagatggtgtcatcagtgcattgtgggctgtagaagatgaattgcgtccagaaactattgaggttgtaaaagaactacagtctcaaggcatcgacgtctggatgcttaccggtgataatcgccgtacagctcaatatattgcaaaacaagcaggcattactcatgtaattgctgaagtgttgcctcaagataaggctagcaaggtaaaagaattgcaagataaaggtcttgtagttggtatggttggcgatggtatcaatgatgctccagctcttgtaactgcagatatcggttttgctatcggtagtggtacagatatcgccgtagaagcagcagatatcgttttggtacgcaatgatttgcatacattggtacaagctgtacgtcttagccgtaagacgatgaccaatattaaacaaaatttattctgggcattgatctttaactgtatcggtattcctttggctgctgtaggtgccttgaatcctatgattgcaggtactgcgatggcatttagttctgttactgttgtaagcaactcacttcgtttaaaacgagctaaaatttaagattacgcatagagtataatcaaatactataaagcacctatacgaaggtataggtgctttattttaaatctggctatatatttaattcctatgaaataagtgtttttagactgattgagatttgttatactaaatatagttattcatctaaaagagaggtgctatctatgaaattaaaaacacgagatattgtttatattggctttattgctgccttatgtgcagtagcaactacaattcgcattgaaataccaggtggggccatggttcacttaggatctgctgcattatttacatcatccattctttttggcggtttatatggtggtttaggtgcggctattggttccgcattatttgatctttttggtggacatacgcaatacattgtattctctttctttattaaaggtattgcaggtcttattgtaggtggtatgacagcaggttacttgccaccatccattacaaagccgacagcatcctttacacgcattttgattgctcttattattggtacaatttggactgcatttggctatttcttagcatggtggtttgttcttgaaagtgcagccgtagcagctagcaaaattcaatactccttaattacaagtgctgcaggtattgtggtggctattatattgacaccaaaactacaaaaggtagtacgtagattatttacaaaaaactaatagagaataattttaatcgcatcttatttttctaaatagttaaagggcgcttattagcatatatgttagctaatgagcgcccttttattttcgttttatatcatttgtttattgattttgtttatggcactaaaagttacaaaggtcgtttaggttttctgccatggtaggatgtgtgaagatttgatttttgaagtatgtatatggaatgttgttatccatagccattttaatgagattaatcaactcttcagcaccttgagaataaagtgtagcaccaaggattaaatcgttatctgcatttactacaattttaaaagcaccttttaaatagtcgtttacatgagctcttggcatggtggctacgagcatttctttagttttaactgtatagcctttgttgatagcatcttcttctgtgagacctacacgcgccagtggcggtgttaaaaatgttgtgtaaggaatatttttgcgatcttttaatgtgtattggccatttcctgtaagtgcaccaaatacaatgcggaagtcatcgagagaaatatacgtaaattgaggaccaccgtttacatcgcctacagcatatacgccaggaacggagctttcacacgtatcattcactacgatagcaccgcgttcgttagtagtaatatccgtattttctaaaccgatgttagctgtatttggtttgcgacctgtagcatataaaacggcatcaaatgtatagttttgaccatttgcagtaataacaggtttgttgccatcattagatacagagtttaatattacatcgttaagaatagtaataccttgctcagtcaagtactcgttagctaattcttgtacgatcggttcctcccgttttaagatgctagattcaatattaaatactgttacctttgcacctagtttagcgtataagctggcaaattcaaggccaataggaccagcaccgataacgcctagtgtacttggttgaggcgataattgttgaatttctgtgctgttatagaagcctgttgctgcgctgatgccatcaatgttaggcttaatcgctacagcaccagtgttaataataattgtttcaccagataagatgattttgtcttccccagctgtaacggcgatttctttattactaatgaattcaccatgtccagtatatacatcgacatgttcatttgtgtctagcataccgaagtttttattgcgtaaacgagatgtaactacctcgcgttggtttaatacttgatcgtaagataagccttttgatgcggctataatcatcgttttagtaggtatacatgcgatattaatacatgtaccaccatacatgagtggattttcttcaatcatagctacggctttgcccatggagccaaatttagctgctaatgttttaccggctttgccgaaacctaggacgataagatcataatgtttggtattcatacaatacctcctatcttttatattgaaaatattagatgtgtttattataacatattacagtagatataaaagtaaaatatgaaaataattctctataatttagatgttaagtatttctacttgacacatctttttttatgctgtagtatatgtaaagtaatatgacttgacagtgatggaggtggcgaaatggaagaacgagtacttatcagtttactccttgatttctatgggccattgttgacggataagcaacgcatgtccttacaacttcaccacgaagatgatatgtcccttggagaaattgctgaggagcttggcgtatctaggcaagctgtacatgataatttacagcgtgcacgtcatattttgaatgactatgaatctaaattacacttggtggctcaatatgaggcacgagagcaagtgataaatgaattaaaagatacgttgccagcggatgtgctttcacaatcgcgggtacaacaattattgacgcaaatggagggataatatggcattcgatagtttgtcagaaaaactgcaagacgcctttaaatccttaaaaggtaagggcaaaattacagaagaagatgtcaatcttgcgttgcgtcaggtacgaacagctctcttagaagcggacgtaaactttatggtggcgaaagatttcgttaaatccattaaagaaaaggcccttggtgaagaggtgttcggatccttgaacccagctcaaacggttattaaaatcgttaatgatgagttgacagctctcctaggtggtacgcaaagccgtatcatgatttccagtaagcctccaacaattattatgcttgttggtttacaaggtgctggtaaaacgactacagctggtaaattggctgtataccttcgcaaacaaggtaaacatccaatgcttgttgcagccgacgtatatcgtccagcagcgattaagcaattgcaagtagtaggtaagcaaatcgatatccctgtatttgctgatgaaacaccaggagctaatccagtagatattgcgcgtcgtgccgtagagcaaagcacgcatatgttgaaagatgttgttatcatcgatacagcaggtcgtttggctatagacgaagttctcatggacgagttgtccaacattaaagctgctgttcgacctcatgaaattctactcgttgtagactctatgattggtcaggacgcggtgacgacagcacaaacgtttaatgaaaaattaggcgttgacggtgttatccttactaaactcgatggtgatgcgcgcggtggtgctgcattatccattaaggctgtaaccggtttgccaatcaagtttacgggcgtaagcgaaaaaatggatggtttcgatgtattctatccagaccgcatggcttctcgtatcctcgatttaggggatttcaaaactcttattgaaagtgtacaaggcgctattgatgaagaagaagctcgtgaaatggcgcaaaaaatggcgaaaaacaatttcaccttagatgatttcttgaaacagatgaatcaggtgagaaagttaggaccattgcaaaatattattggcatgttaccaggcatgggtcaaattaaggatcaattaaaagatcttgatttgaatagtaaagaagtacgtcgcatcgaggctatcattaaatccatgacggctgcagaacgacaagatccaaatattttaaatggttctcgtcgtaagcgtattgcgatggggtcaggtacacaagtacaagacgttaatcgcttattaaaacaattcgaagaagcgcggaagatgatgaagcgtttacaaggattgcgtggcggtaagggtggcttccctggaatgccaaaattaccgtttatgtaatacatggacaggggcgctgaacctgtccagcacatcattataaggaggtgaatcccacatgttaaaaattcgtttgactcgtttaggtgctaaaaaagctcctttctaccgtatcgtagttgctgacgcacgtgctccacgtgaaggtcgtcctgttgacacaattggtcaatatgatgctactaaacaaccagctatcgttaatgtagacgaagaaaaagctttggcttggttagctaaaggtgctcagcctactgacactgttcgctccttgttcaaaaaacaaggcgttatgcaaaaatttgcagacgctaaaaagtaattaatagagaggcatactgtgatgatagaattaatttcattaattgcgaaatcattagtgaagcagcctgatgccgtttctgttaccatggtccaaaagggcaatgttgaggtctatgaacttcatgtagctccagaggatatgggtaaagtcatcggaaagcaaggtcgaattgcaaaagcaattcgctctgtggtgaaagcggcggctattaaagagaacaaaaagatatctgttgatattgtctaaaagggagtgttccaatggaagaaatgacattacgtgtccctgtagcagtaaaagcaaaagtaacagaagatttgaaagcgaaaattgtatccgatcttgaaactcgccttgatatggtgaataaagatttggaagcaattgagtttcaagctcaacgtattttagctgatgcagctaaagttgatgcgacaagtcttactgcaattcgtcaacaaatcgacgaagagaaaaataaacgcttggctttcaaagaagaagtaacagctaaattgaaagacgctcaagaattgacattggggactgaaattcctcaaggtacattagagcaaacagttaccgttaaaatcggggataatttggatgccatgatgggcgctgaaatcctattagaagacggtaaaatcgttgcgtttcgtcaataatgaagcctaacgatttcatcactataggtgttatcatcgccccgcacggcgtgcggggtgatcttcgtattatgcctagaaccgattttccagaacggttcatgcatatggatgcctgttacatcgatggtaaagaataccacgttgcatccgcacgatttcataaacaattcgtattagcttcgtttaaggaaattcctgatcgtaatgcggctgaattattcgctaagaaagagattcaagtacgtcgtgaagatttggtagaattaccagaaggtcgttattatatttttgatatgattggccttgaggtgcaagatacaaagggcaatgtacttggtacattgacggatgtattacaaccgggagctaatgatgtatatgtggtttccaaagaaggggaaccagatcaattatttgcggccattgatgatgttatcattgacatcgatatggacaaacgcatgatgatcgttgatccgcctgagtgggtataatccatttaggcggttttttatatctatttataggtgtcttatgatagaattaattataagatagctatatatagatatatgataataataagtgtattcgggggaggcctgttgtgaaaatagatattatatccttgtttccagagttttttgatgccttctttagtcattccatcataaaacgagccatagaggcgggccggctagatatggctgtgacgaatccgcgtgattttagtcataataaacatggacaagtggatgatacaccgtatggtggtggggccggtatgctcatgatggcgcctcctatttttgaggctgtagaatctgttgcctctaattatgatagtgctgttaatggcaactatgaaacggatgagatgtgtgatgagatgagcctcattggtaatcctggtgaaagtatacgtcgtcgcattgtatttatgggtcctacgggtcaacctttcacacaggaaaaggctagagaactagcaacctatgatcaactgattctcgtatgtggccattatgaaggtgttgactatcgcgtagaggaacatttagtagatgaaaccatttccattggtgactatgtgttaacaggtggcgagttgccagctatggttgtagccgatgcagtggctcgaatgattcccggtgtattaggcgcagctagtggggcccaagaggattcattttatgagcctttattagaatgtcctcaatatacaaagcctccagaatttagaggctgggttgtaccagatgtattgcgcagtggtcatcataaaaatattgccacatggcgtcaaaaggaagcactaaaacggacacgattgttgcgtcctgatttgttggaacgaccattaacaaaagaggaaattaaacttttaaaagaaattgttgaagaagagtctaggctatgaattttaagtgttatgatgttgtagagattcagggaaagcgatacgtagttactgaagttatctcctatcaagaattcatcatagaaaagacagtgaattatactcttaatgatgaaatgtataataatgaattaggtactcataaaggggctaagaattggaccgaatatggtcttatgctagtggatggtgaagataaaaaatggctcaccattgtaaatggggaaaaagactattgtaccttttcagagactattttacgttcaacgccgcctaaaggatataaactgtacgataaaggcttacaacgagtcatgtctgttaagggtgaaagtaaagctagaagcggtgataaggccgattataaagaatatagatcaattaaaaaggataaaaccaatgtattctttattgaggactggcatggtggtttgaaggatcaggctcaaggtgagaggattcgtttgtcggatgtacatcgacggcgagatcaggctgctcaaacagcgagtaaaaagattcgtaatgcagcacggagaaaagaatggacacgattgggtctgagttggggaattattttattctttttgggatatttattcgtaggagatatgacttggcatgaattgcgtgatgaagtaggattcccatataccatggaagagcgcattaaagattcctattattatgaaccgcaaggcacaaaagacggtttgatggtatatacgtcaaagcaagatccaaatgcaacggctatcgatcttatcgatgctgtgtatggcaaggtttataccattaaacaagacactaagtctcctgagcgatggattgtcatttatacgactaaagaggtatctgttattagtgtggttaatggcactacgtatgttgaagtgggagaattaaaaaacttgtcagattcggagaatacacgcatagcgactattagaaatgacagtgaaatattgttacgatatgcgtatatggtggaattaaagaataagcagggtcgtaagacgttatcaaatataataaaagattgatatagtattgatttcagttacgaaatcaaacgaaggaatattatatgtatgaaccaagtaagaatactgtttacatagccatagcctttacatctatagcagccctagtaggcgcttattcgtattgggacgatgttagctatgctctatgtgatgtggtcaaaccagaatcgaataatggtgaagtgcggctcgttgatgatgaaggtaaaagctataccttgattaatcatggtgatggaaaagaaactgcgctctatgatgatgctgagaagtctgttacctttcatcgtgatgagaagggtgatattatatgggatgcaggcttagccagtttgattccaactttggcggtaggatactatgcatttcatggtttttcagctccaacggcatatatggatgcacctagtatgacctatcgcgctacatcacctcttaccccttttgatgcaagtacaggcgctagtaaatctaatagtgcaagagtggctagaactattaatgaaatgactagaaatcgttacaatactaaaacgagtaatcgagcacatagaattggtgaaaagtatggctttggtagtgtaggggctcgaacttcgagcggtgcctcttaatgaaaggatgaacaatgaaatcctatattgatgagcttgatagaaatatatttaatttcgtggaatatgaaggatatgatgatcggtatccttccttgtccatgcaggccttttcatccgacttttacgatgaaattcgccatgcttcacgtagattatttcaaatattttgtaaagctgcaaaagtatttcagatggcaccagatgactttgctcgaaatatggatatgccagacaatttaattccttatttacataagtcgaatgccttagggttaccgacgtggttatctcgctttgattttgttctcgatgtaaatggcaatttgcgcatggtagaacttaatgcagatacgccatgttttctcattgaaagctattatgccaataaagtggcagctaattatgtaggacgaaaacatcctaatatagaatgccgaaatgaattacatacatttttaaagcgcatgtatgacgctgttttatctgctaagtatggtagaaaccaatatgaatctatgcgggcaaatagagagagcctacctaaggatccttttgtattctcctgctttcatgattattttgaagactacggtacaacacaattccttatgagggaattaaaaacagcctgtcctgaggcagatacgcgattcatatccttttatgatatgaagattgatgatgagggcattcctttagaagatggtagtcatgcgactctattgtatcgattgcatcccatggaacttttaattgatgaacaaacaccagatggcgaacctctgggtgaaatgttcttagatttgtacgaggatgatacattcgctctttttaatccgccagagtcaattattttacaaaataaatcctttatgtccttagtatatgcattgtatttaacagatcaattttttacgaaaccagatcgagatatcatcgagcgttatttggcaccatcctattttgaaaatgatttttcagctcttgatgatggcctttatattcaaaaggaaatttggggccgtgaaggaaggcatgtacaagttgttcaaaagcgtggtgatacatctgagctttacatggaaaagctagttgataactatgacgatatcgtttgtcgcgacagtaaaaaggtgatgtatcaagactttatacagcagaaacgttttactcatacagtggattgtggagtgaaagatggatttttaaccttatcctgttttatgcttggcgatcaagcctccgcggtagggtgccgtttttccccagaggagatagctggtacagaagcatactttgtaccattactaatagagtaagagaaatactatgtaattttgaccatatagagtatggttaaacaaaggataatagatatacttcgtagcagttgtggttatgtctactttagagagggtgcgtatggagtttaattgttatgatgtcttagaggttcatggcagccgttatgtaatcactgagaaaattaaatatatagagattattccaaaagcagataaggaacaatcctataggggccagccgtctatgacaaaatcacctggtgattattggcatgaatatggactagaggctgttgagggaatcgataaaatatggttaaccattgagtataatgataatgaatggtgtaccgtatctagaacatcctttcatacacggccggggaaagattttacattacatcaaatcggtttagaaaaggttgtcgatgtggatggtgaaagtggtgcctccgtaggggaccgcgcaggatatcgagaatatcagctaccttgtgaaggtggtgctagtgtattctttgaagaagagtggtttgaaggtaaaaaaatgtttgccgaaggatcacgagtgcccttggcgaacattcgtctttgtaatgatgcagccgctcaagctattaagcaaaagatgcgtaacaaatcaatgaaaaagaggtttggatctattgctgttggcgtggggtatggtgtactatttttactatttttattttggtcggacaatgatttgtcttggcatagtatacgcgctatgtttggagtgccttacacggtaaaagaacatatgcatgacacatctgcatattatacaaaaacagattcggatagcgactatgtatacacgtctacactagatcctgttagtaccgcattagatttgattgattctgtgaatggtgatattaagaatgagcgggataacttagaagagggacatgaagttattgtattttattctggggacttggtgtatctcatcactaatacggatggacaaactagggttaaggtatgtgaacaatcaaaattaacacaagaggattggaaaattattgatcgtacattaatcagctctcatatactcgataactatgcgaccatggttcgactaggggataatacgggacgcgaacgattgtatcctaccagcaactctaacaacacatccaatacaaaattatattattaggaggcttattatgatttatataccagatgtattattgacaattttttatgcttgttttggcattatactgatgttaacggcgaatacggttatcgatttcttcgtgcctggaaaatttagtgaagaaattaagcgtggtaactgtgctgtggcgtggctttcagcgggatcatttatcggtatcggtgaaattttgcgcgctgttattatgtcaccagccgtgactacggctgatacgtccctgttacatggcattgtagccagtgttgtatacgctgtgctaggtattatactatttgtaacgggttatatgtttatcaatatttggcatcgtaaatataaattatccgaagaaattatgcgtggtaatacagcggctggtattctcgtatttggcattttcgttggtcttgctcttgttattagcggtgctgtgcactaagggagcgttttatgtataagccaagtaagaaaaccatataccttacaggtgctttcgccgcagttgctggtcttgtaggtatgtattcatactggaacgatatctcctatgctgtgtgtgataaggtttatccagaggcaaatgagggggaggttcgattaaaggatagtcaaggtaatcggtattctcttttaaaccatggtgatggaaaagaaaccgccctgtatgacgataatcgttcagttacctttcaccgtgataatggtggaaacttagtgtgggatgctggtttggcaagtttgttaccaactattgcagctgggtattatatgtttcatgggtttaatcctcctacggcacgtatggatggacgaactatgacgtatcgcgcggtatcgccattaaaaccgtatgaacaacctaatgaatatacgtcatcaggatcaactatacatggctatggaggtggaagaacctttcgtagttatgaggataatagaagtaagaaagcatcatctatagggcaaaagtctggttttggtagtgctggtgcgcggtctagtgcttcataatggatgcaatgacactatatgttgattgaagttgtttagaaattaggagatttagcattggcaaatttatatattgggctcgttcattatccgattatgaataagcataaagatgtgataacgacggctattaccaattatgatattcacgatattgcacgcgcatctattacctatgatgtgtctaaatattttgtgattcataatataccggctcaacgagaattagcggctaccattatggaacattggaaatcaggctttggtagtacctataatccggacagaaaagatgctttcacaggcgttgaactcgttaattctatcgctgtggcggtgcgtactatcgaggaactggaaggggtaaaacctatcgtagcaactaccgatgctagaacttatgataatacaatttcctatgcacggatgcgtgaacaccttgaaaatgagggccgccctgtgttagtattatttggtaccggttatggtatgacaaaagaaacgatggaaagctttgactatattttagaacctatatatggccacggtgaatacaatcatttatctgtgcgtagtgccgtttcaatcatcttggatcgattgcggggcgaagcatggtggaataaataggaggcgtctatgtcaggacattcaaaatgggcaaatattaaacataaaaaaggtaaaaccgatgcattgaaggctaaattagctacgaaaatcggtcgtgaaattaccgtagcagcacgtatgggtggtgcggatccaacaggtaatatgcgcttgaaattggctttgcaaaaagctcgtgaaaacaatattcctaaggataatattcaacgtgctatcgataaaggcgttggcgctacggatatgaacgcatacgaagaaatcgtatatgaaggttatggtcctgccggtgtagctgttactgtagaggttatgacggataatcgtaatcgtgcggctgccgatgtgcgccatgccttctccaaacaaggtggtaatcttggtgaaagcggttgtgtaggctggatgtttaaatctaaaggtgtattcgttatcgataaagaaggtcacgatgaagatgaattgacattgttggctcttgatgcgggtgcagaagatcttaaagcggaagatgatgtatttgaaatctatacaacaccagaagattttgatgcagtagaacaagccttggctgatgcgggcatagaaactgaagtggcgaagattaccatgattccagatacaactatcgaattatttggtgatgatgctgtaaaaatgcaaaaaatgctcgatgttttggatgaccttgatgacgtacaaaacgtataccacaatggtattttgccagacgacgaagaagaataatagaaacggggagtgctctaggagcactcctcattttttgtcttcctctagtttctccttgtaaaaaggtaataaaaatatcgtgatttcatgaatttcgatgttctaatatgctataataaaatagattatgagtgttacgaggtaagctttggcttatctcatttttaaactgagggggatggagtgcggattataggaatcgatccaggtacggcaatttgtggctatggcattattgacgtgcagggaagcaagctaacgccagtagtctatggggctattacgacccctaaggaactgacagatgctcaacgtttagaaatcttatttaatgatttaagcgatattttagaggaatataagccggataagtttggtgtagaagaacttttttttaatcgtaatgtaacgacggcgattaaggtaggtcaagcgcgtggggttatattgctggccgcagagcaacagaggatacctatatatgaatatacgccattacaaattaaacaggctgttaccggttatggtaaggccgataaaaatcaggttatttacatgaccatgaatattttggggattcgtgagaaaattaagcccgatgatacggcggatgcattagcagtcgctatttgtacggcgcatagttctcaccaagatagattgatgaggttaattaaatgattgggtatgtacgaggcattgtaacacatctattcaaggaatcttgttatgtagatgtacatggtgtagggtaccgtgtgtatgtgccaaccactacacgacaacaattaatagaggggcaagaggccacattgtttacctatctcaatgttcgggaagatgcgatgcaactatacggattctggacagaggatgagtacgaactttttattctgctcatttctgtttctgggattgggccaaaggtaggcttaggcatattgtccggcatgacgccagaggctttcaaattggctgttattaatggtcaggtacaacagttaacaaaattaccgggcatagggaaaaagtcggcagagcgtcttgtcctagaattaaaggataagttagtgaagatgactcagattagtgttgaaacacctgcagccatccaaccaattggtgttacacatagcggaccgagcggggaggcgattgaggcactggtatcattaggatatgcgcaaaaagatgtggaagcactagttgaatccttaaacgatggttcaaaagatgtatctgcattgataaaagcttgtttagttgaacttgggaaaggacgttagccatgaacgaagaagtacgcctcgtaggcggcggtgatcgagaagaggacgtgtggcaatatagtcttcgacctaagtattttaatgagtatattggccaacgagaggctaaggataatctgaatatttatattcaagctactaaacagcgtggtgaagccttagatcatgttctgttatatggtcctccggggctaggtaagaccacattagctggcattattgctaatgagctgggtgttaattttcgtataacatcaggtcctgctatagaaaaggccggagatttagctgctattttgacgaatcttgatgaacatgatgttttgtttatcgatgagattcatcgactttcacgaagtgtagaagaggtattgtactctgctatggaggactatgccttggatattatcatcggcaagggaccaagtgcgcgttccgtccgcattgatttaccaaagtttacgttggttggtgcgacgacacgagctggggcattggctgcgccattgcgtgatcgattcggtatcgtgagtcgattggaatattacaaacaagaagagttagaatttatcgtaactcgtgcagcggatattttgaatatcggcattgagcaagctggtgctagtgagattgctcgacgctcgagaggaacaccgcgtattgcgaatcgattgttaaaacgagttcgcgattttgcacaagttgtggggaatggcgttattactgcggatattgcagatgaagcgctaaaacgtctacatgtggataagatgggacttgaccgcattgatagacgagtgttgaagtgtattattgaaaattatgatggtggccctgtggggatagaaacaatagcggctgccgtcagtgaagagagagataccatcgaagatgtgtatgaaccatatttgatgcaattgggatttttaggtagaacaccgcgggggcgtgtggctactaaattggcttatgatcatctaggtatttcgcaaacagggaaataaaatgaaaaagaaacaattaccattaatgattatgacaacattattgttaggcattcatagttttgcaactgttgaggctgcacaggtagtaggtaaattgggaacaaaacctgttgtagctaaatcatcaacaacggtgtcgggaaaaactcctgtaaaagctgtgcgtggaactattggaaaatccacgtttaaaccgctcgttacaaaaccggtgccaaaggttactgcatctacgactattagacctaaagttacagcaactacaactgttaaacctaaggttactgcacaatcaagcgtaaaaccaaagggtacgaccgtagccaatgcaaaaccaaaggttgctaatactactgctgtaaaaccgaagattacaacttctactacaacatctcgtgcaacggccgcggtggtgacgaagaatcaagtagaacaagtaacaacgcgcgttcgtgtagaaaatacaccggacgttcgcgttttacttggatctcgtcgtcaagatgcctccgtatcgagtgcaaatggcgtaactgttcttactagcaataatggtaaggttggtagtcataaggttgtatccgtaggtgtacggggcaataagattgctgttaatggcaaagctcttgattctgttgtcacattaaaacctacgagtggtgatatttttacctttgaaggcaaagcgtatcgaggggctcttacattgcgggccaataatggagctatgatggttattaatgcagttccattggaatcgtatttatatggtgttgttccacaagaggcgattccatcttggccagcagcggccttagaagcgcaagctgtagcggctcgtacgtatgcactacatacgatggagcaaaataaaaatcagctctatgatatgagcacgtctacagatcatcaagtatatggtggtgtgagcggtgaaacacaaagtactacggctgctgttaatcatactaaaggcgttgttatgctatataataatcgtcctattaatgccttgttccattctgatggtggtggctataccgaggacagtgtcaatgtatggggcaatgatattccgtacttgaaaggtgttaaagatttttcaaatagcaattctagtgcgtcaaattggacagtatccacaagccgtagcactttagagggcaagttaaatgctgctagtaagggagtgggtaagttgaagagtattcaattaaccccattgggaaatcctggcaaggccacagccgatagaggcgtgtctgggcgtattaaatcggcgaccttcgtaggtactgctggtaaggttacggtaagtggtgatgatttacggggcatgttaggtttaaagtcaacattatttgatttttatgtcaatcaaaatccagcaagttcaactggtaaagcgtatcatactttcacaggcaagaatgatacagtgtacattaaaggtcatgggtggggccatggtcttggtatgtcacaatggggcgccgctgaaatggcgaaacgagctggtacgggggacactaattattatcaaacaattttaagacattactatagtggtattacattgaaaaaaatgtattaaggataagaatgaaagttacagattttgattatgatttaccagaggagcttattgctcaacatcctgtagagcctcgcgatacatcgcggttgcttacattggataaaataactggtgagtatacacataaagcgcatttttacgatttacttgatgaattacaagcaggagatgtcctcgtgtttaataatacgaaggttatcccagctcggttatatggtcaacgagagggttccggtggcaaggtggaggttttattacttacaccatgtggagaaaatcgctgggagtgtctcgttaaacctggcaagaaatgtccgattggacaggttattgtgtttgatgagcggttgaaagcaactgtattagataaaactgattttggcggtcgtatcgtggaatttacctgcgatggtgtatttgatgatattattcaagaaattggtgaaatgccgttaccaccatatattcatgaaaaacttgaggataaggatcgctatcaaacggtgtatgcaaaggaaaaaggatctgctgcagctccaacagcgggactacactttacaccggaactattagaaaaaattaaagctaaaggtgtagagctcgagtttgttacccttcatgttggtttaggtacctttagacctgtatccgtagaaactattgaagatcacgatatgcatagcgaattctacagcgtatctgaagatacagcgcgtcgtattaatgaagcaaaatctaagggtaagcgtattattgcagtaggtactacatcgattcgcaccttggaatcagcctctactgatgatggtatactacatgccacaagtgggtggacaaaaatctttatctatccgggctataaatttaagatggtagatgcattggtaaccaatttccatttaccacaatctacattattaatgctcattagtgcactagccggtcgtgaacattgtttagcggcttataaagcagctgtaaaagaacgatatcgattctttagttttggcgatgctatgtttatacgttaggagattctatgccgagtattacatatgaattacagaaaacatgtcctcacacgggtgcccgtgcgggtttgttacatacgccacatggcacgtatgaaacacctatgtttatgcccgtcgggacacaggcgacagtaaaaacgatgacgccagaagagctaaaggccattgggtcacaagtgattttaagcaacacctatcatttgttcttgagacctggtcctgaactcgtagaggaagctggtggccttcataaatttatgaactgggatcaagcaatccttacggatagtggtggtttccaagtatttagcttaggcgatatgcgtaagattaccgaagaaggggtaacatttagatctcatatcgatggatctaaacaatttctttccccggaggtggccacaaaagtacaggaacaacttggatctgatattgcgatggcctttgatgaatgcattccttatcctgcagaacatgattatgcgaaacgctctacagcgcgtactacgcgttgggcacatcgatgtcaagaggctcgtcatgctcatgatagacaaggtatgttcggtattgtgcaaggcggtatgtataaagacttgcgcaaacaaagtgcagctgaattagtggcgatggactttgaaggatacagcattggtggtttatctgtaggggaaccacatgatttgatgaatgaaattctcgaatatacaacaccgttgttgccaaccaataaagctcgttatttgatgggcgttggtacagctgactgtttggtagaaggggtggctcgcggaattgatatgtttgactgcgtatatcctacacgagttgcgcgaaatgggatggccatgacttggcatgggcgtcttaatattcgaaatgctcaatatgcgcatgactggggccctcttgaagaaggttgtcaatgttatacatgtaaaaactattctcgtgcttatttacgccacttatataaggcggaagaaattttagcattgagacttgttacataccataatttatatttcttattagagtttatgcgccagatgcgtaaagctattttagaggatcgattccctcaatttagaatgcaattttgggataactttaataaataatataaaaaaactagtcaaattcattttgaatagatatacttataaagataagatgaattttagtgaggaggattacccatgggtgatatcgaacaaattttacaaactagctggccaatccttttgatggtcgtaattttttatttcttgttgtggcgtccacaaaagaaacaacaaaaagaacgtactaatttgttgagcagcttgaaaaaaggccaaaaaattgtaactattggtggtatctatggcgaaattatcgaacttgatgatgaaaaagttaaggtacaagtagcggaaaaagtagaaatgacatttgctcgtactgctatcgcatccgtagtttctaaaaaaaataaggaaactaagtaatgataacaaaagaagcagtgcgccaggcgtgcaagtcccagcgcgctgctttatctattgcagattgtgaatcttgggcacctaagttgtgtcacgagattgttcaattacctcagtatgaacaggcacaatcgattatggcttatttagcgatgcctaaagaagccaatttggatgatgttatagaacatgctttacaggcaggtaaacgcgtttatgtacctgtttgtactgataagactacgatgattgctgtacgacttcataatcttcacgatgtagtgcatggcgtcctaaatatccgtgtcccaaaggaaccctatgaaatcattgatcctaaggatattgattttgtgctagtgcctggtgccggatttgatcggcttggtggtcgtatgggaatgggaaatggttattatgaccgttttcttaaggggctttcaccatcgaactatattggtgtcgcatgggaagcgcaaattatgaaaaacccgattccgatggaacgctatgatcaacgtatgcccgctatcgttacagaacagggtgtaattcatgttatttagaagggagcaacgattttgaaaggcaaggctatagttaaattcttagtcgttattgctgcaattattggttgttttgcgtattttattggacccctagccggttcattaaagcaaggccttgatttacaaggtggtacgcatattgtgctagaagcagaggatactgagcatggtacagctgataatgatgcggtagaacgagcaaaacaaattcttgaacgacgcattaatgaaatgggtctgtccgaacctattgtgcaacgggaagggtcaaaacgtattatcattgaattaccaggtgttaaagatcctgatgaagcaatgaaacgtatcggtaaaacagcggtccttgaatttaaaaatgaaaaaggcgaaactgttatgaccggtgatgacctaaaagatgcaaaagaggaaatgggtcaaaataaacaacctttagttgctatcgagcttagtgatgaaggggcaaagaaatttgctgatttaacatctaaaaatatcggtcgtcatatttccattactctcgatggtgaagtattaaccaaccctgtagtacaacaagctattactggtggtaaggctactatttctggtagtaagtccttagatgaagcaaaagatttagcaattttattgcgttctggtgcattacctgtaaaaattaatgtccttgaagttcgtactgtaggtccttctttgggtcaagattcaaaggataaatccgtagtagcatttggcgctggtattgccatgatcatggtattcttacttttgctctatcgtttatccggctttgttgccaatgtagcattgcttgtatatgttatgttattacttctcgtgttaggtaaaggttttaatgcaactatgaccttgccgggcattgcgggtattatcttgtctatgggtgttgcggtagatgcgaacatcctgattttcgaacgttttaaggaagaggttttctctggtaaatccatgcgtgttgctatggaggctggttttaaacgggctctttctacaatcactgatgcgaacgtatccgttatcatcacagctggtatcttgacggtcttaggctctggtccggtaaggggttttgctatcagcttgggcgtaggtgttgttgtaagtatgtttacagcgattactgtcagccatttcttgcttcgcctattaattgattgtaactttactaatcatccattctggtttggtgctaatatctcaccaagtaaaagttctgatgattttgcaccaaaatctttgaaaggaggtaagcgcaaatgagtttcaacgtaattagacatcatcgttggtggtttgtgatttcctccattctagtaatcattagtttaatttctatttttacaaaaggctttaactttggtattgactatactggtggtaccattgtagaggttcaattcactaaacctgtagaggttagccaagttcgtgatgtattgaaaacattcgaccttgaaaatgcacaaattcaattgtctggtgatactgcagaaacagcaggcgaagatgttatgattcgaactcgtaacttggagccaagtgaaagtgcagctgtagtagaaaaattgaatagcgatatcggtgaaaacacagtaaaacgtattgaaaccgttggtgctgttatcggctctgaagtaacgcaacatgcgttattgaatcttgttattgcctttgctgtattggcgctctatatttcttatcgttttgaatatagaatagccgtatctgcattgactgctattttccatgatttgattatggtattaggtgtattctcattcttccaattagaaatcgatgcatctttcttggcggccatcttaaccgttgtaggttattccatgaacgaatctgtagttatctttgaccgcgttcgtgagaatgctcatactcataaacgtactgatacatttgaagatttggcgaatgcttctattgcacaaagtattcatcgtagtatctatacattagctactgtaatgtttgcctgcgtatctctttttgtatttggtggggatacaacaaaaaacttcgctctatgtatgattattggtttcgccagtggtgcatactcctctatctgtgtcgctacatctttatgggtactctggaaaaatagaaataagaacgacattcgcaatcaataatttgattgttatggtgaaagctataaaccctaatcgcattttattgcgattggggtttttcttatgagtgagatcattgtgattcaaagagaaataacatacaataaatactatataaggttttaagtagaaagagtgatatagtgagttcacaacgtttatggagtcctgcttttatcaattatggtgtaagtagtggcattttttatatgacccaatatgtcttagtggcggcattgcccataattttaacagctgaattaggtggtaccgctttagatgcgggattggctatgacatatttccaaatcgggaccatcttatgtcgtccttttgcaggacgtttaattgatgggttggacaaacgcataattttattgatttcatctgttttgttcttcattattatggggttgtttaatttaaccacatcgttacaaacgatttttgtgctacggggcatacatggcgctatatttgcattaggtactaccgttatggcagcactggccgtagttgttttgcctgcttcacgcaaaggtgaaggcatcaatatgtttgctgtattctcaaatattgctatggtattagggcctgctgttggtttatatacattacaagcctatggaagttcagcgctatatatttttctgactataatgactgcactagcttttattttgagtaatgtcattcgattgccaaaagagttagctaaaccgaaacaaaaatcttctaagggatggagtatatctcaatttatagagaaacgaagccttccttgggcattaatgggattgtttataggttttacatactctggtgttctagtatttattcctattgaattgaatagtatgggaacaggtgtatgggggagtgtattctttgctttgtttgcgctcatgataattattagccgaccattagtaggtaaagtatatgctagatatggctcacggttcgtcatctatcctggtgtaggcctatttatcgtaggcctcgctattcttggagtggtatcgactccggttgggattatttgtactgcgccattacttgggctaggctatggagctgctcaacctgcatttcaagcgttagcagttcaatcagcaccaatagaacgtgcaggcgtttctacagcaacatactttttagcacttgatatagccgtcggggctggatcggttatcttagccttaattgcaaatgcattaggctatcaatctttatatcaaattacatcactcataatgatcatagcactagctttatatcatttcgtaattcgtaaacactcatatatagcggaataagcattataaaaagcacgtatttcttatagtatgtatgatagtaaactatcaaaatactaggtaaatacgtgttttttatatgaaatagtaatgatatagtaacaagctacgtaaggcaaaatattgattataaatgagttaataatgaagttgtaaaaagtggtgaaaaagcggttgacgttttctttgtttgtgatatactaatacaagtcgttaggacacagcgtaattcggatgacagcacatcattaaaacatgtgaatttaattcaaaaaagttttaaaaaagtgcttgacgaaatactctgaacttggtattataatcaagtcgctagcgcacgacagtgactagcaaacagatctttgaaaactgaacaatgataggtaatcaatcatatgattgaacatatgccagagtgcgggttttgacatagtcaaaaccaaccataattcaaagttacttaaatgtaacgacaacacataatgagctactcaaatagcttcaagatatcttggagagtttgatcctggctcaggacgaacgctggcggcgtgcttaacacatgcaagtcgaacgaagagcgatggaagcttgcttctatcaatcttagtggcgaacgggtgagtaacgcgtaatcaacctgcccttcagagggggacaacagttggaaacgactgctaataccgcatacgatccaatctcggcatcgagactggatgaaaggtggcctctatttataagctatcactgaaggaggggattgcgtctgattagctagttggaggggtaacggcccaccaaggcgatgatcagtagccggtctgagaggatgaacggccacattgggactgagacacggcccagactcctacgggaggcagcagtggggaatcttccgcaatggacgaaagtctgacggagcaacgccgcgtgagtgatgacggccttcgggttgtaaagctctgttaatcgggacgaatggttcttgtgcaaatagtgcgaggatttgacggtaccggaatagaaagccacggctaactacgtgccagcagccgcggtaatacgtaggtggcaagcgttgtccggaattattgggcgtaaagcgcgcgcaggcggattggtcagtctgtcttaaaagttcggggcttaaccccgtgatgggatggaaactgccaatctagagtatcggagaggaaagtggaattcctagtgtagcggtgaaatgcgtagatattaggaagaacaccagtggcgaaggcgactttctggacgaaaactgacgctgaggcgcgaaagccaggggagcgaacgggattagataccccggtagtcctggccgtaaacgatgggtactaggtgtaggaggtatcgaccccttctgtgccggagttaacgcaataagtaccccgcctggggagtacgaccgcaaggttgaaactcaaaggaattgacgggggcccgcacaagcggtggagtatgtggtttaattcgacgcaacgcgaagaaccttaccaggtcttgacattgatggacagaactagagatagttcctcttcttcggaagccagaaaacaggtggtgcacggttgtcgtcagctcgtgtcgtgagatgttgggttaagtcccgcaacgagcgcaacccctatcttatgttgccagcacttcgggtgggaactcatgagagactgccgcagacaatgcggaggaaggcggggatgacgtcaaatcatcatgccccttatgacctgggctacacacgtactacaatgggagttaatagacggaagcgaaaccgcgaggtggagcaaacccgagaaacactctctcagttcggatcgtaggctgcaactcgcctacgtgaagtcggaatcgctagtaatcgcaggtcagcatactgcggtgaatacgttcccgggccttgtacacaccgcccgtcacaccacgaaagtcggaagtgcccaaagccggtggggtaaccttcgggagccagccgtctaaggtaaagtcgatgattggggtgaagtcgtaacaaggtagccgtatcggaaggtgcggctggatcacctcctttctagggagacatacaccgagccatgagcttggatgtcacttaggtcgacactttggcacctaacattgttcggttttgagagatctgttatctacaagataataaatttctcatatattaaatgggcctatagctcagctggttagagcgcacgcctgataagcgtgaggtcggtggttcgagtccacctaggcccaccatttaatacatgggggcgtagctcagttgggagagcacctgccttgcaagcagggggtcaggagttcgaatctcctcgtctccaccatttagtatttgacatctatgatgttaagtgctaaactacataagctgatttatacatcggcagatttgttctttgaaaactgcatagaagtgttaattattatatatttgtaaggtcatctcttagaatttctaagtaggttgacccgagcacataggaaataattctctgacttattggtgacgtacatgaaaatgtacggctacaaaataaacgacaatgtatctaatgcatgtcataaaatctaagtaaagattttaagggcgtacggcggatgccttggcgatatcagccgaagaaggacgcggtaagctgcgataagctacggagaggtgcaagcaacctttgacccgtagatttccgaatgggggaacccggcagtggttatgcactgtcacccatacctttgagtatgaggagggcacctggggaactgaaacatctaattacccagaggaagagtaatcaaacgagattttcttagtagcggcgagcgaacgggaaagaggccaaaccggagcgggcaaccgcaccggggttgaggacagtcatcaagtgtaaatgaggtagaagaatcgagttggaaagctcagccgcagaaggtgaaagccctgtaatcgaaaccttgcatacatgggactgtatccagagtaccacgagacacgtgaaaccttgtgggaagcaggggggaccaccctccaagccaaaatactgatatcgaccgatagcgcatagtaccgtgagggaaaggtgaaaagaacccctggcggggagtgaaagagaacctgaaaccgtatgtctacaaacagtcgaagtctgtatatatatcaggacgacggcgtgcctattgaagaatgaaccgacgagttactgttgctagcgaggttaagtggaaaacatggagccgcagcgaaagcgagtctgaacagggcgttcagttagtgatagtagacccgaaaccgtagtgatctatccatggccaggttgaagcacaggtaaaattgtgtggaggaccgaactcgtgagcgttgaaaagctttgggatgagttgtggataggggtgaaatgccaatcgaacacggagatagctggttctccccgaaatagctttagggctagcctcgaggttgagagtataggcggtagagcactgatcgggctaggggccataccggttaccgaacctagtcaaactacgaatggctatacttatactcgggagtcagacagtgaatgataaggtccattgtcaagagggaaacagcccagaacaccgactaaggtccccaatgtcatactaagtggcgaaggatgtggaatttccaaaacaaccaggatgttggcttagaagcagccaccatttaaagagtgcgtaatagctcactggtcgagagactctgcgccgaaaatgtccggggctaaagtatgaaaccgaagtcgtgtcatatgcagcaatgtatatgggtaggggagcgttctcatcggattgaagcagtaccgtaaggagttgtggactggtgagaagtgagaatgtcggtatgagtagcgaaaagaatggtgagaatccattccaccgaaagcctaagggttcctgagcaacgatcgtcgtctcagggtaagtcgggacctaagccgaggcggaaaagcgtaggcgatggacaacaggttgaaattcctgtaccggtgtgaatcgtttgatcgaaggagtgacacagtaaggtaggtcagcacgcgattggaagtgcgtgtttaagcatgtaggttgagttataggcaaatccgtagctctaaaagctgagatgtgatgacgagctgtttacagcgaagtgattgatcctacactgtcgagaaaagcttctaggtagagacacatcgcccgtaccaaaaccgacacaggtaggcggggagagaatcctaaggtgcgcgggaaaaccctcgttaaggaactcggcaaaatgcctccgtaacttcgggaaaaggaggactcatgtagtgtgaagggcagtaacgcgtggagcatgaatgagtggcacaagagaggcgcaagcgactgtttaccacaaacacaggtgcctgctaaagcgaaagctgatgtataggtgctgacacctgcccggtgctggaaggttaagaggaggggttagacttcggtcgaagctctgaattgaagccccagtaaacggcggccgtaactataacggtcctaaggtagcgaaattccttgtcgggtaagttccgacccgcacgaaaggtgtaacgacttgcgcactgtctcaacgagggacccggtgaaattgaagtacctgtgaagatgcaggttacccgcgactggacaggaagaccccatggagctttactgcaacctaagattgaacttagttaatgaatgtacaggataggtgggagacttagaatctagggcgccagtcttagaggagtcgttgttgggataccaccctttgattaattgatttctaacaggccgattaacaaccggctggacagtcttaggcgggcagtttgactggggcggtcgcctcctaaagagtaacggaggcgcccaaaggttccctcagagcggacggaaatcgctcgaagagtgtaaaggcagaagggagcttgactgcgagacggacaggtcgagcagggacgaaagtcgggcttagtgatccggtggtgccgagtggaagggccatcgctcaacggataaaagctaccctggggataacaggctaatctctcccaagagtccatatcgacggggaggtttggcacctcgatgtcggctcatcacatcctggggctgaagtaggtcccaagggttcggctgttcgccgattaaagtggtacgtgagctgggttcagaacgtcgtgagacagttcggtccctatccatcgcgggcgcaagaaacttgaagggggctgctcctagtacgagaggaccggagtggacgaaccgctggtgtaccaattatcctgccaagggtacagttgggtagctacgttcgggacggataaacgctgaaagcatctaagcgtgaaaccagccttgagatgaggtttctcatagcataagctagtaagatcccatgtagacgacatggttgataggccaggtgtggaagagctgtgaggcttggagctgactggtactaatagatcgagggctttacttaataacaataagcggaaatgtgcaacaaatatatataacttctatgtggttttcagagtacaaactctgacagattcagtggcgatagctacgagggtccacctgttcccatctcgaacacagtagttaagctcgtaaacgccgaaagtacttggctggagacggcctgggaggataggaagtcgctgattaagctaaaaaggctaaccgtatggttagccttttttattatatatacttacatgtagagtccgaccagggcacctgggaaaggtagggtgtgagctaacagaggagcgtagcgacgtatgggagccacacatcaccttcatccgaacgtaagatttctccagctgcaaagcagcgatgagaaatccacagtgaggagtgataggaagtcgctgattaagctaaaaaaggctaaccaaatggttagccttttttattattctacaccaaccattacgctagtggatttaataacagccacaacttctttgccaactgctaagcctaagtctttaacggattgaattgtaatatcagctgtaagaatgttatcgttacctacattaatttttacaattgcgtttacagcaccttcttgaatttcaatgattgtaccttttaattgatttcttgcgcttaatttcatggaatactccttataaaaatatacaatacaaatctgtttttattatatctttatacaaaaaaataaccatgacgcatatcacatcacggaatattatgtatggagcgggcgaagggaatcgaaccctcctctcaagcttgggaagctcgcattctaccgatgaactacgcccgcatgatgtacatattgtatcatactataatatatacattcaagtggagcttgtttatatactctatacccatagtggttgctgtattgtattgatataataattaatgtataacataatgaggaaggaggcatatgtatgtcaaaaatttataaaattcataaatggttatctatagtttctgtgctatttttcttaatgttctgtattacaggtcttgtccttatgttccgaactgaattaaatgcatgggctcaaggagggtcacatcattcctcgtcatcaatggcgatgagccaacaagaaatatctatttttaattatgctgatgaaggtgccctattagtgaaagaaaaatatccgtctaaggatattttaaatatttctccagctatgggggctgcacatattttacggtatcgcattattgattcttccgcaactgtagcacctccagcgcgtatggggatgggaggggattatgtattatataatcctgaaacaaaggggcttattactacgcatcatgaaacgcctgcacatccttgggttcgaagtgtattacatacacttcatcaactacatacacgattagaccttggtaaaacaggaatttatattgtaacaattttatctttagtatgtgggttatctattatttctggtatttttttatacggtccatttcgtaaaagctttgccaaatccactgtattgtctaactatatgaaattaagtacattacaccgagaatttgctatggttgctactgtatggggatttatcttatgtattacaggtgtatggataggtggattttttattgctaatgacagctataatgcagatgtactacacactgcaaagcaagaactttcagttggtcaatctgacattttacaaccatctgaagctatctctcgaattatgaaagcatacccagatcgtcagcttatatctatagattatccatctaaatttaataatcatcattatgcattttatttaggtgctgaaaatgatgatgatccagctatgttcttgggccaaccagtctatgctaatttatatactgattctactaaggatatgtattctacaaaaaatatcccatggtattttacgggcatgactacaatgattaatctccatattcataatcataatacgatggctcttaaaatattatgggccatctgggatattgttcttattgtaggcattgtgactggtattattatgactattaaaaagaaatttggcagagctagtgctacagaatctaaagtatcggctgagataaaacatgtttggcgtacaccaatctgttgtggtaccttagtattacttggatttattatgccactttggtccaatccagttacaaatactatagcaggtatttgtttaactattcctctagttgtattttttatttctttaattagaggatttaatcattaagttattatattcttcctgtatctaatcagcgtgcttcatcattagtttattgattgatttcgaactaaaatgatataataatatatattaactaggttttttatgtgttaaaacctgtatttatattatgattgagaaagtggaagttactatgaaatatatcaaagcatttattcagtctgaatcatctggcggtattatgctattacttgctgcgattcttggtgttataactgcaaactcgccaatagctgaacagtatttttctctcatgcatatttatttaggtccaatggatgtattggagtgggtaaatgacggtcttatggctttatttttcctatatgtagggattgaaattaagactgaaatgatttccggtgagctaaacaccaactcaaagagattgttaccagttttagctgcatttgccggggtggtaacacctgcgttagtttacttcttaattgctggatctgtaccagaatatacgcatggttggggaatacctactgctaccgatattgcctttgcaattggtgtcattatgatgcttggtaaacgcgtatcacaagcgatgaaggcattcctgtcggcattggctgttatcgatgatttaattgctatcatagtgattgccatattttatggtggtggtgtagattttcctcatttaatcgttgctgctattgtgacgggagcgttgtggtataccaataaacaaggctatgtgagaccagttttatatggtgtactcggtgccgttctttggtattttgttttaaaatctggtgttcatgctactatcgctggtgttgtgttagctatgactattcctgcaatgggtaagttggatggagaaactgtttatcctatgcacgcatgggcggataaattgaaaaattgggttaattttttgattattcctctatttagcttcttaaatgctggtgtatccttctcagatgtttctgtagatcatttgttccaccctgttgttttaggtgtttcattaggccttatcttgggaaaacagcttggtatattctccgctgtttacgttttagttcagtctaagattattaagatgcctactaatacaacatggcccgaggtttatggtacagccattgtttgtggtattgggtttactatgagcttatttgtggctacattggcatttccacctggtgtaactcaagaaatgtctaaaattggtatctttataggctctattatttctggtttattaggtgctatagttttaattgtggcttataaaataagatctattaagaacaaataataaacttatcatattaggaaggaatcatatggaacggatatttgtacttttacgttctcctggttcggctactgccgttttactaggagctacacttattgccttaatcgtagcaaattctccattggcaacacaatatatgtctctggttaatttaaaattaggtccattaacaacgatggagtgggttaatgatgcattaatggcgatttttttcctctttgttggattagaagtaaaacgtgaattggtaagtggtgaactaaatacgaatgctaagcgtatcatgccaggtattgctgcattatttggtgtattagtacctgctattatttactatcttattgctggatttagtgaagtttacgttcatggatgggctattcctactgcgacagatattgcttttgctataggtgtaataactgcattaggctcaagagttcctaactctatgaaagtatttttgacagccttagctgttattgatgacttaattgccatcattgttattgctatattctacgcagcaaatcttaatcttttctatttatttgctgctgtagttgtaacggggttattgatttattgtaatcggtctggttacgttagatctttgtcttatatcattcttggaatcattttatggtactgtattcttcgttctggcttgcatgctacaatggcaggcgtaattttggcgatgacaattcctgaacggggcaagattggtcgtaaatatgtgagaccaatgcaacattgggaacattatttatctaactgggtaagttttgttattgttccaattttcgcattctttaatgccggtgttaaccttgatggatttggtatggctgatttaagtcatccagttgttttaggcgttgcattaggccttattttagggaaacaaatcggtatctttggtgctatgtttggcatgattaagttaggtattgtacctatgccagcagaagctaactggaaatttatttatggtacatccattgtatgtggtattggttttactatgagtatatttgtttccgttctagcttttgatccaggtcatgctcaagagatggctaaaggtggcgtgttgattggttccatcatttctgctatcattggttatggctacttacgaattgtaggggctaaacgaaaagaatgtcatattggggtatatcataattgctaagttaagcaataaaggggaatgtacatgattaagagaattttaatactatgtactgtgctatgtatgactaatatgatggccttcgcacaggcgaagtcggttgataagggacaacgaggtcatcatgtacagaaaattcaaaccatgttagtgcatcaaggatatcttaatgattcagcagatggtatttttgggcataacactgaattagcagtacgtaagtttcaaaaggctaaagggctcgctgtagatgggcgtgtaggtacggctacgatgagtgctttagaaaaggaagaaactcgttttggcgattccgccatctcgcgtagtcataatggggttcccaataagtatgtacgcgttatgacgatgcatgctagtgcatatagtgctcaagacccaggaaatagcaattatacggcaactggcagtcgcttaaaaaaaggtattgtttcagtagatccacggattataccattaggtacaaagatgtttattgaaggttatggctatgccgtggctgatgatgttggcggagctattaaaggtagccgtattgacctagcctttaattctcgtgcagaagctttgcgatttggtcgtcaaactgtaaaagtatatattttataactatatataaactgttgaaagctctagtctatgactagagctttttccgaattatatattttttctcaatgcgaatattcggaaattcatggtataatatagatatcaatataaatcgagtattcagcaaaggaaggcttatgaataaagttcgacgtgttgaaagaatggtggcaatgactaaattattagtcgattctccacaaaaacttatatctcttaattatttttgtgattttttcggaatggcgaaatctacagtaagtgaagatttaacctgtgtccgtcaatcgatggaacattttcagttgggtactctagaaacggtagcgggggtagctggcggtgttcgattcatacctcatcgaaaaggcgagcaggccaatgaaatcttacgcgatgtgcagcaacgtttgcgtgaaccagatcgtattattcccggtggatttatttatatgtcggatattttgtatgattggcatgtgatgactcggttgggcgaaattattatgactcgctttgtagatcgcaatccagattatattttgacggtagaaacaaaagggattcctttggcggttatggtggctagggctttcaacaagccacttgttatcgcgcgtcgtgatagtaaggttacagaaggatctgccattagtattaactatgtaacgggttcatctggtcgaattcaaacgatgacattaactaaacgcgctattccacaaaatgcgaaggtgctaattattgatgatttcatgaaggctggcggtacggctaaaggtcttaccgagcttgtacatgagatgaatggtaaagtggtgggaacaggtgttctagtggctactgctgaaccaaatcctaagttaatcaatgattatgaatcactatttacgttccatggcattgatgaaagtacaaatgaaattcacatcgaacctgtatttgatacgattgatagataggagtttactatgaatattgcaagtcttattttagcagctggtaagggtacacgaatgaagtccaaattgccaaaggtacttcataaagttggcggtaaagctatggttgaacgcgttctagaaactgttcaatctcttggaaccgataaggatgttgttatcgttggctttggtggtaatgcagtacaagactatctagaaggtcgtgctgaatttgtacgtcaagaagagcaaaatggtacaggtcatgcagtaaaaatggcagaacctgtattaggatcttttgatggcactattttattgttgtgtggggatacgccactcgtaactaaggaaagtttagaagctcttttaaaagaacatactgcatctggagtagcggctacaattttaacggcccatatgccagatccaacaggttatggtcgtatcattcgtaatgaacaaggtcatgtagtacgcattgtagaacaaaaggatggcaaaccagaagagttagctgtacaagaagttaatactggtatgtatgcttttgatagtaaaaaactatggccttgtcttagcctattatccgacgataatgcacaaggtgaactgtatattacagatgtggttggtattctcgtaaatggcggcgataaagtaagcgcttatatgactgaaaattttgaagaatctttaggtgtaaactctcgcttgcaattggctgaagcagaatctattttaaaacatcgtaaaaatgtagaattaatgaccgctggtgtaacgattattgatcctgacaatacctatgtagcaccagaggttactgtgggggctgatacaattctacatcctggtaccgttttagaaggcaatacggtgattggtgaaaattgtgaaattggacctcatacacgcttgacgaatgtaactgttggcaatgatacggtaattcattttacctatggtcatgactgcgaagtaaaagatggcgtagatattggtccatatgttcatttgcgtcctaatacggttattggcaacaaggttcatattggtaatttcgttgaggttaaaaattccaatgttggggaaggcaccaaattccctcatctatcctatattggcgatagcgatgtaggttctggtgtcaatatcggttgcggtacgattacggtaaattatgatggaaaaatcaagcatcgtacaactatcggcgatggtgcatttgtaggctgtaacagcaatttggtagcacctgttacaattggtaattatagctatgtaggagcaggttctacgattactaaaaatgttccagataaggcattagctgtaggtcgtagcaagcaaattgtgaaagaaaattgggttacagacgatactttcaaaaagaaataggaatttattaaaaatttttcacacaagataggaaaaatagtatacaataataaggcaataaggttgtatatctgtaatatttcgttacatatacattgagtaactaactaagattacggagaaatgaaagggtatcaaaatggcatttgaagacggcaaaaaacttaagattttcacaggtaacgcaaatccagagttggcaaaggaaatttgtgattatttaggtttgcctttaggtgaagcgtttgtaggtcgctttaataatggcgaagtacaaattatgattgatgaaagcgtacgtggcaaagatgtatttatcattcaaccaactagctatcctgtaaacgataatttaatggaattaatggttatggctgatgcgttaaaacgtgcttctgctcgtcatattacagctgtagttccttactacggttatgctcgccaagaccgcaaaactcgtggtcgtgaaccaattactgcaaaattagtagcaaacttgatgcaaacttctggtattacacgtcttgtaacaattgacttgcatgcaggtcaaattcaaggcttcttcgatgtgccagtagatcatttatatggtgcatccattttagctaaatacattaatgaaaaaaatcttgaagatgttattgtagtatctccagatcttggcggtgttacaagagctcgtgatttggctgaccgcattggtgcgccaattgcaatcatcgagaaaaaacgccctgaaccaggcgtagctaaagttatgaacctcattggtgatgtaaaaggcaaaaactgtatcatcgttgatgatattgtagatacagcaggttctcttgtagaaggtgctaaagcattaaaagaatttggtgctaaatctgttatggctgctgttacccatgctgtattaacagatccagcaagtgaacgcattgcaaactccaacattaaagagcttatcgtaacaaacacaatgccattaccagaaaattgcaaattagacaatgtaacgcaactatctgtagcgccattattgggcgaagcaattatgcgtatctttcatgaagtttcagtaagtaatttatttgataaataataggtgattcttgaagttagtagtaggccttggtaacccaggcaagcaatatgaagcgacaaaacataatattggatttatggtcatcgatgccattgcggatagcatttctcacactccttggagagaagaacaaaaggcagaggtgtgcagtattaatgtagctggtgaaaaggtattgcttgtaaagcctcaaacatttatgaatgcaagtggcgaatctgtaggtccattaatgcgatactacaagatcgatccatctgatgtgtattgtatttatgatgatatggatttaccggtaggcaaattacgtattcgaccaaatggtagttctggtgggcataatgggattaaatctttaatctcccatataggaacagaaaattttccgcgttttcgcgtaggtattggtcgtccattaccacaatggaccgtcattgatcacgtgttagcaccatttagtgaagaaaatcaagagaaagtacaaaaaggtatcaaagacacagtaaaagctgtattaggcaccttagaggtgggcatagacaaagggatgaatcagtttaatcctaagcgtcgtccacagcgataaataacatgcataagggcatgagtctcattgagattcatgccctttttacgaggtatatatgagcaatcaagaaaaaatgccttttgtagaggctttagaatcatataaggaacaacattttgtgccttttcatacacctggtcataagattggtgttaaagcgcctcagttactaaaggactggatgggagcagcactgccatatgatttaggggttatgtatgctctagatgatttacatgaacctgaaggagagttaaaagaggcgcaagacttaactgctgaattatatggagctgatgattgctggttctctattaatggtacaaccgctttaattgaagcgatgattatggggacagtaggtcctgatgaaacgattatcattcctcgagaagcacatcgttccgttattagtggattagtgttatctggtgcaaagcctgtttatatggattgccaatttgataatcggtggggtatccctttaggtgtatcagtggaggatgctattaaaactatggatgctcatccagaggctaaggcgattctcttagtgtatccaaactattatggtgtaggtgtagatattgtaaacatcgtacaagaagcacacaaacgagggatgattgttcttgttgatgaagcgcatggacctcatttaccattttcagaaaatttacctgttgaagccattgcgtcaggtgcagacttagtggcacaaagcacgcataaatcggtaggttctttgacgcaaacctcttggctattaggtcaaggcgatttaattaataaacgccgcattacacaaatgcatcagatgttacaaagtacgagtcctaattatatatttttagcatctcttgatatggcgcgccatcagttggctacagaaggtagaaatttggtaaatcatgctgtgtcattaagtttacaactacgacgtgaattggaagccataaagggcatttctatcatgtcaagcaaggatgtggatagacctaactatgatgtaacaaaggtgttgattgatgccaaggaattggggcttaccggtgtagatttcgaaaaacgattacgtgctcaccatatcgaagttgaacttgtgcaggcgcatcatgtgttagtactcatcacgataggtgatacagaagaatctatcatgactcttgtaaaggctgtacaggctataagcgatgagatttgtagtaagtcatccttaacaaatcgtgccggtgaacaaatagagaaacgtactgagactattcagtcagctaccattctgcctgctcctgttgtacgtatgacaccgagggaagccctttataaggatcgtaaatcctgtatgtttgagtcggcgttacatcatatttgcggtgaaaccattgcttattatccaccgggaattccctgtatatccgtaggtgaagagattacagaatctgtgttacaatatatacaacaacggcgtgcattggggtatatgcccaatggtgcagccgatatgaacttagaaacgatacaagttgtagaggagtagagatggggactttaatcatactagaaggtggcgatggcagtggcaaagctacacaaacaaagtgcttggtagaacgattacaagcagaaggtcatcgtgtgcgcagtgttagctttccaaattatgatagtgatgcatcgatgccgattaagatgtatttatcgggccaatttggcacggatgtagactcggttaatccctatgtagcaagctctatgtatgctatcgatcgttttgcatcctttagaatggattggcagtcattttataatgatggtggcatcattattgctgaccggtatacgacgtcaaatatggttcatcaaatggtgaaatatacggatggggataaacgtgttcaatttttagaatggttggaagactttgaatttgttaagtttggtttacctcgtcctgatgcggtatgtttgcttgatgttccattagacgtgacggaatctttgatgtctgagcgaactggtaaaacagggggagagacaggggatatacacgaaggaaatagagtgtatttgcaagctgttcacaatgcctatgatgaattagttaaacgttatcaatggcatcgtatttcctgtgcccaacaagatgaatctggaacttttacaatgcgcagtataaaatctatacataatgacatatacgatgtggtaaaaacgatattgcgatagatacaatcacatatcttaggacatggcgactctttaaaaagtcgccattttcctatataatagtaatattggacaggataggagggattatgacatattttgataatgtaatcggtcaagatacgattaaaaaccacctaactgaattggtaaaacggcaaacattaccacatagcttgttgttctatggagaggctggactcggtaaacttgatatggctatagggttagcatcgttgattttaggacggcaggtattttcaggccataatggggctgaatatctagacgaggtaaaaaatgcacgccttgccaatggtgaaagtgaaaagaaaatagaagcggaaggtttacctatttatatggataagggggatgcattttggattcgtcctatgaaatcaaccttaaaagtagaacaatggtattccctattgcaagatcatctatctgttgctggtcttggaaaccgcgtcgttatcattgaagactttcacatggccaatgctattatggcgaatgccatgttaaaaacgattgaagaaccaccggcacaggtgtacttcattattattacgaacaagattaatcttgtgttgccaacaattatttcacgatgtatgggtgtgggctttcaatccgtttcggatgaaagtattcgctacgcattgcagcaacgtggtattacaggaaacatagatgaagctatttcgatgggccatggtaaccctgctattgtggaagcattagtacaacagggaaccatagccatgttggaattagccatacaatggatgcgaacattaggctctgattcacgatggtttacaaagattgccatatggtgtgagtcattgacccgtgatgatgcattggatttaatgcattggttacgattgttaagtcgcgatatgatggcccttaaatgtggtgcaaccatagagcaactgcaagtacccatgcgtagaacagtattattagaattattaccgcattggccaatggccgctttagcaactgtagctcatgaaacattgcgcgcggaacaggcactgcggttacacataaaaatcgctctcgtgatggacggtcttagtatcgcccttcacgatgctcgtgaggaggtttagatggtaaccatcgttggcgtacgatttaaaaaggctggtaagatttactatttcttacctggcgaagaaactctaacaatcgatgatggcgtcattgtagagacagcgcgtggcgttgaatatggtacggttgtaattggaccaaaagaggtggcaaaggattctttggtgatgcctgtaaaagaagtcatgaggaaggccacacctaaggatttacaacaattagaaaagaatgaggaacgagaagaaaaagcatttgctatatgcttagaaaaaattgcgaagcgcaaattgccgatgaagctaattaatgtagaatacacatttgatatgaataaaattgtattcttctttactgccgatgggcgcatcgatttccgtgaacttgtaaaagatttagcgactgtctttagaacgcgcattgagttacgtcaagtaggtgtccgagatgaagctaaagtattaaatggcataggtgcctgtggcagacctttatgttgttctaactttttaggtgatttctcaccggtatcgattcgtatggctaaggatcaaaatttaagcttgaatccgactaagatttctggtgtatgtggtcgacttatgtgttgtttaaactacgaagatgatttatataaaaagggtggagacctttatgtaaagaaggatagaactccatcgcctcgcgacgtagagccaccaggtatcggtaaagaggtcgtaactgatgaaggtatcggcaaggttctcaaggtaaattatcataaacatacggttaaggttcagttggaggcaggtcgaaccatcgatttaaaatggtctgatgtggcattgccagatgaataatcaagagcaactcgatgatttgattatcgatgatttaaagatatatcagcggcaagatcaatttcgcttttcctttgatgctattgcattggttcatttttgccgatttaatcagcgtcatcggtatatagacttaggtacaggtacaggggtattaccgttaataggtacatctctaggtgctggtcatattacaggtgttgagattaatgatgtaatggctaacatggctgaacgcagtgttctatataatcataaatctaatgttatatccatagttcaaggtgattatcgcactatgaattatcagcaatttggttccaaaccttttgatggtgttctagtgaatcctccttatttcgatcatcgacgaggtgaagtacctaataatcatcatcttagcttggcattacatgatggttgtacttctattgatgatgtatgtacagcggcttctcgattaatcaaaaataaggggcgtttatggatggtatatagtgcacctcgtttatcagagctcatacatgcattaacagcggttggatttgctgttaaacgaatacgcatggttcatggtatgattcataaaccggctaaaatcgttttgattgaggctataaagggcggtgaacaagggttaatcgttgagccgccattaatcgtatatagccaacctaatgtgtacacggaggaggtgtctcgttggtatgaacgaaaataacaagggcaccttgtatttagtgcctacgcccattggcaatctagaggatatgacgtatcgtgctgtacggatactgggagaggttgatgctattgcagccgaagacacacggcacaccggtatactgttaaagcattttgaaattagtaagcctttgatttcttatcatgaacataataaggaagaaaaaggaactgttattatagagatgttattagagggtaagaatattgcttgtgttagtgatgcgggcatgcctgctatatctgaccctggtgcagatcttgcatcgaaggccattgcacaagctatatccgttgtacccttaccgggtgctaatgcagcattaacggcgcttattgcatctgatttagatactaaacaatttacattcttcggttttttaccaaagcgtgggaaacatcgcaatgatgctcttcagcttatggcgaaacaacgaggaacgctaatattttatgaggcacctcatcgtttacaagaggttctctgtgatatgtatgaggcctttggcaatcgaccgattacgattgctcgcgaggtaactaaaaagtttgaaacctttttacgcagtgatttagcttctatttgtgagaacctaaatcaaattatctataagggcgaatttgtcttagtgataggtggttgtgagacgggtgaaccgactgatgatatggaagaacaacctatatcctatgaagcagccgtagccgaattagtagaaacaggagtaccaaagaaggaagctattcgcgaagtagcaaaacgctttggcgtttctcgccgtgaggtttataatattgtagagcgataacactttcacaagtgatgaatagaaggagattatgatgggcgatacaaagaagacattttatattacaactccaatttattatcctagtgctaaattgcacataggtcatacatattgtacatctgtagctgatacaattgcgcgttttaaacgtttagctggttatgatgtacgatttttaactggctctgatgaacatggtcaaaaaattcaacgtgctgctgaggcacaaggtattacaccattagaatatacgactaatattgttaatggatttaaagcattatgggaaaaaatgcatatttccaatgatgactttattcgcactaccgatgcacgtcatgaaaaggtagttcaagaattatttacgaaagcttacgaaaaaggcgatatttacaaagcagaatacgaaggttggtattgtacaccttgcgaatccttctggactgaacaaaaacttggtgaaaatcatacctgtccagattgtggacgtcctgtagagcgcgttaaagaggaaagctatttctttaaacttggtaaatatacagaccaatggttgaaatttatcgaagaaaatcctgattttattcaacctgaatctcgtcgcaatgaaatgattcaattcgtaaaacaagggcttgaggatttggctgtatctcgtacctcttttgactgggggattaaggttcctttcgaccctaaacacgttgtgtatgtttggttcgatgcattagtaaactatattagcgcattatctcctttcgatggggatggtgaactatataagaaattctggccagcagatcttcatttggtgggtaaggaaattgttcgtttccacactattatttggcctatgatgctcatgagccttgagttgccattgcctaaaaaggtatttggccacggatggatgattgtagatggtaccaagatgagtaaatctctaggtaatgttattgatccaaatccattgattgatacatatggtgcggattctttgcgatattatttgttaagtgaaattacattaggccatgatggaaacttcacattgcctaattttgtaacaaaaatcaatgcagacttatctaatgatttaggtaacttgttgaatcgtaccattgcgatgattgaaaaatatcatggtggcatcatcacaaaaactgatgatgtagatgatttagataaagaaatttcttccttggcagaacaaacggttgcagattttgaagcccaaatggaagctatggaattaaataaggcccttaaaacagtatgggctttcatcagccgcatgaataaatacatcgatgaaactatgccttgggtcttggctaaaagctctgatgagacagatgtacgtcgtttgcaatccgttatgtatcatcttgctgaaagtttacgtatcatcgctgttctcgtaagtcctgttattccagtaggggctccaaaaatttgggaccaattgggactaggtggttttgagcatgtacaattggatgatgtgcgcacatggggcggcatccaaactggtacgaaggtcgtaaaaggtgaaccgatttatccacgttttgaagttccagaaatggtagacatcactgctgtagaagaaaaaactacagaatctgttgatacatcgaatattccacctttaaaagaaaacattagctatgatgattttgaaaaattggatcttcgtgtagctaaggttgtaagttgtgaaaaggtacctaagtctaaaaaattattgaaatttgtattggatattggccttgaagaacgcaccgtattaagtggtatatctcaatattacgagccagaatctatggttggtaaaaaggtaatttacttagcaaacttgagccctaaaaagatgatgggcatagaatcttatggtatgattttatccgcttctgattgggaagaacatttagaagttaccaatattgaatcattaccagcagggagcattgtaaaataatgaaactctttgatacacatgcacatattaacgataatcgttttgataacgatagagctgatatgttacaatcttgtttcgatgcaggcgttgaatacattatgattcctggtgttgatagacaaactgttgaatctggtgttgcattggctgaaacagatgaccgtttatatgcggctgtaggcacacaccctcacgaagcgaaagattttaccgatgatgattatgaatactttaaagagttagcattacgcaatgataaagtgcgtgctatcggtgaaatcggcctagattattattatgatttttctgatagaccaacgcaaaagaaggtgtttatacgtcaactcgagttggctcgagaggtagatttgcctattatcatccatgaccgtgatgcccatggtgatatcatggatatattgagcaacgaaggcaaggacaattgggggattttccattgttattccggtagttgggagatggctaaagaggctattaaattgggattctatatatcctttgctggacctgttgtatttccaaagtctacgaagttaaaagaggttgctaaacaagtgccacttgaccgtattcttattgaaacggattctccgtatttaacaccacctccatttagaggccgtcgtaatgatccgagtaaaacacaatttgtggctcaggaaattgcatccttacgcggtatggatgtagatgagtttgcttcgattgcttatgaaaatggcaaacgtgtatttggaataaaataaatactgctagttataggatatatgtggactaattatggtttatacatatatccttggtaggacgcgattctttcgtagaaaggatcgcgtttttctatggtatactaacatatatagtctatatcgatttgggcttataaaggatgataagatggaacgcattgcatttattgacttaggatcgaattccgttcgattcgttatttatgaaatatcagatacaggtagttatcgcttaatttatcaggaaaaaaattccattcgcttaagcgaaaatatgtggggcaatcataaactgacagaacctgctatgaatcgtgccttagtatcgctacagtcttatgtacatatggcaaaagcgcttgaagtaaattctattaaagctgttgctacagcagctgttcgattagctaaaaatggtgatgaatttattgaaaccgtgaaacgtgagaccgggcttgatttagaatgtatttcaggagaagaagaggctcgtttaggctttttgggtgttattaatacgattggtctcaaggattttgttatttttgacttaggcggagccagtactgaaattacattagtaagaaatcgtcaaattgaacagtctgttagcttacctattggtgctttaacattaaccggaacctatcagaagggcgatgagtttacagacaaagaatacaataaaatgattaaggccattagaaatgccatagaggaacaaccttggcttaagaacactaaaatgcctctgttaggtattggtggtactgcacgaaatatagccaaaatggatcaacgtaaattatcatatcctattactaaattacataattatgagattccataccatcgttttacagaattattggatgaggttagatctaaaccgttagggcaacgcaaaaaaataaatggtctttcatccgagcgagctgatatcataattgcgggaatgagtatcgtctatgaattatttaattatgtgaattgtaaaaccttagttgtaggtggttctggccttcgagaaggtttattttatgattattatgggcataactatttaggtggtaatcctattattccagatatattgattcactctgcagaaaatgttttattggagatgacacgtcatgagctcgttcatgctaaatatatttgcagattagctgatacattatttgaacaatggtggtccttgcataagggcgataatgcgctgcgccgttgtttgcaagtagcatcattattgcatgatattggcaaacgtgtgaattattatagtcatgctcgacatggttgctatatgctggttaacagtaatctatacggaatgacacatattgaacaggcttttagtgcgtttctcgttatgaattcgcatggtttaacacctaaggaatataaaaacttcttgtacggtaaactactggatgatgagcagcgttcgatagggcaaaagttgtcaattattctagctattgctgaggctcttgatgaaagtcatgaacagctggttatgaatttagatagtcgaattagtccagatgaggtgcgtttgattatacagtatccaaagcatctagatattgatataacaaaaggggctgttgaaaaattagtgaagccttttaaaaaggaatttaaacgtcagttagaaattgagtggtcccctcagtaggaggtaggtatgacattatcaaaagtgctcagatatgctattttacatgttgggtctagtagcatgagcattacaatattagaatacaaaagtattgatgatgtacgtgtcatcgattatgcagctcgagaagtgacctttggagaagaattatttcaaacttcacgtcttagctttaaaacgattgaagagatttgtgacattcttaagggctataaacaattaatggctgattatggtgtgtctagatgccgtttatatggcactaccgtaattcgggaggccactaatagaagagctatactggatcagatttttatacaaactggcatgcgtgttgaagtgatagatatgcctaaagaggtatattttaagtacgctcttgtatattacgaaatgatgtaccatcataaggcgacagatgaggatacagcttgtctctttgcagatgttacatctggaggggttggtctaacagcttggagaggagcatctttgttattccaacaaaacatgcatagtggttctctccgtgttatggagtcttttaacagaaatcaaagggcttctatatcgtttagcactgctattacagaatatttgcatcgtatgattagtccattgcgagaagaattgcaattatttaatattaagaatgtcatattttccggtgatgaagcacgtttaatcttacaattgatgggatatagtgatagtgaacctattacaacaattaacccacagcaatttaaagagctagtggactcctttgatggtattacggctaccaaattaatgaatcggtataagataccggaatttaaagctaatattcttatgcctacaatgattttgtttgcagagatcattaatgccattcaaccagagtctttaatatttagtagttattctttttcacaaggtattagttggttttacggtgtagaatctgaaaatcatccgtatatgtatcagttacgtgagcaaaatgctgacttagcacgtgctatagcggctcgttatcacacggattctatacatgatagggaggttgaacgttttagtttagccttttgtaatgcattgcgtcataaaggcttgccagagcggtggggatatttgtgtcgcatagcggcaattttgtgttctgttggtaaatttgtaagccttagaaatcatggtgagcatgcgtatcatatcgtcatgggaaccgatatatttggactttcagaggaagaaaaacaagtagttgcgaatgtagtttattaccactataaagggacaccttcagatgatgatgattgctttagagtgctaacagaattacaaaaaatacaggttacaaagcttgttgctatcgtccgtgtagcctgttcattagatgcgggaagtaatcaaaaaatagacgagatacgattagaagagaaggataaagaattaattgttcacgtacggacaaaggaaaatatttctcttgaatggtggacgtttaatcgagattctatctattttagcgaaatatttggtatggaaatttccttgaccatagggggtgtataagttgtttacaagtccaaagtactattttaaccgtgaattatcctggttaaagtttaaccaacgggttgtattagaagcgatggatacgagcaatcccttaatggagcgtttacgctttatcgctattgccagttctaatttagacgaattttttatgatacgcgtagcgggattacgtcatcaagctatgaatggtattgttaaatatgatgctgctcatatggatgccaaggcacagctcaaagctatcgatgaatctgtacaacgtttagtttcgttacaatatacatatttacatcgcgttttagcagatttaaaggaaaaagggtttagtttttttcatcctgaagagttagatgtaaagacaaaggcctggttacgtcattattttgaggaacaaatctatcctgtggtcactccattggccgttgactcaggacatccatttccttttttggcaaataatacgattaatgctattgttcgcatctttcaagttcaaccagatggcacaaaggattataagattgcaattttgccaataccgtcagtattagatcgaattatcgaggtaccatcctcctcaaataaggtacatcgatttgtgtatttagaggatgttataagttattatgcgattcaattcttccaaggttatggtattgaagagtctatgattttccgattgactcgtgatgcagatttggaaatcgatgaagaagacgcaaaggatttattgacagaggtagaagcttctttacggcgtagacgccgtggtgatgcggttcgcttagaggttgttggagctggttctcctgaattgttgcgtaccgtattggcaagtgtagagcttgaagaaaaagatgtataccatatagatggtcatttagattgtcgtatgtatttcgatttttcaaattaccctgggtatgataatctgcgctataaaccatttgagcctaaaataccaagcgatttaattggattcgaaggagaaaatttactcgatgtgattcgtaatagagatatatttgtacatcatccttttgaatcctttagtgtggttgaacaatttgtagcacaagctgcggtagattcaaatgtcttggctataaaacaaaccttgtatcgcgttagtggagagtcacccattattgcgtctcttataaaagcagcggataatggtaagcaagttactgttttgatggaagtaaaggcccgttttgatgaagagcataatattactatggctcgtagattagaaaaggcgggttgtcatgttatttatgggttaaaggggttaaaaacccattctaagattacaatggtagttcgccgtgaagaagatggtatacgccgttatgtgcatttggcaacagggaattacaatggtaaaacggctcgtatatatacggattgtggcatttttacatgcaatgatgaatatggtgatgatgcatctcgcttcttcaatctaatttcaggttattcggacccaccaatttggaataagtttattgtagcaccattaaatttgagagagagaattatggatcttatagatgaagagattcaatgtgctaaacgtggtgaagatgcatatattattgcaaagatgaattcattactggataaaaaagtcattgccaaattatatgaggcctctgctaatggagtgcgtattgatttgattgtacgggggatttgtactcttagacctggtattgcaggggttagtgataatattacggtacgttcaatagtaggacgtttcttggaacatcatagattgttctatttccgaaatggaggcaatgaaaaaatctttctttctagtgcggactggatgcctcgcaatttaaatgaacgggttgaattgatgattcctattgaggataaacgtcataaagcaagaattaaaggtattctagacttatatttagtagatacattaaaagcacatcttatgagatccgatggttcttattataaggtttctaatatagaggggccgttatctgcacaagaagaattaatggaggctgctaacacacaagatagtagggagcaaatgacagtcatagaacgatttaagccaatgtttaagatgaaagaatgatgaaatttcaaaacgctgttatatagatgtataaatatagattataaatacccaatttacgtatgttttagtcgttttatttactgtaatatgaaatgtaaatgaaaatttagaactttaatatattttgtggtaacaatagaaaaactcataaatattcattttcgaaataatatatacatcatatactatatattgtagtagtatcttatatacctctacaattttgcttatgtagtatgttatcgaaaaacctagatatgtatttatacagtggacaaagtgtaaaaaaacaaaagattaaaaataaaaaaaaccatatattatgagggtttatcgacgattgttaaccttgtgtgtttgacaggttatatctaactgtagtagaatatgattgttacaggaggtatttcgtaatgagaattcaaaagacgcacaagcgatatatatcgtctgtggttgctggattgatggtaactgcaataaccttgactggtttttcttacaacgataaaactgttacagtcatggctgatggtgcagcgcatactgttaaaacacatttaaattcgaatgaaggtatcgtgcgtaacgcaggtattaaattaaatccgaaagataaagtaattagcgattctaattctgtacaagaagggacaacacttacagtagtaagagcattcccagtatctgttacagtaaatggaaaaactagaactgtttatactacacaaactacagcagaggacttagcagaagaattaggctttaaagctcctaattataccactgcagctagtggtgctattcaggctggtagtactgtggatattgtacgtgttacaagccgtgcagtgaatactgtggatcaagaaatcccagtccaagttattcgtcaaaaagatgacacaatggctcaaggcgaagaagaagttgttcaagttggtcaaccgggcactgaacgcgttcaggttgagacattatataataatggcacagctattagaacaaatgaattatctaagtctgtaatgacaaatatggtacctacaattattaaagaaggtactcgtgaagtaacgacatcccgtaatgtatctggccgtgcatctcgttccatcgttatggaagcatctgcttatttagcaggtgatggcgacggtgctggtattactgctacaggtattcctgcagtacgcggtgtagttgctgttgaccctgatgtgattccattaggtacgcgcttatttattccaggctatggtgaggccgtagcagctgatacaggcggtgctatcgtagggaatcgtattgaccttgttatggactcctatggtgaagccatggactttggtcgacgtgatgtaacagtttacgtactcgattaattcatattaataataaaaggagatatccaagtgatatctccttttggtataattaccctaatgagaaaaggacgatagtttccaatgaggaaatatatcgtccttttcttgtatagatattagtctatataaggaattaggtattcatactttgttcctaataattcattttttggtataaatttgagagctgatccattgatgcaataccgtaacgatccattagggccatcttcaaagacatgacctaggtgggcatttccgattcgactgcgtacttcaacacgttgcataccatgggagtcatctttgtaataccgaataacatcttttgctatgggttttgtaaaacttggccaaccacaatgtgattcgaatttacgcgatgatccgaatagtggttcacccgttgtgatatctacatagagaccagatttaaactcatcagtcaattcatgactaaatggtgcatctgtagcagcattttgagtcacttcaaactcttgcggtgataaagtttgcaagtctttttcggtcggtttgttataggcactatcgtctataagtggctcttgggataggccgagaggaatgtgacaataaccattagggtttttgtctaaataatcttgatgatattcttctgcagagtaatagttatcaagtggtaatacttcgatggcgaagggtttgctttcaaaggattgagcacgagctaatgtagtttcaataattgctttatcagcactatctgtatagtatatacctgtccgatactgaattccttcatccccgccttgtttattgatactaaatggatcgatagcacgcaagaaatactgaattaaatgatctaatgataatatatcggtatcatagattacttttagtgcttctacatggccactgtcatgacatacatcttcataacttgggttggtagtagggccgttggcatagcctacctcagtcgatactataccaggaatttggcgaatataaccttgtaatccccagaaacaaccaccacctaagtatattgtgcgctctgtcatttaatcaccccatatttcgtgtgcgatttctttaactaatgccaatttagcccattgttcttcttctgttaattgattgccgatttcacaggatgcaaatccgcattgaggggataggcaaagtctttcgagaggaatgtatttcgtagcttccttaatgcgagccttaatcacctctttattttctagttgtggacgttttgttgtaatgaggcctaatacaacctttttattaggtgatacttcacgcaatggttcaaagccaccggaccgttcgtcatcgaattctaagtaatatgcatctacgttttctttggcaaatagaattggtgctactggttcatagccgccgctagcagcccaagtagagttgtaattaccgcggcatacatgtgttgtaaaagctagatcctgaggacgaccttcaagagccaagttatttacgcgtaagtattttgctgtttctccttcgatggttacacttttatctttttgccggccagtccaatagccatggtcgcagcacataccccatgtacaatcatcaaattgaatgttgcgacaacctgcatcatataaatcttttataacttgacgataggctgctgcaatatcttggattaactcctctaaatctgggtagaaggaacgtgttacagtaccattatcttctcgaaataattctgctaagaattgagatggggcagggatggtttgacgagctgttgtatgttcatcttcgaattgttttacgaatttaaaatgttctacgaatgggtgattagtgcctgtaattttacctgtaagtgcaagagaacctggtgctgtttcttggccgtggaatttgtagccatgttcaagttcaatttcttttacaccattgaatccccacatgaaatctaaatgccaatatgcgcggcggaactcgccatctgtaatcacaggtagacctgctgctttttgttttttgataaggtctgtaataaggcgatcttcgactgctgttaaatcttcacgactgattttgccatctgtgaaagcttgacgtgcttcttttaattctgctggacgtaggaaagaacctacaatatcaaaatgaaatggtgctaaatggttagacataataaaacctcctataataaacggtataaccgataatttcgataggtttattatagctaagtctaactatatttaaaaatatctatatgttaatgtttggtatagattagagttatggaggcaaccatatagtatggcattagttataaagaaaaagtacatccttctgtatagaggatgtactgatttagtttattaattttgatttgtagaatcgaaagatttatttttctgtgggcaattgaatatgtttgccataattgtttacatattgctctaaggcattaatatatccttgtcctaaacgactacgttgcattttattgttagtaatgtagccgatatgcatgatgccttcttctgctagtggcacggaaatgatactttcaccattgaactccttatcgataacgccgcttgatacggtgtatccattgaggccgattaatagactaaagagggaggccctatcacggacgcgtatatgttttgggcgcacaacagtactaaaaatttcttcggaaaaatagaacgaattatggtcgccttgttcaaatgatacataaggatatggttccaattcattcatggagaccatttttttagtagctaatggatgttgtttgccgataaaaatatgagggctagccgtgaatagctctgtaaaggttaattcgttagtatgaatcaatttttctaaaacaggtcgattaaaatcattgtaatataaaagaccgatttcgcttttcatatgcgctacgtcatcaatgatttcataggtttgtgtttcccgtaacgagaaatcataagagtctacatcgctttgattgataagatcgatgaaagcatttacagcaaaggagtaatgttgtgtagatacggaaaattgtttttttccacctttattactcttatattgttcttctaacagcgtagcttgttccaatacttggcgtgcatatcctaaaaaacgctcgccctccttagatacagtaatgcccttattggtgcgatcgaagatggtaatgcccatctccttttctaattcttttatggctttcgtcaagcttggctgagatacgaataaacgttttgcagcctcactaatactgccgatattggcaattgtcgttacatatcgcaattgttgtaatgtcacaattatctccttattttatagatttatataatattatactaaactattacacctatttaagcaatgctatatatgttacaataatataatagatataaggaggtcctatgttaaaagaggttattgtagtagaaggaaaatcggatatacaacgtatacatcaagctattgacgctgattgtattgctacggaaggatttaccttgcgcaagggcgttattgaacagattcgcgtagcctatgagaagcggggcattattattcttaccgatccagatacggctggcgaacgtatacgtcgcgtattaacaaagaaatttcctaatgcacaacatgcctttgttcctcgcgatgaggcctatgcaaatgatgatattggcatcgaacaagcttcgccagagtctattataaaggctttatccgtactccatacagaatcattggtatccagcgaggaatttacgatggcagatcttgtacgacatggcctttctggatttcctaatagtgctgataaacgagctgccgttggtgctgctttgggtataggatatggaaatggcaaacagtttttatatcgactcaatcattatggcatcagtcgtgatgaatatgaacaagccgtttcaagatgttaatatactttcaacaaacatagtattaaattcgtaacaaaatttagaataggagtattcatgattgaatctatcattgcgagtccagaagtagttcattatatctgtaaacgttttgatattaaaatgagcaaaaagttgggccagaattttctgattaagcgtggcattgttgatgaaattgtaaaagctgcggatttacaagaaggagagcctgttttagaaattggtcctggtattggcacgcttacacaaggtttagcacaaagtggtgctaatgtaacggctattgagcttgatacacgtttattagaggtgttagatacgacgctggctcaatatagtaatgtgaatattgttcatggtgatgtgttgaaattagacgtgccgtccatcatgaatcatgaaccgttcaaggttgttgctaatttgccatattacattacaacgcctatcattatgtctcttttggaaagtagattgcctatagagcgcctcgttgtgatggtacaaaaagaagtagccttacggatggtggcaaagccaggtacgaaggactacggtgctctatcggtggctgttcagtattatactaagcccgatatcgtgttagatgttccgccaaaatctttcttgccagcgccagctgtcacgagttctgtcattcgctgtgtattgcgtgaccagccacctgtggatgtagttgatgagaaactattcttccgcgttgtgaaagccggttttgcacaacgacgcaaaacctttgctaatacgatgaagactacaggtctatccaaggatagaatcgaagagcttttagcaaaagccaatatcgatggtcaacgaagaggagagacatttaccctccaagaatttgccgatgtagccaatgcgtgggcggccttaattaaataatataattaaaaggtcctaaggattctccttaggaccttttggcataagaaaaggacccgaatgggtcctttcgttttagtgtattaactttgccattgttgtaataaggaaggcattagcaaaatcgattaagaatgcacctaccaaggaaactacgagccatgcacgaggggatggaccgtgtttacctgctaaggataacatgttaaccaatgcatttggcgtagcacctaagccgaagccgatggcgccagcaccgagcataacagaatcgtagttgcgtccaaataggagataaatgaggtatgcaaacacacagataagcgccatttgtacaactaagattgtaataagcggcaaggcaagatcgattaattgtacaagcttcaagctgttgattgccattgtaacgaataaggataatgctacattagaaacagcgtcgagagcagcatcgttaattttgtaggattttgtaaaatcaccataattacgaatgatggctgcacaaatcatagagccgatgtatgcaggcaatggtgtaaggatagataaacctgcacttataatggtaccaatgccaagagccaggccaatccacatacaaatcgttaacaaatcttgagagttaaattgctttccgccgccttcaacgtgatcttcgatataatcgatgttgtcatcatccatagtttcagggttgtcataaggtgtttttaccttgtgcatcttgatgatgcgttcacctactggagcacctaagattgtaccagctaccataccgaatgtagctgctgctaccgctgcggatgctgttcctgcgacaccatatagttcttcatagtatggaccgaaggcacctgccgtaccgagaccaccaatcatggatacggaaccggccatgataccgataattgggtcaatacccaatgctttggcaatggcgatacctgcagtattttgaactacaatccacacggcgcaagcaaggaagaagaaaacaatgaaaatgccgcccttttttaatacttttaaggaagccatcaaaccgatggtagtaaagaaggcaagcattaagaattgctgcaaggaaggttcgaacttaatatccaaaatatgataataagaaagaatggcagttaaaaatgcaaatggtaaagcccctacagctggtgctggcatacacatgcgttgtaaaaacttggaatgtttattaatccaagtacctatgaataaggtaattacagcgaggcccacagtttgaatcatggacaggtttagtgtccatacatcgttgactaactttaggtcaatcagtggcataaaatcactccttttaacaaataaaaataatttattacattgtatcatgaacaaccaattaaatactatagaatttatcatgtatacaaaatatgtatagattatatattctacgtcttccttataaattcctctaatgagaatagaaaaatttttgattgtataaatgtgagaataaaatggcgaaggctcgatagaaagggccttcgccatttatatagtgaactaagatttaattaaatctcattatgtagttttggtgttgttaagaaagtaacatcaggattacgctctagaacccaacccatttgccattcgttggcgatgagtacaacggtgcggtcacggttatcctttacgatcattgcattatctagaccttttagtgtggatgtatctacgtctccgtcaatccagcgtgccacactgtatggcaatgtatgatttaataaatcgacaccgtattcattttttaggcggtattccaatacttcaaattgaagcataccgacagcgccaactacgaaggagtcaagagcacctggttgttcaaagatttgaacagccccttcttgggcaagttgtgtcatgcctttttggaattgtttgcgtttcatcgtatcttttggagatacacgagcaaagaattcaggtgggaagacagggaagtcgccaaatgtaaccttgtgcttttgtgcacacagtgtatcgcctacacccattgtgccggcgtcgaagacaccgataatatcgccaggatacgcatcttctacaatggtacgttctgtagccaagaattgttgtggttgtgataagcgaatcgtcttattcgattggcgatgcaatacggacatgcctttttcaaatttaccagagcagatacgcataaatacgatgcgatcatggtgattagggtccatattggcttgaattttaaatactaatgccgagaaatcttcacttgtaggttgtacaacctcttcgatagcttgacgtggcgcaggggatggagcgagttccaagaatttttctaagaatggttttaccccaaagtttgtcatggcggagccgaagaacatcggtgtcaattcgccagcgcgcaccttatcaaaatcgaatgggtcgcctgcaacgtctaataattcgatatcatcaagcaatgcttgatatacatcgtcacctaataattctttcatgcgagggtcagttaatgcacctttttcagaggctaacttttcttgaccatgtgtttcatccttagcaaagagctcgatcgtttcgtgttctctatcgtatacgcccttgtattcaccattgataccaataggccagttcatagggcatgtacggatgccgagaacgttttcgatttcttccatcaaatcgaatggactacgaccaaaatggtcaattttatttacgaatgtaaagattggaatacctcgttctttagaaacggcaaatagttttttagtttgtgcttccacgccttttgctacgtcgataagcatgactgcgctatcggcggccatcaatgtacgataggtatcttcggagaagtcctggtgaccaggtgtatcgaggatgtttacacgacatccatcgtagtcgaattgcaatacggaactcgttacagagataccacgttgcttttcgatttccatccagtcagatacagcgtgttttgccgttttacgagatttaacggaccccgctaagtgaatagcgccaccgtataaaagtaatttttctgttagtgtcgttttacccgcatccgggtgagatatgatagcaaacgtacgacgacgttgtacttcttctaaaaatgtcataattcacctctgttgtttcgcttgtgaaagtttaattatactgtataattttcacatcattcatatctttaaaattatacatgattttggtagttatgaccactaaattgtagtataatgagatttcaaagagcgactacgggggatggtcgccatatgtacgttaaggaggggaccatgcggttatttattgcagaaaagccatccatggctcgagaaatcagtaaatgtttgccggaaaataagaatatacaaaaacgcaatggttattttatccaaggtgatgatattgttacatgggttgtagggcatgtattacatcaagctgagcctggtgactatgacgataaatatatccgttggcgtcctcaagacttaccaatcgtacctactgagtggaaattactcataaccgatagcagtcgtcaacagtttgaaactgtaaaagagctgattggaaaagctgatatcatcgtcaacgcgggtgacccggatagagaaggtcagttattagtcgatgaggttttgtattttgtaggcaatacaaaaccggtgcaacggattttattaaatgcattggacgagaaatctgtaaaatcggcattaggtgatttgcgggataatcaggactttcacaatctatatcaatctgcattagctagagcgcgtgccgattggttaatcgggatgaatttatctcgggcttatacattatctgaacggtataaggggaataaggtaacattgcctataggccgtgtaaaaacaccgacactagcactcgtggtacgtcgtgaacgagaattagccgattttaaaccggttgattattttaccgttaaaattttatatacccatgagaatggtactttttgggcaacgtggcaacctaaggatgaacaaaaaggattagatccagatgggcgtctcattaataaggggattgctgaaagcttagtgcaacagctagcatcaagccctgatggtgtggtaaaatccgttacaaaatccaagaagaaagatttacaacggttgccattatcactatcgtcattacaagtgttggcagggaaggcatactcttatgaccctcaaactgtacttgatacggcacagaaattatacgagaaaaaattgaccacgtatcctcgttctgattgtgaatacttgccacctaatcaatatggcgatcgcatggctattctcagcaatttagcgcaatctggggatgaaaaactttcacaatgggcacaaaatgcggatagaaatattaagagtcgtgcatggaatgacaaaaagattactgcccatcatgccatcattccaaccacagttgcttgtaatgtaaacagcctaactcaagcagaacgtaatatttactttctcatcagtcaggcctatattgctcaattttatggagaacatgtatatgagcaaacaaggattgtagttggtcaatgcgaggaagaattcgttgccaatggtcgcgttgttattgaagaaggttggaagtccttatataagcgtcaaaagtctaagactaacgcagatggtgatgaaccggacttaaccgatgaacgaggtgcagaatcggggcctaaaaaggatgctatcgaagaagcagatcatttgccatcggttaaaaagaatgactcagttcaatatacggattcagctgtagagtcaaaacaaacaaaaccgccatctcgatttacgccttctacattattacaagcgatgaaggaaattcataagtttgttaagaatgaagagttgaagaaacaattgaaggccgtatccggtattggaacggaagcgacgcgggcaaatattattgatgaattaatcagtcgtgggtttatgaagacatctggtaagaaacaggtgttatctcctaccgatacgggatatcttttggtagatgcattgcctgatgaattattatatcctgatgaaacagccatttgggaggaacgtcttgctcttatgagtgagggggaggatacactggagtcattcctaaaagatcagattcaatttttacaacacttaattgataaacttggttttgataaactggtaagtcgtgatcaaatgatgcccaatgtggtccgtaccatttcgaatcaaaatgcaagacggcctatggatgccaatcaagtaaatctgaaggatttacctgagtgtccatcctgtaagaaggggcgattacaacggcggagtggtaagtttggcgcctttttaggttgtactaattatccgtcttgtcgatatactcaacctgtaggtggtggtcaaaacgaggattcaaatctggaggttccggaagagtcaaagcaatatatatgccctcgatgcaaaaaaggatattttgtaaagcaacagatgagaggacgtactacatgggtttgtagtaatcgtttagcttgcaagacgcagtgcatggatgtagagggtgtaccgagtatctatgcaaatcaaaataaataattgcacataaaaaatgcgtgtagcttatgatatgctacacgcatttttgtgttatcttcgattgccacgtcgacctgtttgtgatgtagaggtacggcgttgtcgagtattggaacccttatggcctcgagccttatgggcttttgcctttgtagattgataggaacttgtgattttaggttttgatgttgcttttttgcgttttggcgcagtgctagcattacctttagttttgatttgcccatcttttgtgtattttgttaaggttgcttgaatcgcacgttctatgcgtcgtaaccaagattcatcggctggcgtagcaaatgtaacggctataccagaattacctgcacgacctgtacgaccgatacgatggatgtagtaatctacatcatgaggtacatcatagttgtatacatgagtgatgccctcaatatcgatgccgcgcgctgcaatatcggtagccaccaaaatttgtgtttttgccttggcaaagtctcgaagtatttgtgtgcgtcggccctgtgttaggtcgccatgcatttcagcaatgttgagacctgcagctgtcaactcgtaggatagtcgaatggcgccttctcgcttgttacagaacacgattgccaaatatggattatcttcttggatcatcttgatgaggcgaggtgttttatcctctggattcatcatatatacgcgttggtcaattgagtctagtgtaatgtgtttaccttccgctgttacagataccggttttgtcatatatgcttttgctaggttgcgtatcttgtccggaattgtagcagagaagagtaacaattgtcgattcgcatctgtttgaccgattagattttctatgtctggtaaaaatcccatgtgaagcatttgatccgcttcatctaacactacgcgacggatcgaatcgagatggagtgagccgcgcttagcgtggtccaataagcgacctggtgtacctaggataacgtgaggacgtctaccaagttgttgtaattgggattcaatcgttttaccaccgatgagcggaagaatatcgacatccaacacagcgcctagcacctttgcttcgtcggaaatttgtttaatgagttcccgtgttggtgcgataatcagtacttgttcttgatgtacatctgtgtgaatgcgttgcaatataggcaataagaaggctagtgttttgcctgttcctgtttgtgcctttgcaataatatcattgcctttgaagacgataggaatcgattgttcttgaatcggcgttggttccttgatgccttgtttttgtaaggtgctaataagttcgtcgcaaacgcctaaggatttaaaagatttcatgtgtcgtcctttctttaatacatattatattaattatacctaatctattagagtggagcaaatttatatcattatggattattctggggagataatgagtgttgaataacatctaattaaatgaataaaattcagaaaatgagaatttgaaggatgaaattgagattagaagttttaataatgacaggcaattcttataacgcaagtatgaaaatgagaatgaatatataataaattgataacaagataaccttaattatcattttcagtaatgagaaatcttattgtgtatataatattaaaattgatagacccttattttataagtatgtttggtatatttttaaaataggtataatcatatttaataataagtataaatattttgaataataaaatgataattattgttgaaaatatgaactctcatgatataatagtttaagatattaatacgcattattatttggtgtgtttaatatgaggttgttaggtacaataattaggaggtgtcgtatggctatcaaaaagttaaaagacatgaaaccaggtgagtctggtcttattgttacactacatggcagtggcaacgttaagcatcgtctaattgacatgggtcttgtacatggtacagaaatccatgttatgaagtttgcccctttgggggatccggtggaaatcaaagtaaaaaactttgaattagcacttcgtaatagcgaagctggcatgattgatgtagaggttcaataggaggttcacatggcagaaaaagggcaaattcgaattgccttagcaggtaaccctaactgtggtaaaactacaatgtttaacaatatcacaggggcgaagcaacacgttggtaactatgccggcgttacagtagaaaaaaaggaaggctataagaaatttgatggccatgagttattgtttattgacttgccaggtacatatagcttaactgcacgttccttggatgagttagtagcgcgtaatgttatcgtaaatgataacccagatgtaattgttaatgttcttgatgcatctaatttggaacgtaacttatatttagctgcacaattattggaacttgaaaagccaatggttattgctctaaacatgtctgatgttgctgaagatatgggcattaaatacgacctaaaaaaaatggcagaaatgacaggggctacaattgttagcacagtaggtcgtactaatattggtacaaaagagttgctagaagcaacagttagtgtagctgcttctcaaaaagctcctggtgtaacaattaactatggtgatttgttagaaggcaaaattagtgaacttgtagaagaactaaaacaagctggtactgttacatatccacttcgttgggttgctgttaagttgttagaaaaagatgcggacgttattggcaaagttatgcgctttgaaaatacagaagctgttattgaaaaagcgaaagcgattcgtgaagaaatcaaagatcaagtcgatcttgatgtaatattccaagaatatcgtcaccgcttcgcagtagaagtatataatacatgtttaacacaggctcctacacaattagaaacgcgttctgaccgttatgataaaattttaactcaccgtattcttggtttgccaatttttatggttgtaatgtggttactatttaactttgtaaatactgtaggtgctattcctcaaggttggattgaagatggctttactgcattacaagcatgggttgtaacagttattccagaaggtcagttacaatcacttatttctgatggtatcatcgccggtgtaggtgctgtattatccttcgtaccattaattctattattattccttggtatctctttcttggaagatacagggtatatggcacgtgctgccttcgttattgaccgtgtaatgcgcgcttgtggtttacatggtaaatcgtttattcctttattattaggttttggttgttccgtaccatccgtaatgggtgcacgtatccttgataactacaaagatcgtatggtaacaatcttaattactccattcatgagttgttctgcacgcttacctgtttatactttgtttgcagcagcatttttccctcctgaatgggctggtactgtagtatttgctgtgtatgcattaggtattgtatttggtatcgtatttgctaaaattttccgcaaatatttatttgctggcgaagcagaaccattcgtaatggaattgcctccatatcatttaccaactttaaaagctacattaactcatatgtttgaacgtggtattatgtaccttaaaaaagcaggtactttcatccttgctgcttccatcctcgtatggttcatcacaacatatccaatggatgtagaatactccaaagattatgatgcattgcatgatcaagtagctcaaacatatgaaatgaaagatgcagaaactttggctcattttggtatcgctacagatgaacaaaaagaccaagttaatgaaatcgtagataatatgaaatctactgtagcagatgctactacacaagcagaggatgctggagaagctgctcctgaaatcgaagtagaagatgattctgaagcacctgaattgttcaatgacattaaagaacaaaatgaacaattattcccagtagcatgggctatgtataaaaatagcgctaatttagatgatgaaaatcaaaaaattgacgaagaaaaaaattctgaaaaattggaacaatcctatgctgctatgttcggtaaagcaatcaacccagttcttaaaccattaggctttgactggaaaatcggtgtatctcttgtggctggtttagcggctaaagaagttgttgtatctacattgggtactatctatgcagtaggtggcgatacagatcatcctcaagcattgactgattacttacaaaatgatccacactttacaccattgattgcattaacattaatgctattcatcttgatttacccgccatgtatcgcagcgctagcagttattaaacgcgaaactggttcttggaaatggatgttattcatgttctgttatgaaaatgctttcgcatggattgcatgctttattttctacaatattggtttggcactaggcttctaattaaagcgtagttaatcactatggtttacattccttagatacctagaactaaattgtattgacataatgtaatttaattatagaaaaaatttaaaatagctcttgccaattatcattatttgtggttaaatgataatgagaaaagggaaatatccaaatatattgcttttaactcatttatcatatatcaatttatgaaaatttggtggatattgagaaagaaggaattataatggataacctaattataggactcatagtgatattagcattggcttatcttggtacaaaaatttataaacaagtgtctggtaagggtggctgcggctgtggtagcggtggctccaaaaaatcttctagttgcggtggtaactgcagctgtgatggttcgaacaaggcgcttggtattaaacgtaccgctaagtaagctaatacgaattctgaatttgaaagaggggtctctataatggctcctcttttcaaatatagtaagtaaatttttatatatttagtagaaagggatattatcatgttcaacttcaatcaaaacaatcttaaaaacgctaacttattcgcagcaggtcttgcattgggtactgtaggtcttaaagtgttgacttctaaagacgctaaaaaagtatatgctggtatcgtagcagctggccttcgcgctaaagaaactgtattggaaactgctgaaaaagtacaagcttccgcatctgatgtattggcagaagctcaagaaatcaacgaagcacgcaacgaagaaatctttgaagaaaataaataatagaaggatttaactatgttacaattttctgttgtacgaaaactcagaaatcgcttgcatattaaggtaacaggtcatcgctttacagaagctgaagctgcttatgtagaggatacattattacttaatgatgcaattttagacgtaaccttctatacacgtagcagtcagatcgtcattaaacatactggcgattctgaatctgtacgtgatgcggtgttaggtctacgcgatttagatttgtccgaagctcctgctttgaatgaatactctccgcgcttggtaaataaaaaatatcgtgaaatgatgattaatcgcactgctatttacttaggtaaaaaagcagtgttacctgcaccgattgcggcagcatgggcatggtttgacggtattaaatttatcggcaaagcgattaaaacattgtggcaacgtaagttaaccgtagaggttctcgacggtgttgctattggtgcagctttacttcaaaaagattatcctacagctggtgctgttatgtacctattaggtattggcgatatcttagaagaatggactcaccgtaaatctgtattgaatcttgctcaaagcatgtctttgaatgttgataaagtatgggttttagttgacgacattgaagtgagcaagccagttaacgaagttgtggcaggtgataaaatcattattcgccaaggcgaagtgattccattggatggcgtcgttatcgatggtgttgttcttgttaatgaaagctccatgactggtgaaccagaagcggttcgtcgcgatcaagacagttctgtatatgcaggtactgttgttgaagacggtaaagctattgtagaagtacgtagcacatctaaatcttctcgttacgaaaaaatcgttaaccttatcgaagaatctgaacaaatgaaatccggtatggaacaacaagcataccgcatggctgataaattagttccaataagctttattggtgctggtttaacatatttgttgactcgtaatgtgatgaaagcattgtctttcgttatggttgacttctcttgtgctctaaaattatccattccattagcagtactttccgctatgcaagaagcatctaaacgcggtatcactgttaaaggcggtaaattcttagaacaaattgcacaagcagatatgattgtattcgataaaacaggtactcttacaaaagcagaacctgagtttgaacaaatcattccatttaatggtcatgatgcagatgaaatgttaaaattggctgcatgtattgaggaacatttccctcactccatggcaaaagcaattgtacgtgctgctaaggatcattccttgcctcacaaggaaatgcactccgacgtagaatacgttgtagctcatggtattgcatctaaagttggccgctaccgtgtacgcattggtagtgctcactacatctttgatgatgaaaaaacaaagattcctgcagatgaacaagaaaagttcaataatttaccaaattcatcttcccatatttaccttgctattggcggtacattagcagcggttatttgtattaaagaccctgtacgcgatgaatctaaacaagttattgctgatttacatgctttaggcattaaaaagattgtcatgatgactggtgactccaaacgcaatgcgcaacgcgtagctgatgaactcggtatcgatgaagtgcatgcagaggtattgccagaggataaagcagcttatgtaaaacaagcaaaagctgaaggttatactgtcatgatggtaggggatggtatcaatgattccccagctatttctgaagcacatgtaggcatcgcaatgaatgaaggtgctcctattgcacaaaaaattgcgaatgttacgatttcttctgataatctacaagctcttgtagagttacgccgcatttctatggccttgatgaaacgcatcaagtccaattacaatggcattgttggtttcaatggtgctcttgtaggtggtggcgtacttggtttcatgcctccaagtcaaactgcttggttacataacctattcacattgggtattggtattgaaagcatgactccattgttgaaagaagaaaaacctgaagacaaacatacaattgatattactgcagaatctactgttgcataatacttgattgtttcctgtttcgcacatggattttattaaaagacctcttatagaaaatttctataagaggtctttttttgtggcattttactggtgtgtagtgtacaatatcaagtgattaattatcttaggagaacgtatatgaacactatattagatatttgtaaacgatcactatatatgaatatatttatcgtggccattcctgttatttcttatatgattcataatggatctagtgctacagtggcattggtatggtatttattgctatccttgtgtatcccttgggcctatttatcgtttaaagctagtacatttggcgctgaaaacaaacggattaaccgcattatatatgtgttgggttgggctgttattcagtttgctacctataagctaatgtttcttggggtggatttaaattggctttggggcttgccatccgttgggcgtgatattatcttccttgtcggtatgtatggtcaagttaccattgttctcattatagcttatttaatttctcaattgctgggaggttcacatgaataagcaatttattgtatttactttagttagtgccttttttgtaagtgtagtgactgctgtattacatcaaaccggtttgggatctccctatctcacattccccgttttatctctattggtacctgttctcttacaacggatgcgacaaggacaatttggtgaattgccaattcatatggggtaccatgtatacagttgggctatttttacggttattaatctattcactacgccgttcaatgtaacattggaaaatcaagcgcttatagtactagtctttttaggtgtatatttttttatacagattttgcttgatttggtagctttattgatgacatttttcttcaaacgtcgccatagatggggtgcggttgatgaagctttagatatggccgtgtatattgtaccgattccatttatctatttaggttctattttttacatcaatttaacggatcctatcatggcagcttattttggccctaccattagtttgaatgctttggtgggggaattcctattcatcatcatttcgatgttagtctttgcattctatatgtaccctcgaaatggtgaatataaagggacgagattattgcgtattgtcgttactgctgctatgctattagctatgaatggtcatatattatatggtgggtatattccggaatttgtgaaagcaatagcacctacggtatttccaatctatcaaggtaatccacttgtattctttacaccaggattactggaatttgtgtttattatcgtatctgtactaattggtaaattagtagagataggtgtaataaaagctcttactaagagcaaaggttaattttatttctagtttcgacttatatcctaagagaatgagagcggaggaggatttttatgaatgaaaatgtgaaggatggtaaccaacaggtatcaatccaagaacaacaagcgacacaattagatcgtaaacagagtaaggaaaccgttacgaaatcgggcttaacattgcgcgaattaaccattgtgggtctattagcggccattaccattattctaggtctttctggctatggtattatggcgttaggaccattgaatgtcactacattacatgtcccagcattaattggtgccttagttgaagggcctaaggttggtgcgttcgtaggattgatttttggtgtctatagcttctggcaaaattttacggcaccaaatattttgtcaccactgtttattaatccgttagtatcagtattacctcggattatattccctgtattggctgttttggtatacaaagcattatggaaggtaccacaaggtccgcgcttgatagtttctgcatttatgggcactatattccatacatgtatggtaatggggctaatctatgtgatatacgcggatatgttcgcacaggcaatgcatctttcatctgatcaagttatgggaactattttagtattgtctgttactcatggtattccagaagccatctttgcaggcgttatcgtaacaccgattgcattggcgttgcgaaaagcattgcgtaaggatgtacaaaaataatttatattttacatagtttgaatatctatgataaaataacagtaatacaataagtattgaggaggataatcatggctaaacgtattcgtacaatcaacactgaatctttacaaaaaactgctaaaactggcggttgtggtgaatgccaaacttcttgccaatccgcttgcaaaacaagctgtacagtaggcaaccaagtttgcaaacaaaaataataaaaagagagccgatggctctctttttttatgtatgtaatatatacatactgtttatggtatatatttatgaggacttttagcacgatagacaaaaaatgtggtacaattatctagaaagttctatatagtttagcgctttcacatacacataatttggaggtaccatgttagaattaaaaccaatgatccataagtttcggatgaaagataactactattgtttagatgtaaatagcggtatcattcacgttattgatgaactcattgataaagtattagatatatatgacggcaccaatcgtgatgcagtccatgcagcgttagatagctctcaggatcctgtagaattaaatgaaatcatggatgaattagatgagctcatcgctgcagaacaactctttgctcctatgagcaccgaatttaagctcgtagttggggaaaaaccaatcgttaaagcattgtgtcttaatattgcccatgactgtaatttagcatgtaaatattgctttgcaagtcaaggcgattacggcggtgtaaaacgcgaattgatgagctttgatgtagctaaacgtgctgttgattttctcattcaaatgagtggcactcgtcaacattgcgaaatcgatttcttcggtggtgaaccccttcttaattgggacgtggtgaaacaaactgtagaatatattgagcaagaggcgccaaaacataataaaatctttaaattgacgttgactactaatggtatgttattgtctcaagagaaaatcgattatgtaaacgaacataaaatgagcttggtcttgtctctagatggccgagaagatgtgcataatgctatgcgtccagtcgctggcagtggagctaactcttatgagtatattgctaaaaatcttgtaaatgctgtaaagcaacgtcatggtttagaatattatgtacgcggtacatatacgcataagaatcttgattttactaaagatgtattggctatgtctgatttaggctttgaacacttatctatggagcctgtagttggtgaagaaggcgattatgtacttcgcgaagaagattggccaacgcttgagaaagaatatgaaacattagcagatatatatttgcaacgtcaaaaggacgggtggggtgagaaatttaatttcttccacttccgtatggacttataccgtggaccttgtatggcaaaacgtttgcgtggctgtggggctggtcatgaatatatggctgtcgtgccaaatggagatatttatccatgtcaccaatttgtaggcaaagatggttatatacttggtaatgtatatgaaggtttaaaaaacactgaaattccaaaggatttccgtaacacacatgtgtttacaaaacctacctgtgcagaatgttgggctaaattcttctgctctggtggctgtcatgccaataacattacattgggtggagatttacaaacgccttatgagtttggctgtcgtctacaaaagaaacgaattgaatgtgctatcatgattcaagctgaactcgaacaagccggcatcgatggtagtattcctgtagcattaggatagacattttaaataagatatattttgtaataggagccgctatggacactagattggataaaaaacaaactattgaacgttgggggattcgatttacaggtattgtacaaggggtcggatttcgaccccttgtttctatgtgggcacatcaattagggattagtggatttgtatataatgatagttccggtgtatatgtagaggcccaatccgacatagatacattgcaattatttgttgatacgattcaggaagaacagccgcgattatgccgtatcacacatgtgagcattacaaagattgatctatctgtaaatgataataaggaatttgttatcgctcagtctcctgtggatggtactgtaaacacgtttattagtgccgatacatcaccatgtgatgattgtttggctgaaatgaaggaatctggtaggaggtatgattatccttttatcaactgtaccaattgtggacctcgatattccattattaaatccatgccctatgatcgagaacgaactactatgtctgatttcaccatgtgtgaagcttgccatgaggaatacgttgatgtgaatggtcgtaggtatcatgcggaaccaaatgcttgtgaacaatgcggaccgagctaccaactattagataagaatggtaatctctgtatcgttgatgattgttttgaaactgcaagagaaatgatatcaaatggtgcgattattgcattaaagggaattggtggatatcacttggtttgtgatgctactaatgataaagcagtacaaatattacgggagcgaaagcatcgcaaggataagccgtttgctattatggcaggttccattgatatcgtagaagactttgccgtcgttagcgatggagacttagatgcattaagcgctatggcaaggcctattgttttattagagaaaaatgataattttcatgcgtctataagtgagttagtagcccctaataatcacttgattggtgttatgttaccgtatgcacctatccatcatgtgttagtaccgcatgatgcgaaatgggttatgacaagtggtaatgcgagcggtgattccgttatttatgatgatgaaaaagcttttttagaattgcagactatagcagattattttttgacgcataatcgtcaaatttatgcgcctgtagatgattcgattgtatcagtggtggaaaatacccctattttgattcggcgaagtcgggggtatattcctgaacccattcattgtgagtcgattacagatcaaccaatactcgccatgggcagtgatttgaagaatacctttgcgattaataaaaagcaggaagtattgttaggtcctcatataggtgatttggcaagtgaatccactcataacacttttgagtggaccatcgaacgatatgaacggctgtttgatgtgaagccgaaagcaattgtcatggataagcatccatcatttttctcttctaattatggtcgacaattaagtaaaacgctaaatcttccggctatagaggtccaacatcatcatagtcacatcgcagctgttatggctgaatacgatttaaaatatcctgttcttggaatttgttttgatggcactgggtatggtgacgatgatacgatttggggtggcgaatttatgctatgttatggtgcagagtatatgcgtgttgcccatatacatgtagcgcctttgcctggtggtgaaaaagtggtaaaagaaccatggcgtcaggctttatggtacttacggaattattatggagaagagttacctaatatatacaaaaaatggttaaccacattgcctaaaggctggcaaattctagataaggcattgcaatcagacatgtccatgatgatgacatctagtgcaggtagattatttgatgtaattggttgtttgttgggcttaggaaatgaacactcttttgatgcacagatcgccatagcattagaatctgcatgtgcaaatgaagaaggtcgattgttagactttaactatgatgggcaagtattagatctcgtgcctgcagttcaacaaattatggatggctattctcaaggtgaaagtgtatcctcgttagcggcgagcttccataaaacactggccattgctatttgtgaagttggagctgatttgtgtgaacgctatggcattgatgatgtatgtatcggtggtggcgtttttcaaaatcgcagattattagcctccttacaacataaatggcaccatggcaccttatatattaataaaaaagtaccatgtaatgatggtggtttatcgttgggacaattgtggattgctcatcaaaaaaatatataaacgtatcattggttacataagagttcttagttttgtgatacaattaaattaatcaaaatatttggattaatagttataaatagatgtataagtatatttacaaaaggagggcgtatgtgtttagcagtaccagcacagttaatttctattaatgaagccattggcacagtagaattaacaggtgcaacgcgcgattgtagtttgcttctcgtgccagatgcaaaggtgggagactggttattggtacatgccggttttgcagttcaaattgtagatgaagaagaagcgaaggcaaccttagatgccttccgggagttggaagaacttgaagaagcttactttgcaggaaaaacagaaaacagctgatgctttattacgccgtattagcgaactacatacacctggcgaacgggtgcgacttatggaagtttgtggtacacatacagtatctatttttagagaagggttacgacaattattgccatcgggaatagaattagtcagtggtcctggatgtcctgtgtgtgtaacggaccaagtgtatatggataaagctctagagtatgccaaacgtgatgatgttattattgcaacctttggggatatgctaaaggtgccaggtagttatattagtcttagtgaagctcaaacacagggtgctcatattcatgttatctatacgccgttagaagtgttggaactaagtaaaaaacacccggataaatatatagtatttttagctatagggtttgaaacgacgattgctgtcatcggtgccactgtgaaagctgtagcacaggctggcgtgaaaaatgtattattcttggtgtctcataaattggttccgcctgcattacgcgccttattagaccgacaagtaggacaaattgatggctttatcttgcctgggcatgtcagtgttatcattggcgaaaaaccgtatcaatttttaccggatgagtataaaattccatcctgcattgctgggtttgatggggtagaaatattatctgctatcgtcaatattttagaacaacggaaaagtggtcattttgaagtaggtaatacctatcactctgttgttatgaaggaaggcaatcctgtggctgtgcgtatgatgaatgaaatatacgatgtttgtgatgatgcatggcgtggtattggtataattccaagttctgggttacagcttaatgatgactatgcatttctagatgcagaaaaggtgttacctatacagttagaaaaaccatctcttgatcctaaaggctgtcaatgtggtagtgtattacaaggtttaatcaaacccaatgagtgcccgctttttggaaaagcttgtacaccggatcatgcagtaggtgcttgtatggtatctgtagaaggtagttgtgctgcatggtataagtatggtttttctagtggcggattagcctgggaggattaatggaacgagttcgtttagttcatggcaatggtggccgttttagccacgaattgacagaacgatttatattaaaatattttattaatgatttgttagctcccttacatgatggggcacaatttccggtagactcggggcgaatggctttcacaacggattcctatgttgtacagcccacttttttcccgggtggtaatatcggtaaattagctgtatgcggtacagttaacgacctagctatgaatggcgctgttccacaatatcttagctgtggtttgattttagaagaaggtcttcctttcgacgaattagaaacaattttaagcaccatgtctgatatggcaaagcttgcgaatgtacaaattgtgacgggtgatacgaaggtcgtaaaaaaaggtgaagttgataaaatttatatcaatacagccggcattggtatgattccagatggcataaatataggtccgaatttcgtaaaacctaatatggatattattctgtccggatctattggtgatcactctatagctgtcatgggacaacgatttggactagaattatcagactctgttaagactgattgtgctccattgaaccatatggttcatgctgttttacatgcagtagggcctcaggttgcactattgcgtgatcctacgcgcggtggtgtgggtactgttcttaaagagattgccgaacaaagtcaagtggggataaaggttgaggaatccaagcttattattcatgatgaagttcgttccgtttgtgatattttaggttacgatcctttatacttagcaaatgaaggtaaatgtattttcgttgtagagccgtctgtaacaaatgatgtgctagatattttacatagttatccagaaggctgtgaagcgactcatatcggtgtaaccatggataaaaatattggtaaagtaggcctacaaacatcgattggcggtgttcgtctagtagatttattgggtgaagatcaagtgcctcgaatctgttaagtcttctggttataattgtatgatttgcggttaaaacatagctaaaaattaaattgcataaaattcataataaactcattgtatttttatataattttactatctttaagtgtaagtatttatactttcactagaaactatgtatagaatttgttaaaatataagtatctattaggaggcttatcatgaaaaagaaaattatgaccgctgttctaggaatttgtttaactacaactgcatttggtggcattttaaccactcaagctggcggcttaagtagtatccttggtggtgctgctaaaattggtggcgttggcattctagttagtaaatttggtccacaaattgattctttcttaaataaattactaaaacaaaataatttgagtactgaatatactacaaaggttgtacctatcattagtattggtacaaaaggatatattggtgctgctcaagtaacaggacctgcatctagtatcgaacaagttaaggctgttgctcaagttgaaggtagctttaatggcatggttcgtgttaaaggtttagtaccagtagatagtacaaatccagtgggcgcttcccgtgttcaaggtgtaggtgtatctgcacttattgatttaaaaatttaatggccactgagatacttccttagaagtactcagaaaataagcacggtcttaggcccgtgcttattgtgctgtttaacgtatatgtcccatagaggataagttgtggaggattatatgaagaagcaagtacttacacttttgatggcatctttgttgacaggtaccgcatttgctgctcctggtacagtaacggaaaaaacacaagtattagaaagcactgtatatggtgcacctcaagatggtgccgttgtggatcgtattaatcaattggatgaaactgtatacggcaacggattttctggcaatactgctacattgagtaaacgtgtagattctttatatgattccgttgaaggtagtggtactaatatttcattgcgtgaagaaatggatgcacttgaatatacataccaaaacagcattaatgatggttctttggtagaacgtgttgaaaagatggaacgtagtgtgaatggtagaatttcaacaggttcattacaaaaacgtattattagtttgaaaaccaaggtatatggtagtaatgtaactcttacaaatcaagtaggaacactatcttctgatcacgtgttcaaggtaacactaaatgatgcggtatccacaaaaacaagtcatgaaggagatacaattaaattcactgttgctgaaaatgtaatggatggcaatgtattgttggtgccagctggtactgtaggttctgcaacgattacatccttgaaaaaagcgcgctcttttggacgtaatggtgcattagatataacttttgaatctgttcctgctattgatggtacagaatttactgctgtacaaggtaatgaggctaaggaaaaaacaaagggcgaaattaaagcagctggtgcctctgtggctggtgcagttctacttggccctgttggcttagtaggtggtgctttcattaagggtaaaaatattgattacccagtaggctccactgtatttattcaacctcaagactctgtatctattcaaggtcttgttattggtggtgatgggttagctcatagtgatgatgaattagctgaagccgtgacagtaccgactgcgaatgatgattccgtagatagcactgtggatgaagcagatgattcaactgtgaacactgacgaagaagatacaaacactgctgattcagaagaagtagaagatacaaatgatacagcagaaaatgtttcacaaccaatcgtcgtagtaaagcgtaaccaatagaggagtttagtaaccatgaggaaacaaagagtacaatggctcgtggcagcatgcttgctttgtttagcccagccagcgtgggctgcttcagactcaattacatatcaagatagtttagatagtatatctgaatcctatccaggtgaactgcaacaaccttcgacacctgaacgcagcaatattcgtgttgttcgtcgtggtgcttcaccgattactgcaccgacagaaaagttaccaactcgtgtagatgcagataagatgacatattccggtagtactggcgatgtaaatgcttttggtaatgtagtggttactcaaggtaatcgcacattactagctaatcgtatcactggtaatacaaaaaccacagagtatcgaactgctgatggtccgtatcgctacttagaagatggcggtaaaactaaagatcttactggtgatgttatgacctatcgtaccagtgaccaacattttgatgccggtcatacgcaaggttggtctgatccgtattatgtgaaggggcagaacttatcctatgatggtcaaaccggttccatcgaaaaaggtatgattacatctaagcatgcgatggcatttaagcatacacctgattaccgtattgaaggtgaagacattaaaatttaccctggcgataaggtggttattcaacatccaagcttttacatcaagaattttaaactttttagcttgaaatcttatacaaaatctatacgtggagataaacaaggtaaagtaagtgcattttctattatgcctcgtcctatttataatagtgatgatggcattggattgcgtggtaatgcagaaattccattgggtaaatctggtgaagcgtattttgattacaaatggtattcaaaatctggatttaagcctcaaattggatatcgctatttcttaccttggggaactgcatccatcgggtatagtaaagtatccaatgaatataatgatgaaaccgtatgggtagaaaaaatcggcgaattacgtcttgatacacatacgtaccatattggtaaatctccatttactgcacgtggtgaaacaagtattggttattggaaggaaggatctgtaaagggggtccataaggactataaggtagaagtatctcatgatcctatcaacctttggaaagatggtactttgcgattcttcggcggttatcaacgcgattattatggctatgataagtcgatacgtagcatgccgtactggggcgctcaattccgtacagctgtaggacctagagttaatgcgtgggtatcgtataatcaacgcaatattaactataataactcgccatatcgctttgatagtacagagcttcctaaggagctcatctatggtggttcctttaaattgacacgtctcgatgatatttcggtgagtgttaaacaaaatatgatgagtggcgatgtggattctatctattacacataccatcgtgatttgcactcctttgatatgtatttaacatataaagattctcataaaaataacaataaccaatggaaaatcaaattcgttggtaaagatttctaaggagcatacacatgaagtctattcgtaaggctgtcattccagcagctggtttcggtacacgttttttgccagctacgaaagcacaaccaaaggaaatgttgcctattgttgatacaccggcgattcaatatattgtaaaagaagcactcgattctggtatcgaagaaattcttatcataacaggtcgtagcaaacgcgccatagaagatcattttgatagcagtgtcgagctagaagagctattacaaaagcaaggtaaaaataaacaattagccatggtaaaagatttggcggatattaaaattcattttattcgtcaaaaatcaccgcgtggtttaggtgatgccgtattatgtgctaaagcgtttattggtgacgagccatttgctgtattattaggtgatgacattgtttataatccagaaaaaccatgcttacaacagttgatggattgttatgaacaacatccaggtatcatattaggtgctcaatttgtaccgaatgaaaaggtaagctcctatggtattgtgtccggagaaccgttggcagataacttgtatcgtgttcatggattagtagaaaaaccaagtgttgataaggcaccgtccaatttagctgttcttggtcgatatattttaacgcctgatatttttgatatcttagagaatacaaaaccaggtgtaggtaatgaagtacaactaacagatgcattagctgcatccaaaacagatacttacgctttagcctatgaaggtgttcgctatgatacaggtgataaattaggctatttgaaagctaccgtggaatatgcgcttcggaatgaagaattaggggcagcatttaaggaatatttaaaaggattgaagttataaaatagcttatatattctttgtatttaaatataaaattgaggccaccattgattatcaatggtggcttttgttgttaactcgcatatcatactaggttgactatagtgtttccgttgattataatttaatagtaatggtataaaactattattatactgattaaattataaggagtaatatgcgagatctattagctcttttaacggatgaagaaacgttaaatttacctactaattgcgttattacgaaggcttattttgatacgcaaggcacagatgaaactgtgtttcatggtgtagagtataaaggcaatcatatatccgtttgtatgtccaatacaagtggtacgttatgggttaatttattacaactaacaagacctttacaaattcgtgagactcctaaagttgatgattcacttaaacgtatttcatttacaaaggatgaaattatacaatttgtagaggatgtaaatgatcgtaatcgtatacatcgtgaagttccttatgtcgtgcctgggttactgatactggagcacctttggaaacatatgctaaatagtaacgcaacgttaggaatgtctattcgttttttagttcctatgcttgctaatgattgtgtctttattgagcgtcaacgtgaaggtaatgtcttagttggcaaattagatgatatgattctttttaaagctcgtcttcatgatgagcatagaacgaattaaaattttatgtgaatgaggtatattatggaagcaagacgtttaacaaaaatggctttattaacagcgctattgtgtgtatcagcatggatttcatttccattaccatttagtcctgttcctgtgattgcgttaactttggttgccacattaaccggattaatgttgaaacctaaggaagcatttattgtatttttagtatatattttattaggcttaataggggttcccgtgtttgctggtggaacgtctgggttagctaaattatggggtcctacaggtggatttatagtttcttggccaatagcatatactttattaagtatttgcaaaggtaagtctcaaaactttttttcttatgcttggcgctctattgttataacaattcctgtagtatatttttttggtgttataggatttatgcttgttacaggaactccactttgggctgcattaactgctgcaatgtttccttatattcctggagatattgtaaaatgtttagttgctgcgtggttagctactaaaattaaaatttaatataaataaggaggtgtctatgtatatatacacctccttatttatattattttcttatttatttttgtgaactaagagctagatgaagatgttgtgaaataactagtaatcattgattcttcaaaaatagacaaagaattactaaaagaatggtataataaagagtaatatttttatcctttaggagttatcatgcaaattaataaagcagccctagagatttttgattttacatcatctttagcggtctattctgaacatgaattaaaaataggtgagcaagacatacatgactatattgcaggccatataacgaaagcttttaaagatcccggcgcgagaacagggacgttacatgcacatagccctatgggaaagcgaatcggtgaatataaatctggtgaaatctcctttatcacgttagcaaaagagttaggggagaaaacctttgactatatgaagcaagccacagtaggcgttgtcattgatactattgtatgcgatgtggtgacagacacatcctatatttgtatgctattatgtcaggctcatgatgcctttacgcatcaattgtttagtgaagatgatggctccttatcgacagaacttgtaccacataaggcggtattgccgatgccgacacaaaagttgcgagcttttgttgccataaatacattggatttatctgttcgtatttttgaaccaaaaggtgaatatgacggtgaagtttgttatatcttagcagataaggtgttacaactcggtacagatcaatcctctagagatactgttaaaaaggtaaaaaccattatagataaggtggctcaagcgcacgaatccgatggtgtagcagagctgacgatggcaaagtctatgattgctaaaaatgcagaagtatctgatacggttaatcctattcgcattgtggaagaggtatttaagtctaaccccattcaacaagaagctgctaaaaaggagttagctgaacaggatatgatgcggcctttaccggtaaatcgtgaatttgctacgaaggtaggcgaacatcataagattaaaaccgatactggcatagaaatttcgttccctgtagaatatatgcaaaatcgggagtttatcgaaattaaaactaatgatgatggtactttacgcattgaattaaagaatataaataaaattgttaataaataggaggctcttgtatgagtaaggaaaagcataaaaaaacaaatgcattacgcatattagatactcatcacatagcatatacgattgatgaatatgaatggtctgaagaacgaggtcagggtgttcatgtagctgatgaactaggtcttgatgaaaaagaagtatttaagactttagttggcaagggtgataaaacaggatatgtagtattctgtattcctgtagctgaagaactagatatgaaacaggctgctcgtgttagtggtaataaatcagttgaattaattcatgttaaggacttattaggtataacgggttatttacggggtggttgctcgccggtaggtatgaaaaagctatttcctacatattttgatgaaacgatgcaagctcaagaggctgtatatgttagtgctggtttacgaggcatgcagatgcatgttaatccacaagatttacaatctgtggtaaatgctgaatttgtaccgcttaccatgaaacattaggaggttgtatggcgaagaaattttatgctgtaaaagcaggccgtacgcccggtatttatgaaacttggaacgattgtgaaaaacaggtaaaaggttttggtggtgctatctataaatcgttttctacaaaagcagaagctcaggcttttataggtgatgaaggtatgagtattggtgattatctagcatcatcaaaaacgtctaaaacaaaccatacaaagaaatctatagctcctgatttctcagaaaccaatcatttaattgcatatattgatggtagttatgacaaatataatcaatcggtaggttccggtggtattatgtttctaaatggaaataaagaaacattttcgttcggcacaaaagatgtgaaatatacagagttttggaatgtatctggtgagttattggcggccatgcatgttatggaatatgctttaactcatggaatttctaagtgttccttatattatgattatatggggatagaaatgtgggccacgaagaagtggaaacgaaataatgtattaaccaatgaatatgcagcattttgtgaacgtatattttcacatgtgaaagtatactttcacaaggtacatgctcatactggtgatacatataatgaaatggctgaccaactcgcaaaggcaggggcagcgataggtaaataatctaaaaggggaaaacaatgcgcgtttgtgtaacggggggcgccggatttatagggtcccatctggtcgatcgactcatagcattaggtcatacagtattggtaatagataatcttacaacaggggtacgagaatttgttaatccaaaagcaacattcatagaaatggatgtacgagacgttaacatagaatctatttttgcagattttaaacctcaagtggtatttcatgaagcggcacaaacgatggtacctgcatctatggaaaatcctaagatggattgtgatgtgaatctaatgggattaattaatatgctcgaagcagctagaaagcataatgtttcacattttctaatgccatcctctgctgcagtgtatggtgatctcgatacattaccactcacagaagacatgtctggtaaaccgacatcattttatggccttacaaaattgacagctgaaggatatttacgtatttatgaacaagcttttggattaaaaacagtatgctttagatatgctaatgtatatgggccacgtcaaggggatggtggagaaggcggtgtaatcagtattttcaaccgcctcattaatgaggataagccgcttaccatttttggggatggtgagcaaacacgtgactttgtatatgtagctgatgtagttgaggctaatattaaagctatgaatcatcctgacttaacaggaatttataatatttctaccaatacgagtacatctgtcaatgaattggtaggctattttacatctatcagtggtaaagaaattgtaactaattatgaagcagaacgggttggagatatacgccattctcgcttatgtaataaaaaagcaaaaaaggattttggatttgaagccactgttagtttagattgtggattgggtgataccttctcatattttaaggggaaataaatataggattatgagtgaaacgtattttctgattattatgaccgtatggaattttattgtcttttgtatatatggatatgataagttatccgctataaaggggtatgagcggatttctgaatttacattgctatttttagcctttgcctttggtggtttaggcgctttattgggcatggtagtatgtcatcataaaacagcaaaattgaaatttaagttattgattcccatcgctattctttggtccgtatttggtatcggttatggctatggttggattggtgcataaaggagatacttgatgttacagttagattctggatttgagctagattataacaatatctataatgaaagctgcatacaggcaagggacatacaaaactttgaacgagccattcaaaatgtatggcgtcataccaatattttgcgatccacaggttatgaagaaggccacctatctaaagatggtcagccagaaccaatcttgttttatcagttgccatatatatcagaaaacggcatcaatacaccggatatgatggaccgtttacatgacttgggtgactatgctcgtaaaagtattgatactgttgtttctattggcatcggtgggtcttatctaggtagtaaggtactctttgatgtgcaatgtggttcattttggaataactatactgatgaagaacgcaacggctatccgagattttattttgctggttttaatgtagatggcccatacttagaagggctaattaaaaccttagtatctcaggccggtgaaaagggtagtgactataaagttatgcttgtagttacatcaaagtctggttccactattgaaccgatggctaattttatgattcttcaaaaagcactagaggatcatcatattaattatgaagttaccgtcgttacagaaacaaatgatgaggcacatcctactattcttcatgatatggctatcaagcatcaatggagaactttctctgttccctatggtgtaggaggccgattctccgtctttactgaggtaggattcgttacagctgctcttgtgggatttgatattgaaggatttttagccggtgctgcatcgatggatatggcttgccaagaagaggatgtttataaaaatcctgcactatttagtgcattattgaaatatattgcgtctgagcgatatggacgtattatagaggtattcatgccttatggtgagtctctacactccttatccgattggtatgtacagctcttatccgaatcattaggtaaaatgagtaatacctgtcttccttatgggcgtacacctgttcctgcagtaggcacgatggatatgcatgcgcaagtgcaagaacaccaagaggggcgtcttaacaaggttgttcaatttattaaggtacgagattggaatacatcattggttgttccaaatttatatagtgagtacgacaaacttgatgcaattggtgatattcctattagcgatattttaaatagcgcacttgacgcgaatcgtgaggccctatctatagataatcgttttaatatgaccatatcggtaccaacattaaatgcatttcatttaggggaaattatgttcatgcattgttgggctgtgtattttgaatcaattttagctggtgttgatgcctttgatcaacctggtgttgaagtttataaacgcttgattggtccaaaacttcaagctatgaaaaaacaataattgctatcatacattgtatgatttgtaaaggacactaatagtcacgggggtgactattagtgtcctttttttatgtatatttgtgttgcatactgatactagatagatattttaattctactatgtgaaaggagtcctgatgaatgaacatacaggaacgtttacgagaaaaattgtatccttatgtgactcaatgtaaacgatacaagaagagtctaggtgtattgtttgtattaggcggaatagcaattggttggggcatattttatacacctgaggctgattatgtccagatggagcctgattcaacggcaatgtcgaaatcagaagataaatctcatgaaataacattgttatacagtacgagtaataacttgcgagctcttccttggcatgaggtattaggcgaatcattagacaaaagtaatatatcttcaatacatatgatggatgaagaacatagcggtgagggtcagcagaacttagataataaagatgattcatcaaaggtaaaacaaggtaaacggagacatagtaagaagatagtagaccaagatagcagttctagtgcagaaacagttacaacaaaacataataagcagaaaacaattcatgttaatggcgtaatacatggccctcaatgggctgtaattttaagcagtggcacagaatctactgttgttatggaaggtgattcttggcatggtgtaaaggtaattaatgtagatgaaaatggtgtaacccttgatgaaggaggcaatgtacgatgtgtatctattggcgaatcatgattatagttttactcttaggtgtaatagaaaatccttgtgtatgggcgaaagaatcgatacatgtacaacaatctgagtcaggtcaaaatacatatagtatgacggttagcaaggctcctttgtccgatgtggtagaggccatcagtcgtagttataaaatggatatacttggtattaacacattgaacggaactgtgacaggaacgatacacggtaagtcaccattagacatgctacatcatttaggggatatgtatcattttgatatacaggatgatcagggcgtggtaaccgttacagggtattctggtgctaaggaacatcgtcatgtagtggtagtagaaccaaagatggcatcatcgacatcgctagaatctgtcataaaaacagtagtacctaatggaaagttcgctgtgcataaggaaacgaatcagattgtattaaatgtaacaggagacgaggaaaaaggagtaaactctatcattcaatctgtagatagagatatgaaacaagtgcgcttggaagctaccattatggctatggagcattcctatacgaaggagacgggatttagatggtcctggctgagtttaaccggacatggtaatgacaagacaaattcttatggtgctatttcttttggaaaagctccagatggggaagcctataaattttttgttaaacctgagcttagccttttagaaacatcgggaaaggcagttgttattgcaaccccttccattatggccttaaatggtgaagccgcacatattttgataggtgaacgaattcctgtaatcgaagagtcaatttctaatggtgaaagaaaaagatccattcattacgaagaggtgggtattaaacttgactatacaccggtagtgacgaaaaatggtatcattgatacgtctatacgagctgaggtgagttcacccattatggtatctgagatgaaatcttataaaataactactcgacaagcacagactagagtgcgtctacaaccaggagaagtattggtcataggtggcttaatggataatcgggatcaaaaacagattgaaaaaatcccaatactcggtgatatccctttattaggtaaattatttagacatagccggaagacaaaggatagcgtggaaatggtcatttttgtgaaagcgactgtggtataataatagttacggaatgataaaggaggtattgaatggaacgcattcgaatgatcggcctaggaaaatcatttggggtgcgccaagtgttttccaatgtgtcctttgaaataaaagaaggcgatagaattgccttggttggccctaatggggctggtaaatcaacactgttgaaatgtatcctcggtattgaggaattagatgaaggccaagttgtaatgtctcctgtggcaagcattggctatttgcaacaagatgttaacttaggtgatgctagtttagctgaagaaatagaaacagcttgggaagatgttcatgcattagaaaataaattacaagagttaaccacatatttagagactcatgaggctagtgaaagtgacttacaacgcttagactatttacaaaatcgattggaatggttaggtggctatgactatgaacaaaaaacaaaacgcatagtctatggtcttggttttaccgatgaagatctatataaaccggctaatgcattttctgggggtcaaaaaacgcgtattaatttggcaaaggccttagtgcgtagtccagattttttattcctcgacgaaccgacaaaccatttggatatggaaatgttggagtggttagaaggttatctatcatcctatcgaggtggcattctgatcgtcagccatgaccggtatttcatggatcgcatcgttactggtgtggtagaactagatcatcacaaggccacaacatatcgcggtaattatagtcgctatgtggcacaacgagaagaacgtttaaaagcagatacgattgcttatgaaaagcagcaagaatatattaagaaaacagaagagtatattgataagtatcgcgctggtattaagtctaagatggcaagaggtcgccaatctcaactaaatcgattagaacgactagaggctcctgaaacttcacattcgttagattttaaatttccaccggctgctatgagtgctgataaggtacttgtattagatcatgtgtctattggctacaaaacggatgatccaatcattgatgatgtatctgtagttgtaaggcgcggcgaatctgttgccttgatcggtcctaatggggctggtaaatctaccatggtgaaagctattgtaggggagttattccctacagaaggtcatatcgatattggcaaccgtgtacaagtgggctatttctcgcaagaacatgaagaattacacgatcggtggcaagtggtagatgagattatcaataattataatttcaccgaagagaaagctcgcaatgttttaggatcattcctatttaaaggggatgatgtatttaaactagtaggtgatttatccggtggtgaaagagcgcgtttagctctgttaaaattattcttacaaggtgataatttcctcattctcgatgaacctactaaccatttagacgtacctacccgtgaaattgtcgaacgggcattacaacaattcggtggcacttgttttattatttcccatgaccggtatttcttagatcaagtatctacaagaacattggtattagagaataaaggtcttactgaatacttgggtaattattcttactataaagagaaattaaaagagcaacaggatatagctgctcttacagaagtagtagaagaagtagctaaggaagatgtgaaatctgaagctaaaaccatttctccatctccatctgatgatcctaagaaaaaaacaaatacatacatggttgaaaagcaattagctgaagtggaagaagaaattgctagattagaggcgaccatgaaaatgtatgaagtacaattagcaaatcctgtagtccaacaagatttggcggaaatggaaaacatatctaagcagctttcagatacggaaagcaacttacaaaagttgtatgagaaatgggaatatttttcagaattattagcataataaataaaaattataaggtgtatatctgaattctatagaagatatacatgatttaattgacaaacataaaaaatatttcataatatagaagtatatataatttatactattataattgctgttattgtgattaaaggaagggtgtaacatgaataaatccatgttaaaaaaagcagccatttttggccttgctggtgtaatggcggttgctgctggttgtggtagcaataaagatgcaggtaatgcaaataataatgaagcgaaaatcgcattgttaacaacaactacaggcggtgctgctgcgtatggcgaatctatcaaagctggtgcagaattggctgttagcgaaatcaatgcagacgctaacaatgtaaaaattaatttgctcgttgaagatactaaaggtgataaaaacgaagcaattaatgctatgaacaaagttatttctaaagataaagtggtaggcgttatcggtcctatgttatctggtgaaatgatggctgctggccctgtagcaaataagagcaaagttgtagctcttggtacatctacaacagctgaaggtattacggatattggcgattacattttccgtaatgctgtaccagaatccttggcagtagatactgcaattaaagaagcacataaaactttgaactttaaaactgcagctattatgtactccaacaacaatgaccaaatggtatctgtaaataatacagctcgtaaagcattggaagctgaaggtgtacaaatcgttgatactgaaacattcgcagataaagatacagacttctctgcacaattaactaagattcaacaagctaatcctgatgtaatcgttgttgcttctctataccaagaaggcgcattgattatgaaaaaaatgcgtgaaatgggtatgaaacaacctgtagttggttccaatggcttcaacagtcctgaatttattaaaatcgcaggtgctgcagctgatggcgttatcgtaggtacaccttggttccctaacaaagatgaccaaaaggtaaaagacttccgtaaagcttataaagataaatacggtaaagaaccagatcaattcgcagcgcaagcttatgatgcagtttacttgtatgaagcagcattgaaaaaatctggctccactacagatcgtgaaaaattccgcgaagcattgaaaaatattgccgacttcgttggtgtaacaggtcaatttaaatttaatgaccaccgcgacccttccatggaagttcaagtattgcaaattagaaacggtcaatttgacgcattaaaaaaataaaagttgaggtagtatagtgtttttacaacaattagttaacgggttaaccctcggtagcttatatgctgtactcgctattggcttaacacttgtgtttggcgttttaaatatcatcaacatggcacacggaggcatctttatgataggtgccttcgttggtctttttatggtaactgtttttaacgtaaacatatttgtagcccttatcgtagcgatggctgtaggtgccgtactaggttacttattagaatttgtggcgttacgcccactacgtaagaaaaaggtgtctcacttagcaccacttatcagcaccattggtgtttccatcttccttgaaagtttggcattattattatggggtcctcaaacaagatccttcccaccagattatattggtggccttatcgactttggggtatttaaaatctccatggtgcaaattatcggtttaggtgtttctgttctcttaatgattattttgaatgtggttattaaaaagactaagattggtaaagccattcgtgccgtatccatgagcacggaaacagcagctcttttaggcatcaacccaacgatgattatttctgttaccgttatgattgcttccgctttaggtgccgctgccggtgtacttgttggcctttccttcaatgctattgagcctactatgggtgttattattggatttaaaggccttgccgtacttatcctaggtggtcttggtaatattacaggcgccatggtaggtggctttatcttgggcattgcggaaatcttctccgttgcttatggtgcatctacattccgtgatgcagtagccttcggtttaatcattgtcttattattctggagaccacaaggtttatttggttctaaagataaggggggcagaccataatggatatttttaacccttattatctacaaattgtgatgtttttcatcatcaatgccatcctaggtatctctatttatttcacccttgctagtggacagttatcccttggggcagctggtttcatgagtgttggtgcatatgtgggtgcattgctttctttgaaagctgatttacctatcgtagttggtattttagtaggtggctttgtagccgctttagttgccgttatcatcggtttgccaacaactcgattgaaaggtctatatctcgccatcgccacacttggttttggtgaagtagtacgtgttatcttcttgaacttagatgtgacaaatggtgctcttggtctatccggcattccatctattcctcaagaattgacaaattttgcttacgaaattgatattgatggtcttatgggaatcgatgctgttgcatggggcaacattatggctatcattattttactaatcgttttgatttttattattgctttctgtgtacgtatcaacaatagccgtgtcggtcgtgcctttgccgctattaaggcagatgatcatgctgctgagttgatgggaattaatgtagtgtactataaaatgatggctttcatcatcggtgcatttatcgccggtatcggtggtggtttgtatgctcatattacaaactttatcaaccctacagacttcagttatcataaagtagtacaaatcttattgttccctgtatttggcggttctaatgtagtgtggggctccgtactcggttctttcattcttacattgttgccagaagtattgcgtttcttatccgactatcgcgatatcatttatggtgcattgttagtcattttgatggctgttcgtccagatggtattttaaccgaatctatggtagataagattagccgtaaattaggctttaaaaaagctccatacattcctgaaacacaagtattaacagaacgttttgaagcgtataaacgtaaacaacaagataaacaaggataggaggggaactgaatgctattagaattaaatgacgtaagtaaaagctttggtggcgttgcagctctcacaggcatatcctttggtgttaagcaaggtgaagtgtttggtgttatcggaccaaatggtgctggtaagactacactctttaacttgattacaggtgtattccctgtaagttctggcgaaattgtatttgatggtatgtctgttgtaggcattaaacctcatagaacggtagaaatgggcattgctcgtacattccaaaatattcgtctctttggcaatatgacagctttggaaacagtattaactggtatgcattgccgaactggttctggtttcgttgctagtttcttaagaacaaaacgccaacgtattgaagaagaacgttgtcgtggcattgcctatgaatttttaaaactcgtaggtcttgaagaagatgctgaagaagttgctacatcattaccatatggcaagcaacgtcgtctcgaaatcgcgcgtgctttagctacacatcctcaattaattttgctagatgaaccagcagcaggtatgaatgatagtgaaacagaagcgttacgccaattgattggtaaaattcgcgacttaggtattactgttgtcgtaattgaacatgccatggaattgatgatgaatatctgtgaccgtttggtggtattcaattttggtaaaaagattgctgaaggtacacctcaagaaattcaaaataatgaggctgttatcgaagcatacttaggtaaagaggaggtgtaatatgttaaagctagaaaacatcgtggctggttatggacatattacagccttaaaagacattagcttagaagtaccacaagggtctatcgtatccttgatcggtgccaacggcgctggtaagtcgacaacaatgaagactattatgggccttgtaaagcctacatcaggtaaggtgctatttgagggtcaagacattactggacataaaactcatcaaattgtacataatggtatttccttagtacctgaaggtcgtcaaattcttcaagatatgagcgtttacgagaatcttgaaatgggcgcttatatacgcaatgataatgagattgaagcggacattaaaaaggtatttaaacgctttccaattctcgatgaacggagctatcaactaggtggtacattatctggtggccaacaacaaatgcttgccattggtcgtgctcttatggcccgtcctaagttattgctactagacgaaccatctatggggcttgcaccattagtagtaaacgaaatctttgaaactattaaagaaattagtgcagaaggcaccaccgttctcttggtagaacaaaacgtccgtcaagcattgaaaatcgctgattatgcgtatgtattggaaacaggcaaaatggtattgtctggtccagctgatgaagtacgacatgatcctcgtgtcatggaagcttatttgggcggtcgtgtcgaataaaattaaatacaatttatttggatgtatatatctattattaaacggatatatacatccatttttttgcaaactcctaaatatagaaattttttattagtaatagaaatatatagaacaaaataacacttcgatatgtgaagaaaaatacacatatacgggtaagcattaaacatagataatttcagtattcttgatgcttcatgaaaaccatataaagaagcttcatcttgcttatatagtagttacaaagaaacgatgataaaatatgtgtacgataattaattaaatattaaatttatttaaatagttgtgttaaggtgttttgttaattgaaatgaatgctatgaggtgcatgtatgaatcaaaaatggattgctttatctcttgtcataggtacgatagccactacgggttttgcaaaggatgtttctcctgtagtagttacaacatcaaatatgaatacgtctgcatctacaattggttctgatcaagagtatcgtctacgacaaggggatgaactcatgattgatgtagtacaacaagcagatttaggtgcaaataaaactttcaccattcgaccagatggatatgtatccattcctatggcaggtaatattaaggcggatggaatgacagtagaagaattcacccgaaatgtatctaacgcattatccatatacattatcaatcctgatgtgtcggttaatgttacaaaattaggtggcgttcgcgtttatgtatttggtgaaattaataaaccaggtgcttatacattaacaaaatcgagtaccgttattgatgcgattggggtcgcgggtagtttcaactgggatacggctaagaagaagatattcttaattcatcaaaatgatcctacaaaacctattgaaatcaatttaaataatatgttgaaaactggtgatatgtcccaaaattacgttatgcgtgaaggcgatatcttgtacttaactaagaacagtaagattagtttctctagagatattgctcctattttgacaggtgcttacatggtatctcgcataggtaaagactaattagtaaaaatagtatcatatgtaagtcatataaggggggctttcattgcgttcatatttattacccggcttattacttattgtagatgttattactattattggtgtggcattgatcagtttgcttatacgatttgatggttatataacatcacattatctgcatcagatgatagatgcattgcctataatggtaatctcctatattgttatgcttttgtccatgcatctatatacgcgcatatggcgctatgcaggtatgcgcgaaatggttgcggtattgattgcgaccaccttaggagcaggacttttctatacagggatgtatgtatttgataaatctttacctagatctatatatttgattagctggattcttagtaccggtgttatcggaattggtagaatggtactccattatattgccatgcgatatggtggaaaacaaagtactgatgctgatatggtaaataccttaatcattggcgcaggtgatgcaggtgccacaattgctcgtgaaattgaacggtatcataaacggtctcgtaaggtaattggtttcatcgatgatgatgagtctaaattcaatcgtctaatgggcggcgttcgtatactaggtaatcgccatgatatcccatctattgtaaaagaaaataaggtgaaagaaattataattgccatgccttctgttacacgtaatgaaatcagaaatatcatggaaatctgttcacctcttaaatgtaaagtcaatacattaccggggatgtatcaattgttagatgatgaggtactagtatcccatttacatcctgtatccatagaagacctattagaacgtgatgaggttcgtctcgatatggatgttgtagaacattatattcgcgataaggttgttctggttactggtgctggtggatctataggttcagaaatttgtcgtcaaattatgcgtgttggccctaaacagctcttactattaggccatggtgaaaatagtatatacctgatcaatcaggagttgaaaaatatatataaagatggcccaattataccaattattgcagatattagagataagcaacaattagatcaaatattcactcaatataatccgcaagttgtattccatgcagcagctcataaacatgtgcctcttatggaaattcaaccgatggctgccgttttaaataacatttatggcacaagaaatgtagccgacgtagcaggtcgccatggtgtagaacggtttgttatgatttctacggataaagccgtcaatccaactagcgttatgggtgccacaaagcgcgtcgcagagaaggttatcatatctatgaatgatacatatgatacgaaatatattactgttcgtttcggtaatgttctcggcagtcgcggttccgtcattcctttatttaaaaaacaaattgaagctggtggccctgtaactgtgacagaccctgaaatgacacgctattttatgaccataccagaagcgagtcaactcgtgttacaggccggtgctatgggtaaaggtggagaggtattcttacttgatatgggcgaacctgtaaagattattgatttagcaagaaatatgattcgtttatcaggattggaacctgataaggacattcatattaaaattacaggacttagaccaggtgaaaagaaatatgaagaattacttacctctgaagaaggaactaatcgaacgaatcatacaaagatttttgaagccccgttagataccgttgatcgtgattggttgatagaaaaaattagcacctttgattcttgtgaaactgatatggatgtaattggcgtattacaggatattattccaacatatacacctaaccataatatttaagcggaaagagagaccgcggtgttgtatgcctacttgaaaggggtattgggatggaacaaattatagatataaaagatatagccaagattcttgttagaaaacggcgaactattataaatgtgactggcatttgtattctccttggcggtgcgtacttaatcgtgacaccatctacctatcagtctacagctatgttgcgtattaaacagacgcaaggcttaggtaattcagtgctatctagtgacccaagctactctgatacgatggctcgtcaattgatgaatactgatgcagagattttaaaaagtcgtaatgttgtggaacctgttatcaatgaaattgccggagatagtagtaagctaccaacgtatgaagaatttgttaaaaatcgtattgaaacaaagccatataaagaaacacagttattacaagttagtgtgactggtaagtccccagaagaggcacaagaagctaatcagttattaattgatacatttttaaaacgcttagccgagttatcccaagttgaacaaaaagcgactcgtgagtttttacaaaaaagagtggtaacagcgaaggaggaattgtctgaagcagagaaaaagctccaacaatttcaagtagataataaaatttattctaccaatgatcaaatgaaggggcttacagataagattacgttaatcgatcgtgaaaaggcacaaaataagctcgatttagaaacggcgcaagctgcattaggtagcattaatgctgatttaggttcggcaggtgctagtattgcagatagttcaacggtacaagcttataaatcacaactagcagatttagaggctcgtaaggcaagttacgtaggtaaatatactgattcacatcctgcaatgaaggaagtaaatgatcagattgctaaagcacaagccggtttacaacaggaaatcgatgctattgtttcacagcaagctccatcaagtaactccgctcaacaagggttattaacagataaatttaaaaatgaagctgctttagcagtagctcaaagtaaagaggctacgttagctgatttagataaagataacgaagatgcgatgaaagcactccctgaaaaggaacgggggtatattcaagctaagcgtgatgtagatgtagcccaagatatttatgaaatgctttctaaacgtctggaagaagctaaggtggcagaggttatggtaccgaatgaggtacaaattgtcgatgctcctacattaccagaaaaagcgattgctcctcgtcgtgtacttgttatggttgccagtgctgttatcggtttaattttaggctgtttgtatacattagttaactccttgcgaaatcgtagaatacagactgcaaaagatgttgaagatatgttacaggtgccaatgttaggtgtcattcctaatcacagaaaatcggtaacagaagaacctaagaataaagtgttgcgttggttgtacaaggtgagaggttaagatggatacgatacgattaatttcaaatgaatatggtgatactccttttgtggaatcttatcgaacattgcgtagcaatttacagtatcgctgtaatgcagaaaatagaaaaatgttgtgtgttacatctgctacaacaggtgaaggtgtatcggaggtggccgctaatttagcgatttctttatccaagaataatgacaaggtgctgttaatcgatggtaatttacgcaatccagtgcaacatattgtatttgatgtaaaaaatcaaggattaacaaatcatatcattatggatgaagatttgacgattcatcgtcatgtgatgcctcatctagatctaattaccagtgggattgcagtggaatctccgtcagaggtggttgattcccatcgattatctacggtatttgagtacattcgtgatgaatatgatgtcatcatagtggatacaccatcggtgttaagtgttacggatgccttggtaatagctgagaaagctgatggggttctcttggttgtaaaaggtgattatgttcaacctgatgatatggcattagctaaacaacgattagagcaaattggagtacctattatcggatcagtgtttattgatatggaataaatggaaagtataggtgaaagctatgaaaattaatttctctcctccagatattacagaattagaaatcaatgaggtggtagaagcgttaaaaagtggttggattacaactggaccacgtactaaggaattagaacgacgtattgcaacgtatttagggacgccaaaggcagtgtgcttaaattcagcaactgcagccttagaaatgattcttcgcgtattgggtattggaccaggtgatgaagttataactagtgcttactcctatacggctagtgcaagtcctgtagttcatgtaggggcaaaactagtattaatcgatacagcacctgattcttatgaaatggactatgataaggtggctgctgccataaccgataagacaaaggccattattcctgtcgatatcggtggtgtaccttgtgattatgaccgtttatttacaattgtaaatgatgcaaaatctttatttataccaagtaatgatatacaacgtgctttaggtagaattccaatcgtcgcagactgtgcacattcttttggggcaacctataaagggatgcatacaggcaatgtagctgactttagtagtttttcctttcatgcggtaaaaaactttaccactgctgaaggtgggtgtgctacgtggaatcatatagagggcattgatgatgaagctctctataaggaatttcaactattatctttacatggtcaggataaggatgcattggccaaaactaagatgggggcctgggaatatgatattaaaggtacctattataagtgcaatatgacggatattatggctgctattggattggcccaattagaacgatatcctggcctattagaacggcgtcgtgaaattattgatcgatataatgacgcgtttaaagtttgtcctgtatctgtagtacctcattatacggatgagcatatgagtagtggtcatttatatttagtgcgtatcaatgatgcaaccatagaacaacgtaatgaattaattgaacgaatggcagaaaaaggtgttgctacaaatgtgcattataagccaattccaatgcatacggcttataaaaacttgggattttctatcgatgattatccgaatgcatataatcagttcaaaaatgaaattacattgccccttcatactaatttatcggatgaagaggtaagctatgtgattcatacatttaaagaatgtttaggtgcattatgatttggaaatcatggcaggagttgcccaatgatatgcgatgtgaagcagttcgttcttattacgacatcttagtatccaaacatcgtgatttaatgcttaagtctgtatttgatcgcttaatggcagccattctattagtagtattaagtcccatatttctattattagcggtatggataaaactagatagtgaaggccctgtattttttagacaagaacgggtcacgcagtatggtaaatcctttagaatttataagtttagaactatggtacaaaatgctgaacagcttggtgcacaagttacgtctaaagacgatatgcgtgttacatctgtaggacaggctttgcgaaaatgtcgactcgatgaattgcctcagttgataaatatattggaaggtaccatgagttttgtcggtacgcgtccagaggtcccaaggtatgtagcagcttatacagatgaaatgaaagcgacattgttactgcctgcaggtgtaacgagtgtagctagtattcggtataaggatgaagatatcttgttagatgcggcagatgatattgatgattgctatattcataatgtattgcctgcaaagatggaatggaatttacggagtcttaaagaattctcgttcattggagaattaaaagttatggtggaaacggtattggccgttatacgttagaaaggtagtatggcagaaacaacagctcatgatatacaagctaaagaattgaatatgcttttagtatttaaagaattttgtgatgctcataatctacgattctatttatgtggtggcggtcttataggagctattcgacataaagggtttatcccttgggatgatgatttagatatttttatgcctcgtcctgattatgaaagattggctgaactttggcctatacacggtgataaacgatatacctattgtagaacaacgagagataagatctatcatgatgcgggtgcatcaattcgcgatgaagaaacgactttcatcaatcgccatagtgtgaatgaagatatttgtcatggattagcccttgaaattatgcctatcgatggctgtcccaagggtactgtcaaacgattctttcaattaatgtgggccatgacctttgccttgtttaatgcacaacggttgcctgataacaagggcaaggtatatcgcatgttggctgggtgcatttataaggtgatttctaaaccttcgtggcgttatcacatatggcgctttgcagaaaaacaaatgagccaatatgattttgacacatcccatgaagtaacggaactgattggtagtttgaaaggtatgaagctacgccatccacgccaagattttgatcacgttgtatataaggaatttgaaggtcatcaaattcccgttatggctggttatgaacgatacttacgtttgatttggggcgactatatgcaattgcctccagtggaacagcgtgtagcaaagcatgatgccgtatatatcgatatggatcgtagttataccaattacaagggcattcattatttagtaaatacacatcgttaatagttaagggaggttctatgaaaagaatagcagttatctttgctggtggcgtaggatcccgtatgaaaaatgataaaatgccaaagcaattccttgaatggaatggtaagcctatactgatacaaacactatccatttttgaagaagaacccttcattgatggcattgtattagtgtgtaagtcagactggatggattatgcaagggctctgatagcaaaagaaggccttcaaaaaatagtatccattgttcctggtggcgagactgcactggactctcaatataacggtttgcttgaagtgaaacgattatatggtgttgatgatataacagtactaattcatgatggtgtacgacctttagttgatcgttctaccattgttagaaatatacgatctgttgaaacaaaggggagtgccattacggtaactcctgctattgaaacagttatggttactgatgatggagaaatcaaaacgattttaaatcgtcaacaatgtttgatggcaaaagcgcctcaaagttttaggctcgttgatattctttcagttcatgatacatcaatagctgaaggaattcatgattttatcgattctgcatctatgatgatgcattatgggtatcccttgtaccccgtatggggggaacctgaaaatattaagattacaaccccatcagattattatatgttcacaggtatattaaaaaatagagaaagtggaggtgagggcaattaatacggttgttgaacgagacatacaagaaattataggtgattctcacatatttaaggcgtttcaggataagacaatacttgtaacaggtgctacaggtttaataggctctatggtggctcgttcattagtagccgccaatgatgcctaccatctttcattacatgtcatatgccatgtgcgcaatatagaaaaggcacattctatgtttgaggatattctaaattcacaagcaatcacatttgttgataggccattagattctctaactgtagcatgtgactatattatgcatggggctgcccctacaaaatctaaatattttgtagaacatccggtggatacgattcgtacatcaatacatggtacggaacgtatgttagaaatgggaaaagaacagcggattttaggtatggtatatctatcgagcatggaacagtatggtataccttatgaatctggtcaagttatgacggaggatcgcattggatatttagatcatctaaacgttcgtagttcctattctgaaagtaagcgtatgtgcgaatgttactgtaaatcctatgctgttgaatttggtgttcctgttaaaatcgctcgccttgcgcagacgttcggcgctggtgtgccgttagatgataatcgggtgtttatgcagttcacccaacatgccttggatggtcgtgatattatccttcatactaagggcgattccatgtccaacttctgttatattacggatgcagtgcgggccattattattttgatgacccaaggtgatatgggcgaagcttataatgtgtgccatgacgaggaaactcgtagtattgctagtattgccaatttagtagcgtgccatgtggggggcgataaagtttctgtcgtctttgatatacctgaaaatgtgtcctcctttggctatgcgcctacagttcatatgtttttaaattctaggaagatgcgcaatctatcatgggaaccaaaggtaacaatgaaagacgcatatatacgtttagccgaatatatcacagaggagcgtcaaaatgggtaaagaaattattattgttacgatttccctcggtaatgatggagctgaacgaattttaacagaattggcccgccaatggcatcatgatggacacgagattacagttattcaaacaagtcctaatcgctatggcaccgaatatgcattgccagaaggtatagagcaaattcaaatacatacgaccagttccaataagattcttcgatttttacaagaaattaaagcacttattggcatattaaaacaacgtcctaatgcaacgtgtttatcatttctgagtgcgtccagttttatattggctattagttcgtggtttgtgaaaaatcgcatggtattttctgaacgaaataatccgcgtaaggtgcctgtcggcaaacatcaacaaatacttcgaaactttgcatttcgatttgctgatgccatagtatttcaaactgaagatgcaaaatcgtatttttcaaattctatacaaagacgagggcatatcattccaaatccgattaatggcaatttaccagaaccttacgaaggagaacgtgaaaagattattgtaaccgcgtgtcgattgcatccgcaaaagaatttacctatgatgatcaatgcatttagcatgttggcagatgagtttaaggaatataaacttgtcatttatggtcaaggtgtcctagaggatgaacttcgtcaacaaattgcaaatttaggattagcagacagagttcttttaccggggttcgcaactaacatcttggaacaagagcgaccatgtacaatgtttgtgtcatcgtctgactttgaaggcatatctaactccatgttagaagctatgggaatggggctacctgtagttgttacagattgcccggtaggcggtgcgcgtatggtcattcaagatggtgtcaatggattactagtgcctgtaggggatacgaaaacgatgtatgaaaaaatgaaatccatcttagcaagtcctgagttggctaaacgtatatctgttgaagcaatcaaggtgcgagatacattcccactaagtaaaattgctaaacgttggattgatattttatagaaaaattagtgttgtgatgtacatatattgagagaagagggacagtattgaagttaaatattacgaccatatctaatcgtcttatatggtttataacattagtatttcttgtactttcattgaccatatcgttcgccctcggcgatgcagattacggtgcctatgtgctattcgtatgcttgtttggattaatactatgttatctcgtacgagaccaggggcgaattacagtgtcatttatatggatgcatatgtatatgctactattcataggcgtttgctatcttagttctctaaatgctcttgatccatctgtagccatgagtagaagctttgatattgtaaaaatattttgtatgctcattgttttgtatatgtgctttcagcgagaaaaatcagttgattccttattgaaaatcggcatgtggacaggatatattgtctgtttctatacggtgtattactatgggctcgattattttatcaatgttctttcatcatcggctcgtatagcaaatgacgcattaaatgcaaatacagtaggactattaggtgccaatgctattgtaatgaccgtgtattatatgatgtacgataaaccgcgatggtggaacatcatagcattaccaacattaggtatattggcggctacaggtagtcggaaagcattggtatttgtcgttataggtatcgttttattattcgtattcaaaagctttcgtagtaaaaatattgttaattccttagctaaattagtagcttatttgagcatattaattattgcttttataggtatattacagctacctatttttagtgaagtattagaacgtatgagttccatggtagatgctttcacaggcactggtggggattcttctgctattgttcgcatggccttagtcgatattggttgggatttatttcatcagtctccaattataggcgttgggattaataatcctgcggtatatacatactctattttcggtcgagaaaattactaccttcacaataattacattgaattactggcgggtactggtgttataggtgtggtcacatactactccatgtatgcctatctcgtttataacatgatacgatatcatgattttcacagcaatgaatatgtcatggtatttatattacttatgtctcaattagttatggatatgggtttggtttcctatgaaagtaaaagtacttacttttatatgatgttattttttatagaagttcagattttacggactaaaaggaagaaattacatgaacatacaaacaatcttgaccaagggaaagcggttcatctctgatccttattaccgtttacgggtgatgataaaaatgggtgcttatgattccttaagcgatgaagcgtttctacgaaggatatttcctcaatatatgggatatccattaaatttagataatccacagacctttagtgaaaagatgcagtggatgaaattatatgatcgtaaatccatatatactactatggttgataagtatgaggctaaaaagtatttagctgataggattgactcaaagtacatcattcctactttaggtgtatgggattcttttgatgaaattgattttgatgcattaccgaatcagtttgtactgaaatgcactcatgacagtggtggtattgtaatttgtaaagataagtctaagtttgataaagaaggagcacgtcaaattattaataaatctttacagcgtgatttttatcttatagctcgtgaatggccctataaaaatgtacgtcgccgtattttagcagaagagtatatagatgagttaggaaatgcagatttattagactataagatgtattcctttcacggagaaccaaagctaactgtagtttgttctgaacgattttctaaaggtggaacacgtatgaactattatgatgaggattggaattatattaatctttccgttcttcattatgagccctctaacaaaacatttgaaaaaccgccacactatgaagagatgagatcattatgcaaacaattatctaaggattttccgtttttacgggttgatttttatgacgtgaataatcatctttatattggagaattaacattgtatcctggcgcaggatttataaagatggaaccaatggagtttgattacgaaatgggagagtggttacatcttgaaggtatacatcggagctgattttgttcctacagatataaatcgtatattattcgaaaatggtgatatggaatctataaatttaaaatcacctacaaaaacgattaatgggtttacagcaatacagaattatttgtcatgtgaagcgcatcatgagttatttttacaaggcttaaagaatataaatcgtaattaaatggatttgaatatcaatggatactaaagttgtagctgctgctaagtggtcacttataacggagatcttagcaaagcttattacaccaattacaaatatcatattggcgcatattttggcccctacagcatttggtattttagccactataatgatggttatttcatttgcggaaatgttagcagatgcgggattccagaaatttcttgttcaatacgaatttgaaagtgaagaggctaaacagaaaagtgttagtgttgcatttatttcaaatatagtactagctattgtattatggattgctatcattgtctgccgtgatgagttagcatcattggttggcaatgaaggattaggtattcctttagctgtgatgggggctatgttaccattgagtgcatttagtagcattcaaatggcaatgtatagaagaaattttaacttcaaatttctcttaagcatacgaatgattactatcattactcctttgttcgtatctataccaatggcattatcaggttttgattattggtctttgattgctgggcttttagtggcacaactatttacagctattgcattatgtgtgagacaagaaaaattgatatccatctatttttcgtatcctatatttcgtaatatgttcagttttagtgcatggtccttggcggaggcattctctatatggcttacggcatgggtagataccttcattattagtcattttttgaacgcatattatcttggcgtttataagatgccaacagctatagttactactgttatggctattgctacatcttcgatggctcctgttttattctctgctttatcacgacatcaacataataaagaggagtttgaaaaaacatttttaacatttcaacgatatatggccttatttttggttccattaggtgttggtatgtttgtatatcaagattttattgtacaaattttattgggacctcagtggaagttagccggaatagtgctaggatcatgggcattaagctcatctctcgtgaccgctatttcatatttaatatctgaagcatttcgtgctaagggaatgccaaatatttcattccttgcacagatgttacatctcatcgtattaattccggttatatacatatgtgttcaatatgatttcactacatttgtctatgctcgttctatagtacggattcaaatgattggtgtacttttatatctcttagctgtgtatgtgaagatgaatgcgtggagtgtaatttttaatattaaagcctatatcattacctccgccattgtaggtattggttcctatgctttgttgcatttatataatagtatgatttggacgattttctgtatatgtgtcagtcttatttcgtatcttgttgtgttgtatttatttccaacggagagggttgtacttgctaaaatatgggatagcgccttagcacgactaagacgttcctaaaggaaaggacagactatgcttttacaaaatgtatcattacataacaaggtaattctcattactggggctgcaggatttgtaggtgccaatcttgttatgtcgctttttaataatattgaaaatagcctcatcataggtgttgactctgttaatgattattatgatgtgagtttaaaggagtatagacttcaacagattgtttcctccgtaaaacatgataatcaatggatattcaaaaaagggaatatagcggataaagagtttttacaatctatttttgatagatataaaccggatgtagttgtgaacttagcagcacaggcaggtgtacgctattctattacgaacccagacgcatatatagaatcaaatattattggcttttacaatatattagaatgttgccgtcattcgtatgataatggggcaaaaggtgttgaacatcttgtatatgcatcatcctcttccgtttatggttctaataaaaagattccttattctacagatgatcaagtagataatcctgtatccttatatgcagctacaaagaaatctaatgaattattagcctattcctatgctaagttgtataacatcccatgtacaggccttcggttctttactgtgtatggcccagcagggcgtcctgatatggcatactttggatttactaacacattgcgcaaaggcgaagtgattaaaatctttaactatggtaattgtaagcgtgactttacttatatagacgatattgttgaaggcgtttataaggttatgcaagtagctcctgaacgaagaaatggggctgatggattaccagtaccaccatatgcaatttataatatcggtaataatagtcctgaaaatctattggactttgtgacaatattaggtgaagagttaataggtgctggtgtgttaccagcagattttaacatggaacgccataaggaactcgtaccgatgcaacctggagatgtgccgattacatatgctgatacatctgcattagaaacggattttgggtttaaaccgagtacaacacttcgagaaggtttaagacgttttgcaatatggtataaagatttttatatgaaggatggtaaataaatgaaaatagcaatagctggtaccgggtatgtaggtctttcaaatggcgtattattagcacaacataatgaagtggttgcactggatatcattcctgaaaaggtagatatgattaaccgtaaagaatcacctattgttgattcagaattggccgattatttaaagaataagtcgctaaatttccgtgctacattagatcctaaagaggctttcacaggtgctgaatatgttataatttctacacctaccaattatgatccacaaaagaatttttttgatacatcatccgtagaatctgttattaaaacagttttagatattaatcctgatgcggttatgattgttaaatctacagtccctgtaggttatacagaagagatgcgagaacggtttaatacgaagaatataattttctctcctgagtttttacgtgaaggtaaagcgttatatgataatttatatccttctcgcattgtagttggtgaagattcggaacgtgctcatacgtttgctcacttattagcagaaggtgctcttaaagatgatatacctttatgtttcactggttctacagaggcagaggccattaaattgtttgctaatacctatttagcattgcgtgtagcttactttaatgaactagattcttatgcagaggtgcgtggattaaatacgagtgagattattcatggcgtatgtttagatcctcgtattggagatttctataataatccttcttttggatatggcgggtactgtttgccaaaggatacaaaacaactattggcaaattacaatgatgtgccacaaaacctcatatctgccattgttgatgcaaatcggacgagaaaggatcacattgcagatgccatcatcggaaaggatcctaagattgttggtatttatcgattaacaatgaaaacaaattccgataattttagggcttctgcggtacagggtatcatgaagcgtattaaggcaaaggggattgctgttgttgtgtatgaaccaacactagaggctgatgattttttccactcaccagtcattagaaattttgatgattttaaacgggttagtgatgtgattgtagccaatcgttgggatgaatcattggctgatgtaaaagataaagtttatactagagatatttttgaccgagattagtggcggtgatagtagatgttaaagaaacattggataagctttactttagttgttctcgttatcctttttatctgggataattcgctacaaaatgatatttcctcagatggtttgagtcttaagatgacacaatggttgagtccgattctgtataagctgggcctcaccggtgacatgtggtcgttaaatcgcattgtccgcaagatggcgcatgtgttcgagtttgctgtacttggtggatgtttgtatgtagcattgcatcaatttaatcgtgaatatgcaggacttaaagtgatttttataggattagttattgccgttatggatgaatgcttgcaacttgcaagtattggtagacatgcatcgattcgcgatgtagcaatcgatacagccggcgttatcattggtgttgctgtcgtacaagttatactatctatttatcgaagaatccggcatagttaatagatggattttaattaaatatacaaggctgctatgagttatttataggagccttgtttctttgtgaaaacaaaatgaaattattaaataatctttaattttaagcaatcaaatattatcaaaagtttaggtataggtacttttcaagacatagattcattggtataatatgaatacaaaatgaatttgagtaattaaagagattatatttaagagatttatatcgaggtaaggggcgatataaagatgagaatggggaagaagatgaaacgcattttagatttacatacatatattttgccggctatggcagacgggaagggacctcaatccatggctgaatctgtgcaaatggttaaagatttggtccgttctggtattacagatattttttgtacacctaaggttaatgagctaaatgtacaggccgttgttgagtcagtagtggagcaggtagaaaatttaacacaagtagtatctgaacaagcgataccggttacattacatagtggtgccgttgttgagttaggtgatggcatgattgactatatacgcaatcataaagaatcacttgtattaggtaatagtcattttatgttagttactattccacaagattgtaagttatatcatgtagatgcgtggttacagactttatgtgacttaggcatcacgcctatcataagtgaagtggaacgtagcgaccttttctttaataaacctgaacaactattggaatgggttgataagggcattttatttgaatgtaatattatgtcttttacacatcattctgagcattatacgagagctattgaattatatacgaatggtctaatacacttctttggtactggttatgatgtgatgaataatcaatatggtagctatgtagatgtaatttctaaactagatgttgaatataagaaagatttacttagtgacgttcgactaaatgaacgcgatttattagcggatagagtattttatcctacggtaccggatcattgggcaggaaaacgacctaatttctggactcgacttctatcaatcgctttataaaaaaaaagagtttttttgttatgccgtttaagtatagcaaaaagactcttttttacatgatgttgtattttttattgcaataaaacactatatatagtatactatgaaagcggttagaaatacgaaataatcttttgaattttgtatttttcgtagtaaataatatagattgagtatggttttttccatacttttttatatgtaatgacattaattaattcggagtatgggaaacggggaggttccgagatgttgcaggtcattaaacgggatggtacaaaggtacctttcgataaacataaaattgcagtagctattgaaaaggcagaacatagtagtacggggttatatgaatctggcttagctgaacgcattgctgacgaaattgaagcatatgctataaaacttcaaaaggatatgacaatctatgctatagaagatcaagtatactataagttgattgagtatcataatcctgcaacagctcgtgcttatgaaggttataaagcggtacaagctttcaaacgtcgccaaaacacgactgacgaagatgtcatcggtttgttggatcgtagtaatgttagtgttcttgatgaaaattctaataaagatgctgccattgtatctacacaacgcgatttaattgctggtgaagtgtccaaggatattgcgcgtcgtaagttgattcctacagatatactagaagcacatgatagcggtgctatccatttccatgatatggactatatcatccaaccgatgtttaactgttgcttaatcaacttagaagatatgttgacaaatggtacagttatcaatggtaagcgcattgacacgccaaaatcattccaagtagcatgtactgtaacaactcaaatcattgcacaagttgcatctggtcaatatggtggtcaaagtattaatggtattgaccgtattttggcaccattcgtacgtaaatcttatgaaaaaatcctcaataatgtaattgaagaacaagttgagatttacggcatggaaccaaatatggaaaaggctcgtgaaattgcttggaaacgcacgcgtaaagaggtaaaggacggcattcaaaccattcaataccaaatcaatacattgatgactacaaatggccaatccccattcgttacattgtttatgtatttccaaccggattatgaatacgctaaggaagcggcattaattacggaagaaattttacgtcaacgtattaagggtgtaaaaaatgaagccgatgtatacattacaccagcattccctaaattaatttatgtattagacgaacacaatgtttatccggatagcccatattattatttaacagaattagctgctcaatgtacggctaaacgcatgtatcctgattatatttctgcaaagaagatgaaggaaaattacgaaggcaatgtattcagccctatgggatgtcgttccttcttatctccttggaaggatgcagaaggcaattataaatttgatggtcgtttcaacatgggcgtagtaagtttgaatttgccacaaattggtattttagcacgcggtagtgaagaaaagtattttgaaatcttggataaacgccttgagttagctgaaaaagcattgatgttacgttacaatctattgaaagatgtagtaagtgatgtgtccccaattcattggcaacatggtgctattgcgcgacttaaaaaaggtgaaaaaatcgctccatttttgactggtggctatgcgacgatttcccttggttatatcggtatttatgaagcatgtcgcttgattactggcgaatctaatacaggtgaacatggtcgtgtttttgccatgaaaattatggatcgtttgaaccaagctattaatgaatggcgtgaaaaacataacttaggctttggtctttatggtacgcctgctgaaagcttaacaaatcgcttctcttctttggaccgagcacgctttggtattatagaagatgtaacggacaaaggttactatacgaatagttatcatgtaagcgttcgtgaagaaattaacgtatttgataaatttgcctttgaatctgaattccaaaagaaatcgactggcggttgcatttcctatgcggaaattccgaatatgtccaataatattcctgcagtattgacgatgattaaatatatttacgacaatatttcctatgcagagttcaatacgaaatctgactactgtcatgaatgcggatttgatggtgaaatcaaggttaatgatgacaatcaatgggaatgccctcgttgtcataatacaaaccgcgataaattaacagttatccgccgtacgtgtggataccttggtgaaaacttctggaacgaaggtcgcacaaaagaaattaaagatcgtgtaatgcatatttaattttattaatcgtaaacatgttaaaagctgtgccatcggcacagcttttactatatacatgataaattgaaatatatctatatgtttaatttggtcaaagttgatcataggcaaatatgggggttattatgagatatggacagatccgacaatatgatatcgccaatggggaaggtatacgcacatctatatttgtaactggttgcacccattgctgttataattgttttaatgaagaatatcaagattttaatgctggtcaagaatggactgataaagaaacacagctggttgtgtcttatgtaaaagatcctaattgtgcaggccttaccttgttaggtggtgaaccatttcaaaatattgatggtatgctagccatagtgaaagcggtgcgtgaagcagcgcctgaaaaacctatttgggcttactctggctatgtatgggatgatattatatctgatccatctcgccgtagcttagtggaacaaattgatattcttgttgatggtcgatttgtagatgagttaaaagatccatccttacgatttagaggctcttctaatcaacgaattattgatgtacaatcttcgttgaaacagggtgaagtcatactagctatggagtgatatagagagtatgttagataaacgtttacttggtttaataataatcgttggcctggtggcgggcttaatcggttctttttatacccatttgttacattatatccagcattttatgtatgcctattcgacatccgatggcttgacgtttggtcaagctgtggcacgtgtatcgcctgaacatcgattgttagccttactggcctgtggtcttgttggcggtgtaggttgggttcttatccatcgttatggagatcctctggtagatataaaaaaagctgtccaggattctacaaaagaaatgcctccgttgaccacatttattcatgctacattgcaaattattacggtcggcatgggttctccgcttggtcgagaagtagcacctcgtgaagctagtgctggtatcatgtctggattattgcgctatgttgatatgcgccctgaggacaagtcgcttattattgcttgtgctgctggtgcaggcttagctgccgtatataattctcctttatcagctgctatttttacgctagagacattacttatcacatggaatgttcgagccatgagtgcagcccttttatcgtgtggactagctacattggtcgttcgtcaggcagggataggagatcttgttcagtatacgatgccacaaccacccttatatggtagctatcaagaatttgctatcgtccttggcgctgtcattgctattggcgttgttttatttgataaaacacaatctttattacctaagtttgatagaaaaagccctaaaatgattgtcataactcttttatcatttgctgttattggggtgatggccatgtattttccagaaatcctcggtaatggtaaagctggtaatcagttgacctttacagatttagtaggatgggattatgcattaggtctattagctactaaatggattgccgtgttacttgccttaatggctggtgcttatggtggtcgaattacgccatccatgatgctaggtagtacattggcattagcctttgcagccttgtggagtattatggtcagccctgtacaccttggctttgctgcatttataggggctgtaattttcttgggattggcacaaaagatgccgcttacatcctgtgtgttcatgttagaactttcacgattttccgtggaaatgtgcttcccaatggcgctagctatgggctccgcattgataactcagcagattgtaaaagcaagattccaattataaaacaaactatatactatatcggacgatgttctgatgataaagaaatagcgactagttgataccatatgatcaactagtcactatttttatgtgtgaaggctttatttatagaaaatcttattttttacattgtagttatacaattttggcgcttttgtcgtattcttcgccaccacaatctggtagcataccatattctacagtccaaaggtgtttatattttaatgcttgattgtgaattctttcaacttgggattcatcagtacgtacgatgcgtgcaggaataccaacgactaaagaatagggagggattgtagtgttttcttttaccactgcaccggctgcaatgatagagccagtaccgatatgacaaccacttagtacgatagcccccatgccaacgagtacattatcctcgatggtagacgcatgaacaatggcgccatgacctatagttacatagtcgccaagtatacaagccttatcatcatcgacgtgaagcacagagttatcttgtacgttggaataacgacctactacaattttattaacatcgccacgaagtgcacagttttgccagatggaggcaaattctttcaactctacatcgccggctagttcagcaccaggcataacacaagattttggatctaattttggatactttccatgataaggtaacataggacctcctattaaattacttcgataaagcgttgtgctttacggattgccataatagcttcattaataacagagtgtacaatagtttgagctggttcaatttcattaagtctattaagcgcttggcctacttgtacagcaccattgacaacgtcgccatcgatagcagctaatttatttgtaccttgggacattttgctgcgttcttcttttgttgtaacgccatcagtttctgctgcaatataacggtctgtaaaatcactgcgcaagctacgtacaccaccatgaccggagagaagacctgttacaacggagtccgtatctgtggctttgataattgcttctttcatattttgatgagctttacattcttcggcaagtaagaaacgggagcccatttgtacaccttcagcacccatcaataaagctgctgccaaaccacgaccatcaacgatggaaccagccacaacaacaggaatagtgatttctggtagaatgttttccatcaaagacattgtcgtttgagaaccgatgtgaccgccagcctccataccttctacgacgatagcatcggcaccagcatcttgaatgcgttttgctaattttaaggaaggtacaacaggaatgaccttgatgcctgcttcttggaatggcttaatatatggggtaggattgccagcgccaagtgttacaaatgcaggcttttctgcgatgataacatctactaattcatctttatttggggccataagcattaaatttacaccaaaaggtttatctgttaattctttgcatgcgcgaatctcattgcgagtccattctgcatcgcgaccgcctaaggcgataacacctgtagcaccagcgttagctacagctgcaactaatgtagcctcagaaacccatgccatagcaccttggatgatagggtattcgatatttagtaattcagtcagttttgttctcatgaatcctcctataatatagttatatataagataataaaatctacttatgtggcgaatatttagtataccactatatatttctagtaaatagtatatcataaaaatctaattgataatagatttcattataaaattacgtatgaaagtaataatagtcagctttcagaggatattgaaaatttagtagaaaaatggaaaatgagtattgaaaagtttcgatgtctttgctatactatattacagataaagtatcttaacgatatgaacacattaatataatctcaagtgaaggaggaaatagacatggaaaaatacgtatgcgtagtatgcggttgggtttatgacgaagctgtagaaggcgttaaattcgaagatcaaccagctgattatgtttgccctatctgtggcgttggcaaagatcaattcgaaaaaatgtaattgatacattagaaaggctatcttaagcaatattgagatagccttttttatttgacaaagcacactgtcatgtttataatattataagtcgaggtaagattatgaaactgcaagtagagcaagcaaaagaacatataggaaagaaatttccttatagctatacgatgccgagtgaagaacttggtagtgacgtagttgcttttccttggagccgtcatgatataactattagtggtgagttttggtttgatggtcaaaactacatcgttcaaggttcgattaattctaaaggtgattacgaatgttctcgttgtttaacgactacggaacatgagcgtaacgattccttcgaggaaatctttagtgattctcgagatgccgatgaagatgtgattccttttaacggagaggaaattgacttaaccgaactgattcgggatacattaatcatcaatgagccctctcaagtgttatgtcaggatgattgcaaaggattgtgcgttcattgcggagcaaatttgaatgtttcaccttgttcttgtgaatcctttgtggtggatcctcgattcgcagagttacgtgctttgcttgatgagaaagatgatagactatcctaatgattgtactaaggaggtgcagataatggcagtacctaagcgtagattatccaaatgccgtcgcgatcgtcgtcgtgcaaactggaaattagaagctcctggttatgtagcatgtccacaatgccacgaacctatgatgcctcatcgtgtttgccctacatgtggtcactataaaggtgaacaagtagttgcaaaagcctaattgagcgtgtaaaacacctacacatttgtgtaggtgttttttactgcccaaaaatggatagttgttgattgatatatgctttatattaatatctcctataaagtattaattaattttaaaataaggacaatatttagtatattaccataaaatatatcactatatatgcgaaaaaccttgccaatatgggaattattatatatacttaagatgtaatattaatactaggtcataaaaggtggtcccatgagtaggttgaagaagcaagaaagacagaaacagttaacagaaaaactgaatattacgccttttcttactgatgaagagttggcatcgcactttggtgtcagtgtacctacaattcgactcgatcgattagaattggggattcctgaattgcgtgagcgtattaaggcgatggctaccgaacatgctcaggatgagcaaccggaaccaatacagcatgaaattgtaggcgaactcatcgatgtaacggaaggaaaacaagctttatccatgttacatacgacgccagacatggaagatcgttttggttatattgatccacagtatttgtatgctcaagcaaattccttggccaagctagttatgggttcaaccctttgctctgcagaggtggggaatattaaatataaaaatccagtagagtctggtactaatttggtggcgaaagcagaaattgttcgtcgtcgtggagataaatactttatttgggttataattagagataaaataaaagaagtatttagagctaaatttatcatggagtctgtggagaatcgggtgtagtatatgaaaattgcaattgacgccatgggtggtgattttgctcccttggaaatcgtcttaggcgccttggaagcagtgcgagaaacagaacatattgatgttgttctcgtaggcgataaaactcaaatattcaaaattttagaagataataatgaaacaaataatcctcgcatttctgtgtatcatgcgagtcaagtaatcggaatggatgagcatccgggtcaagcattgcgcaagaagaaggatgcatctgttgtggtggctacatctttagttagaagtaaagaatgtgaagctgttattgccccaggaagcacaggtgcagctgtagcggcagcattattcggtctaggccgtatcaagggcattgatagacctgttattgctacgccaatgccaactgtaaacggtattactgttatgttggattccggtgcgaactcaaatagtaaaccaaaacatcttgtacaaggtgcattgatgggggctgagtatgcaaaacttttacttggtaaagaaaatcctacggtaggccttctcaatattggtgaagaagcgactaaaggtaatgaagttgtgcttgctacatatcctatcttggaaaatatgaaaacaatcaattttaaaggaaatgtagaaggccgcgatattccgaaaggaaccgtagacgttgtcgtttgcgatggttttgtaggcaatgtaattcttaaatttgcagaaggtcttgtaactggtttgacacagctcatcaaagacagcatcatgaatggtggaatattagctaaaattggggcattgcttatcaaaccagcgttgaaaccaatggccaagaaggtggaccacactgaaaatggtggtgctccattacttggtgtaaatggtgtgtttatgattgctcatggcagttcaaaggctaaagaaattaagactgctattaccattgcagccgatttagtagaacgcaaaataattgaacatattcgagaaacaatggaaattgaaggagccgtaaaatatgagtatgatgaataaacctgtcggtattattggtacaggtagcttccttcctgataatgtggtgactaactttgatttagagaaaatggtcgatacaagtgaccaatggatcagagaacgtacaggcattgaagaaagacgcattgcaccagaaggtatgaatacatcctatatggcaactgaagctgcaaaaaaagcacttcaaatggctaagctcgatgtagaagatatcgatatgattatctttgctacattgacaccagatatggtgattccttctgccgcatgtatattgcaagcaaatcttggtgcgaaaaatgcagcagcttatgatttacaagctgcatgctccggatttgtgtatgggttgataactgctcaaagctatatcgcttctggattatttaaaaatgttctcgttgtaggcgcagaaattttgtctcgtcgcgttaattggaacgatcgtggtacttgtattctatttggtgatggtgccggtgctgccgtagtttctgaagttccagagggttatggtattaagggtgtggacttaggtgctgatggtactggcggctctgcattgtgtataccagctggtggtacagctgttttagctaatgaccaacgtatagaagaaggcttgactttcattcatatggatggtccagaagtgtataaatttgctgttaaaacaatgggaaaaacggcattaaaatctctagaacgagctaatatgaatttagatgagttagattattttatcccacatcaagctaatattcgtattatcgattcagccgctaaacgtttacatatgccaaaagaaaaggtatttgtaaatttacataagtatggtaatacatctgctgcatcagtggccattgcgttggatgaagcaaatcgtgaaggtagcttaaaacgcggtgataatgtagcacttgcaggatttggtgctggccttacctgggctagcctcgtcttgaaatggtattaaggaggaaacatcaagatgattaagactgatatttgtgatttgttacagattgagtatcctatctttcaaggtggtatggcttggttaggaacggctgaacttgcgtctgcagtatctgaagcaggtggtcttggcataattggtgcaggacatatgcctcctgatattttccgcaacgaaattcgcaaagttaaagaacgtactaataaaccatttggttgtaatattatgttgatgtctccttttgtaaaagaagttatggaagtcgttgttgaagaacgagttcctgttattacaactggtgcgggtaatcctggtgtatatattccagctttgaaagaaattggcacaaaggttattcctgtagttgcatccgttcttttagcgaaacgtttacttcgtggtggtattgatgcgattattgcagaaggtactgaatcaggtggccatgttggggatattacaacaatggcattgttaccacaagttgtagatgctgtcgatgttccagttattgccgctggtggtattgcagatggccgtggcgtagcagctgcgtttgcactaggtgctcatgcagttcaaatgggtacacgttttgtcctatctgaagaatgtattgctcatgaaaactataaaaacgctgtattgaaagcaaaagatcgttctactgttatgactggtcttacaacaggtcatccagttcgaattatcgacaatcaattagcacataaatataaaaatcttgaatttagtggtggttccaaggaagaattagaaaatcttggcgcaggtacacttcgtaaagctgctattgacggtgatgtaaaagaaggctccgttatgattggtcaaatcgcaggtatgctacacgatgtgaaaccttgtaaagaaatcattacagacattatgacagaagctgaaacagtgattaaaaatctacaaacttttggcaaataaggaggccatcctatgaaaactgcatttgtatttccaggtcaaggatcccaaaaagtaggcatgttacaagatttgtataatgcataccctattgttaaacaacgttttgaagaagctgatgaagcattgggatattctatttctaaattatgcttcgaaggccctgatacagaattggttaagactgctaatacacaaccagctattttaactgcttccgtagcttgctatgaagtgttgaaagaacaaggctttacaccagatatcgtaggtggtcatagcttaggtgaatatagtgcgttagtcgctgccggtgttcttgattttaaggatgctgtgtatgtagttcataaacgtggtgaatatatgcaagaagctgtaccattgggcaagggtgctatggcagctattctagcattgccaagagaacaagttgttgaaatttgccaacaagttaatgatacagttggttctgtacaagctgtaaactttaactgccctggtcaaatcgtaatcgctggtgaaacagctgccgtagaaacagcagctgaaaaaatgaaagaagccggtgcaaaacgtgcagtaatgcttcctgtaagtgctccattccatagtcgtcttatggaacctgcagcgcttcgtttaaaagaagaattagataagatccaagttaacgatgctaagattccagtagtagctaatgtaaccggcaaaattttgacaaatgctagtgacattaaagaatctttagtaacacaagcagctaatcctgtattgtgggaagattgtgttgcagaaatggttaacttcggtgtaactcgctttgtagaagttggtcctggcaaagtattaacaggtttcactaaaaagattaataaagaaatggaattagctaatgtagaagacattccatccttagagaaaacgcttgaatttttaaagggggttcgataaaatgcacttagagggtaaagtagctctcgtaactggcgcctctcgtggtatcggtcgcgccgttgctattcaacttgcacaatctggtgctgatgttgctgttaactatagtggcagtgaagctgctgctcaagaaacagtagacgctatcttagcattgggtcgcaaagcgattaaaattaaagccaatgttgcaaatgctgaagaagtagcagcaatggttgaagaaacgcataaaacatttggtcacatcgatattttagtaaataatgcaggtatcactcgtgatggtttgcttatgcgtatgaaagatgaagactttgatgccgttatcgatatcaaccttaaaggtgtatatttggtaacaaaagcagtatccaaaattatgatgaaacaacgtgctggtcatattattaacatgacttctgttgttggtttgatgggtaatgctggtcaagctaactatgcggcttctaaagctggtgtaattggttttactaaatcttgtgcaaaagagttagctagccgtggtatcacagttaatgcaatcgcacctggctttatcaatactgatatgacagatgtattgcctgaaaaggtgaaagaagctatggtaacacaaattccgttgggccgtatggctaaagctgaagaagtggctgccgtaacaacattccttgctagtgattttgctagctatattacaggtcaagtcatcaatgtagatggcggcatggtaatgtagttacaaaattagactatatataaatctcatttgaaaggaggtgaaccactaatgagcactttcgataaagttaaagcaatcgttgtggaacaattaggcgttgatgaagctgaagttaccattgattctacattcatcgacgacttaggcgctgactccttggatatcgttgaattgatcatggcatttgaagaagaattcaatgttgaaatccctgacgacgttgcagaaaaaatcaaaaccgttaaggatacagtagaatatattgattctgctaaataagctgtatagctgacaattcagccgtgcggggggccgagtggctcccctaatcggtattgtttacaggaggaattgatagtgaagctccctgaacttcgcattgggaatctagtggccaaagtacctattattcaaggtggtatggcgattagattgtctacagctcggttggcagcagccgttgcaaatgaaggtggtattggccttattgcagcatctggattgccttttgatgaattaagatatgaaatacaattagctagaaaattatcacctacgggtattattggtataaatgcgatggtagcagcaacgcaatttgcgggccttgtaaaaactgccatcgaagagggcattgatcttgtagtggcaggtgccggtttttcaagagatatgttcgcaatgggtaaagagtctggtactccaatcgtacctattgtttcttctgcaaaattagcgcgcatttctgaaggtttaggtgccgctgcagttatcgtagaaggtagcgaagctggtggtcacttgggaacggatcgttctgctcgtgaaatcgtaccagaagttgtagcagccgttaaaaatattccagttattgcagctggtggtgttttagatggtaaagatatcgtggatatgtttaaattgggtgctaatggtgttcaaatgggcagtcgctttgctgcttctgatgaatgtaatgcatctgatgaattgaaaaaaatgtatgtgcgtgctacaaatcctgaggatattgtattgattcaaagtccagtaggtttaccaggccaagctattaaaaataaatttgctgaatctgttcttgatggcactgtagcgccaccaacagtatgtgacaattgtttaaaacattgttcccataaattctgtattatccgtgctttatctagagcgcaacaaggtgatgtggaaacggggttagtattctctggcaataatatgcgaaaagtcgataagattatgccagttaaagatatttttgcacagttaaaacaacaagtagcagaaatcgattaattaaaggggctatatagctataagaggtggaataattggaaaaacgtgtagtaattactggcttaggagcgattactccggtaggtatcggtaaagagaatttctacaatgcgttgttagagggtaaatctggtattggcccaattacacgctttgatgcatctgactatgcaacacgcattgcaggtgaagtaaaagattttgatattactcaatatggcgtagataaaaaagaagctcgccgtatggaccgttccgttgaatttgcaattggtgcagctgttttggcagctgatgatgcaaaattagcacttgatgaagaagatttggaccgttgtggtacagtagttggtactggtattggcggtattgattctatccatgatgtgtatacaacattatttgaaaaaggtcctggtcgtgttagcccatttgcagttcctatgatgattgcaaatatgtcttctgcacgtgtatccattcgcctaggtttgaaaggtcctgttattacagacgtgacagcttgtacttctggtactaatgcaattggtgatgcattccgcattattcaacgtggtgatgcagacatcatgtttgcaggtggtactgaagctgctgtttcccctgctgctgtagctggcttcgcggctatgaaagctatgtctacacgcaatgatgagcctacaaaagcatctcgtccatttgataaggaccgtgacggtttcgtaatgggtgaaggtgcaggtatcgttgtacttgaagaattagaacacgctaaagctcgtggtgctcatatctacgcagaagtagtaggctatggcactaatggcgatgcttatcatattacagctccagctcctggtggtgtacaagctcgtaaatgtatggaattagcaattaaagatgcaggtattgatcctaaagaaattaactacatcaatgctcacggtacatctacaggcttgaatgataaaaacgaaacattggctattaaagaattgttcggcgaccatgcaaaagatatcgctgttaactctacaaaatctatgaccggtcacttgttgggcgctgctggtgcgattgaaactattgtaatggcaatggcaatcgaaacaggtaaggttcatccaacaattaactgtgataatccagatgaaggtttagaccttgattatgtacgtgaaggtgctcgtgatttacatgttacagcagctctttccaactcctttggctttggtggtcataacggtacactttgtgtttgccgttatgaagactaatggggcgtcacgtatcgcataagaatactataatgacacaagctcgtgaagattctcttcatgagcttgttagtcgtttacatataccgaatattgatatctcgattttagattgtgcttttactcatacatcttatgcgaatgaacataaatctaagcatattcatcataatcaacgcttagagtttcttggtgatgctgtattggatttaattattggtgaatatttatttacaacatatcccgatatgtctgaaggtaatttgactaagattaaggcagctacagtttgtgaagattcattagctaccgttagtcgtacattgcatttaggtgattatttattactgggccatggggaaaagtcctctggtggtagtgatagaaaatccatattagctgatacatttgaatcattgattggtgcgttatatataacgactgactataaaacagtaatggactttgttcttcatcagttagctcctaatcttaaacaagcattagaaggtaagcgtggtaaagattataagacattgttacaagaatttgtacaacgtgatggtgataaacatatagtgtataatcttatcagtgagtctggtcctgatcatgctaagacttttatgatggaggtatccatcgatgggattacctatgaggcaggtactggtaaaagtaaaaaaatagcagaacaacatgcagcacaattgacattagaacggttaatggctgctatataataagcgccgcaaggcgctttttatataggaactattaatatgagaacattaaaatcgaaatgtatgtaattagaatcgtaaataggaatagggaggaggtatattcatgaaatatggtatgattccattttttatccctcatgtgggctgtcctcatgtgtgtacattttgtaatcagtctcgtattacagaaatatcaggtatagggtatttgactccagcatatattacatcgaccattagagattatgtaggcgagtctagagcggataaatattgggaggtttgtttttatggaggctccttttccgctattgatcaagaattacaaaaacaattattagcacctgttaatgaagcgctacaagcgggtattatagatggtattcgttgttctacaaggcctgatgccgtaagtgatggacaattagaattactgcgttcatttggtatgaagaccatagaactcggtgtacaatctatggatgataccgtactatctttagctaaacgcggtcatacctctgatgatgtaaaattggctgttaaacaattacgaaagtttggatttaccgtaggactacaactattgccggggcttttaggcgattcatgggaaacgataatacaaacagctgttgaaataactgcattgcagcctgattttgtacgtatttatcccgttctcgtcatagattatacggaattggcagaacaatacaagtcaggtatatatgagccattatcattggaattagcattacagtattgtgcgtttttaaagacttggtttgaatcgcatcatattactgttattcggactggattgcaaagcactaaagaactcgatacaggtactagtcttttggcaggtccttatgagcctgccatgggagaactagtgactaatgagcagtggaagcagcgcatagcatattgtatcgatgagcatacagaatattttagaaatccaattcgtaccattacgatatcctatccacgatgtcttacgtctaaggtaaggggattaaaaaaacgcaatgttacatatttcgaacgagcatatgaacatgtaactttcacatggcgagaaaataatgatattgatacagtacaatgcagtatagatggcatggtatatgtggtataattaaaaatatgatttaatgggattatactaagaaaggaggcagtcatgcaattactgcggctagaattaaaaggatttaaatcctttgctgataaaacagttgtaaaattctccccagggatgactgccgttattggtcctaacgggagtggtaaaagtaatattacggatgctatgaaatgggttctcggggaatccaatgtgcgtaatttacggggccaacgtgcagaggatatcattttctctggcacagaaaaacgaaaaccaatgagtgctgctgaggttacccttgtatttgataatgcagatggtcaactcgatgtggacatgcaagaggtagccattacacgtcgtatctatcggacaggtgaaagtgagttcctcatcaataaacggacctgccgtctaaaggatattcacttgttattagctgatacaggtcttggcaaagattcgatggctatcattggacaaaatcgtattgatgccattctaaatagtaaaccggaagaacgtcgcttaatttttgaagatgtagccggtatttctagatttaaaattaataaagaagatgcattgcgtcgtattgcgagcactgaccggaatatggaacgggttcgcgatattatggcgaccatcgaggaacaattaggacctctggcagaaaaagcggaaacgacgaaaaaatatatggcattaagccgtagtaaacgtgaatatgatggtgttatcggctttcacaattacaagacggctgatagattattaacccgtgcagaaaatgacaatattgtattgaaggatgaggaaattgaattacaaacgcaattatctaccctcgatgcacgacgtcatacattacaagctgaaaatgcaaaggatcaagaacaattaaaatcttgggaagcacagtttagcgaaaaacaacgggaagaagaacgcatcaatggtactgtaacactactagaagaacagttgcgtacaactaagcgcgaagtagaagatacttctctgcgtattagcgaagcagaagcgtctaaaaagggtgaagagcagcaattgctcattttagatcgccttattgaggatgaaacggctcaattagaatctgaacgcactcaattcgtagttttagaggaaaattataataaggccattgctcaattagatgcggagcaatcatcatggaagtccttagaaagcgacagacaagcctttcaacagcgtcaattagatttagttgctagtattgaaacagcgaaggctacattgcgaaatttagaatctcgtaaatctgagtccgctgttcaagtagaaacattagaagcggaaattaaagaggttcaatccaatttatcggcagcgaaatctgaacatgaatccttagaaactcaatttaatgagttatctaataaacggaagtctttagttgatgaagaacggtctgcatcagaacgattgcgagaagcccgaaaggcattaaatcgcatgagtagcgatgtgcaaaaggcacaggggcgattagaattattagcacaatgggcagaacaacatgaaggttacttagaaggaactaaaaacatccttaacggtaagggcccatggcgtgaagcgattaaaggggcggtaggtgatttatttaccgtagataaccgatttactgttgctatcgaaatcgcattaggtggtagtgttaaccatgttgtgacaacgacagctaaagccgcatcagaatgcgttcaattccttaaatcaatacaaggggggcgcgttacctttttaccgatggattctgtaaaagggcgaccttatgatactcctgcattgtcggaagatggtgtcatggggacagctgtcgactgtattgaattcgatgctgcctataatcatatatttcaatacttgttgagccgtacattagttgtagaaacaatggaacgagctattgcgttacaaaagaaatataatcagcagttacgcatcgttacattaacgggtgaacaattccaaccaggtggctccttaactggtggtgcaacgaagaaaaaacgcagttccttgttaagtcgtcgtgaagaggcggctcgtttagaggccgaattagcttctgtggaagagcgtacggccaaactggaacaacaaatcaaggatgaagaaaatcgtattgaacgggcgcaacgtgagcgaagtgtgttggatgaacaatatcaacataccaatcttttgttttcggccagtcaaacgaagattcagaacattgaaaatcaattagaacgtaaaaagcgtgtgcttcatgatgaacaggaacgtatcgttcaaattgacgtggacatgggtcaaacaaaacatgtgctttcacaatctgaatcggaattggcagcgttacataattcacctgaacaacaaggtgatcaatcggcaattatggaacgattaagtacgctgcaaaaggcacagcaagaggcatatgaatcttttacagcctctagattgttttgtgaacgtttagaaagcactatagaagaacgtaaggtacaacaagagcaacgaaagcaaaatttggaaaccatagtatctcgcttagaacctctcatggagttattacactctagtgaagagcgtttgaatgttgtgattcctgaacaaattcgagttgctaatgagtctcttgaagcgattcgtggagaggttgaaaaatttcgcgctttacgtgatgaagcgtatcaatcgactgctggtgcacgggaggagattgaattaattttagctgaacaagaccgactcaaccagcggtataaggtggttcaaaatcgtctagttgaagcagaaggtaaattgacgcgttatcgcatggattgtgatcgtgctgtagaggatttgaatgaattaggctattcattggaagatgcacagcatataaatattgccggctctgtgaatgattggaaaatggaacaagctcgtttaatggcggaaattgcagaacttggatctgtaaatcctaatgctgtagaagagtatgaagagacgaaaactcggtatgatttcttatcgaatcaattagcagatctcgatacggcaaaagaacaattacaagcggttattgctgaaatggacaaggccatgagcacgcaactatacgatgtattagatgtggtaggcaagcagttccaacacgtattcagtcaattatttggcggtggtacggctcaaatcgtacttaccgatccagaaaatatcttgactggaggtatcgatttctatattcaaccaccagggaaaaagcgtcaacaattgacattactatctggtggggaacgagcactcacagttattgctttattattctcgttcctcgactatcgtccggctccattctgtgtgcttgacgaagttgatgctgctttggatgaagcaaatgtagagcgatttagttcttatttgaatcgggtaaataaggaaactcagtttatcgtcgtatcacatcgtaagaaaacgatggaagctgccgaagtattacaaggggtgaccatggtggagcgcggtgtatctcgattattaacggtttcatttgaagatgtgaaggaggatctagcataatggcatttggattctttaataaaattaaagagggcttagaaaaaactcgtaagtcctttgtaaaaaatgtagaaacagtaatcattggttatgcagaaatcgatgatgattttcttgatgatttagaagcagtcatgctcactagcgatttaggtcctaagactacagagtatttgatgaaggaaatccgccgtggtgttacagaaggtattattaacaatactggtgatgtaatgccatttatggaagaccgcatcacagaaatgttagttgaccaagaggatgaaatcacacttcaccacccagaggttatcctggttattggtgttaatggtgtgggtaagactacaactattgctaaattagcaaactactatactaaagaaggtaaaaaggttatcatcgctgctggagatacattccgtgcggcggcggcggaccaattatccatctgggctgaccgcgtaggcgtacctatcgtaaaacataaggaaggtgcggaccctgctgccgttgtatatgatgcgatggaagccgcaaaggctcgtaatgcagacatggtaattgtcgatacggctggtcgtcttcatacaaaagtaaatcttatggaagaacttaaaaaaatgggccgcgtagcgaacaatcatgtagagggtgctccacatcaaacattgctcgttctcgatggcactacaggtcaaaatgcggtaagccaagctaaattatttggtcaagccgtacctgttagtggtattgtagttactaaattagatggtactgcgaaaggtggcgtagttatttctattaaagaagaactaggcgtacctgtacgttggattggcgttggtgaaggcatggatgatttacgtccatttaatgcaaaagaatttgccaatgcactatttaataaaggaatgattcaaggtgacaaataaatataaccgggaattcttacttgaatatgtagaatctgaaaataaaaaaaatgaatgtaatgtaagcctagaaaatatggaaaaaatcgttagcttaatcgagtatttcggtattgaattatatcgtcctattacgagattactactttcaaactgggaagaaattacagatcgtattaataactatactgaatcagattggatgatggccgatgaaattcaaaagacaacgcctacattagatcgcttttccattgctatgctcatcgaagtgttagaaggtgaggatacattgaaccaagctgaaaatgcaggtcgtcgtttgtcagaggaagaactcaaggctatccgtaaacatcaggatgaacagtaatgaaacataatagctataactatgaagggggccaaccatttaaagtggaggcgccctttacgcctactggggaccaacctacagccattcaatctcttacagacgggattgagcgtggcgaatgggctcaagtcctattaggtgcgactggtacaggaaaaacctttaccatggcaaaggtcatcgaggcggttcagaaaccgaccttgattatcgcccataataaaacattggctgctcaactttgcagcgagtttaaaagtttcttccctaataatgcggtagaatactttgtatcttactacgatttttatcaaccagaagcgtatatcccttctagcgatacgtacatcgagaaggatgcatctattaatgatgaaatcgataaattgcgccatagtgctactatgagtttatttgagcgccgagacgttatcatcgttgcttctgttagctgtatttatggcttaggtgatccggaggactattctgatctcgtattgtccttgcgattaggtcagacgaaatctcgtgatgaaattctgtctaaactcgtagatatccaatatacgcgtaatgatatgaattttattcgcggtacattccgcgtacaaggggacaccatagaaattttccctgctgcctatagtgaaagagccattcgggtggaactattcggcgatgaaatcgaccgtcttgttgaggtggatgcattaacgggagaagtcattgcagagcgcaaacatgttgcggtctatcctgcatctcactatgttacaacaaaagaaaaaatgaaaattgcggtagagcgcattgaggcagaacttgatgagcagttggcaaaactgaaagcagaagatcgtctgcttgaggcgcaacgtcttgaacagcgcacccgttatgatatagaaatgatgcaagaaatgggctactgctcaggcatcgaaaactattcccgccatatgtcggagcgtaaagcaggggaagcaccatatacattgattgattattttcctgatgatttcctcatcatggtagatgaatcgcatgtaactattcctcaggttcgtgccatgtacaatggggatagagcgcgtaaagaatctcttatcgaatatggcttccgtttgccatcagctcttgacaatcgaccattgaaatttgatgagtttgtagaacgaatcaatcaaatcgtgtatgtatcagcaacgccaggaccgtatgaaatggaagtagaaacgaatgtggcagagcaaatcattcgtcctacagggctacttgatccatccattgaaattcgtcctattaaggggcaaatggatgatttactcggtgagattcataagcgcgccgctaagaatgaacgggttctcgttacgacattgacgaagaagatggctgaagatttaacggaattcttgaaggaaatgggtgttcgtgttcgttaccttcactcggatatcgttaccatcgagcgggctgaaatcattcgtgatttgcgggccggtgtattcgatgtattagtcggtatcaacttgctccgcgaaggcctcgatatgccagaggtttccttggtggctattttagatgccgataaggaaggtttcttacgctctgatacagctatgattcaaactatcggtcgtgcagcgcgtaatgttaatggtcatgttattatgtatgctgaccgtgtaaccggttctatgcaacgcgctatggacgaaacagatcgtcgtcgtgcggtacaagaggcatataatattgaacatcatattacgccaaaatctgtatctaaagatgtgaaagagcttattgagctcactaaaattgaagaagatatggtgaccgatggcaaagggctttcaccaaagaaggggaaaaagaagtcctctgcagctggtatggaccatggccacgaaccatatgctcaagatgcagatactactaaggtagcagagattacagcggaagaactatataacaagattgaagagcttgaccgtcaaatgaaggcggctgctaaacagttggaatttgaaaaggctgctaaattacgtgaccaattgggcgaacttcgtcaacaatggtccgatatgcatagtgtcggtgaaagtaagttaaaaaaaccacgaaaaaattctaagaaacaatcaccaaaaagtaaaaaggtacatatatgaaagatcaattgattgtaaaaggtgcacgtcagcataaccttaaaaatatagatatttcactaccgcgagacaagtttattgtcttaactggtttaagtggatctggtaaatcgtcccttgcattcgatacgatttacgcagaaggccaacggcgttatgtagaatcactgtcggcctatgcgcgtcaatttttgggacaaatggataagcctgatgtagattatattgaaggtttatctccagccatttctatcgaccaaaagactacaagtcgaaatcctcgttctacagttggtacggtgacggagatttacgactatttacgtctattatttgcccgtgttggacatgctcattgtccagagtgtggtaaacccattacacaacaaaccattcaacaaatgacagatgatgtaatgagcttttctgaagggactaagattttaatcttagcacctatgattcaaggaaaaaaaggggaacataaatctgtctttgaacaacttcgaaaagagggttttgtccgtgctcgcgttgatggtgtggtacgcacaatggatgaggatattgtattagagaaaaataaaaagcattccatcgatattgttgtagaccgtctcgttgtcaaagaaggcattgaatcacgtttagcagactctatggaaacagcttctaaatgggcagaaggtatcgttattgttcaagaagtagatggcccagagcatatgtatagtcaaaactttgcatgccctgattgtcatatttcattgccaaaaattgaaccccgtatgttctctttcaatagtccctttggggcatgtcccgcttgtttggggattggctctaccatggaggttgatgaagaacgcgtcattccagatggctctattagttttgccgatggttgtgtacaggcgttgagctctaatcctaatgcatggtttatgcgacagttagaaggcttgttgaaagcgaatggttactctttagactctacctatgatgaattgcctaaggcattacagaaaaaggtcatgtacggtactacagacaaggtggcttttacctatgaaaatatgcgtggcgaagaaaaggaatttttcaccgaatacgaaggtattttgccgatggtgaaacgccgccatagcgaagcatctaccgattctatgcgcgaagaatttgaaaaattcatgtccattaaaccatgtacgacctgtcatggcgctcgcttaaaaccagaggtattagcgattaccgttggggataagaatattaatgaagtaacccagttgacgattaaagaggcgctagatttctttagtcatttgcaattaactgacagagaacaagtgattggtgcacagattttaaaagaaattaatgcacgactaggcttcctcaataatgtaggcttagactatctaacaatgaaccgaagtgcaggcacactatccggcggtgaagcacagcgtattcggttagcaacgcaaattggttctggtcttgttggtgtgttgtatattcttgacgagccatccatcggtctacaccaacgagataatgatcgacttatcgataccttaaaagggttgcgtgaccttggtaacacactgctcgttgtagaacatgatgaggatacgatgcgcgctgcagattaccttgtagatattggaccgggtgcgggcgagcatggtggtcaagtcattgcggcagggactgtagatgaggttatgcaggtgaaagactccattaccggtcaatatctgagcggccgcaagtttatagctcttcctgaagaacgtcgtaagccaggtaaaaactgcatcgaaattcgaggtgctaaagaaaataatctacaaaatattaatgtgaaattcccaattggactatttacagttgttacaggtgtcagcggttctggtaagtctactttgataaatgaaatcttatataaagggctggcaaatcagctatatcgttcgtatcacaaggtgggggctcacaaagagattcgaggcctagagcatattgataaaatcattaacattgaccaaagccctattggccgtacacctcgctctaaccctgccacatatacaggcgtatttgatgcaattcgtgaattatatagccaaacaccagaggctaagatgcgcgggtataaacaagggcgttttagtttcaatgtaaaaggtggccgctgcgaagcttgtcgtggtgatggtatcatcaaaattgaaatgcatttcttaccagatgtgtacgtaccttgtgaagtctgcaagggggcccgctataatcgcgaaacactggaggttaaatataagggcaaatctattgcagatgtgttagatatgaccgtagatgatgcggtagaattctttagtgctatccctaaaatttacaagaaaatggtaacattgcaagaggttggtcttggctatattcgtttaggccaagcggcaaccacattatctggtggtgaagcacaacgggttaaattggccacagaattagcacgtcgcagtacaggtaaaacattatatatccttgatgaacctacaacaggccttcatgcagaagatattagaaagcttttagatgtattgcagaaactggtagatggtggcgatacagttatcgtaattgaacataatctagatgttatcaaaacggctgattatattattgatttaggtcctgaaggtggtaaccgcggtggtaccatcgtggctaccggtacaccggaacagattgcaaatgtgaaagaaagttatacaggaaaattcttaggtcctgtattaaaacagactgatacatttatgaatgctgcaaagaaaaagaaataatttgtatggcactgccttgcatggttgccacaatgaagtattaattataatggtatggagaattgacgaagaaaggaggatatatgccgtctgaagagttattagaaaaggttagccatttaccgaccacaccaggggtctacttatggcgtgatcaatataaccgcatcatctatgtgggtaaagcgattaatttacgcaatcgcgtgcgatcctatgtgcgtaatgatgcgaatcgagcgcctaaggtaacggcgatgatgaagcgtgccgtcgatgtagagattattcaaacaaagacggaaatggaagccctcatattagaaaatacgcttatcaaagaacataagccgaaatacaatatttcccttaaggacgataagacgtatccttatgttaaaatctctgttcaagaagactatcctcgcgtatatatgacacgtcgccttgaacgggatggggctaaatattttgggccctttactgatgtaacagccgttcatgtagtcctcaagttgattcgtcagtattttccattgcgtacctgtaaatcgatgaaggtagaacgcccttgtttgcaatatcatatgcattattgtgaagcgccatgctttcataagatatcagtaccggattaccgcaaatatatcgatgaaattatagaactctttgagggaaaaccaatcccattgcttaaagaaattaaggaaaagatggaagaagctgcggaagagcttcgatttgaagatgcagcacgttatcgagaccaattgacgagcattgagaaaattcaagaaaaacagcggatggtaacgcaacgtggtgatctagatgtactggggatagctgtagatggtcaattggcatgtgtacaactactctttattcgaggtggccgtctattaggccgagaaaattacttcgtgcaaaatgaaggtgactcggaagaaaccattatgactgattttattaagcagtactatggggatactacctttattcctaaagaactattattgcctatggaaagttctgagcaacatctatttaaggattggttcagtgatatgaagggccaacaggtcgatgttcttgtgcctcaacgtggctataagatggacatgattaaaatggctcatgaaaatgctgaaacattccttgaagaacgtcgccgccaatggcaataccaaattgataagagtggtggtgccgttaagaaattggcggaggtcctcgacttgccaagattaccagagcgtatggagtgttttgatatttcccatacacaaggctctgaaaccgtggcctccatggttgtatttgaaggcggcaagccagctaagaaggaatatagacgctttaaattaaagactacacagggcaagcccgatgactttaaatcgatggcagaaatcatggaacgccgctatggtaatgaaacggattggcctatgccagacctcattattatcgatggtggtaaggggcagctcaatgcatctataccgctcatacgcgccgtaggtgttacagatgtgccagtcatatccttggcaaaacggatagaagaggtctttgtagaggggcaatcggatagcatcattttgagtcatcattcaccagagttgcaattattgcaacaaattcgtgatgaagcccatcgatttgctattacctatcatcgtaaattgcggggcaaacgtaacttagaatccgtactcgatcacattgatggtattggtcctaaacgacgtaaggctttatgggctcatttcaatagcttagaggccatgaaaaaagccagtatagatgaattagctaaggtcgattctatgaactataagatggcggaaacattatacaattttttccgcatgtcgaatgttgaaaaacaagatgtattacaaggcaatacaatgtaatacaaaaatagttaataccttatagtagaaaagcagcactgctgagtatgacttgcagtgctgcttttgtgcgttatgcttttatatgtacttgtttgtgttgaatataccatgttcgaatggtgaatagtatgcctgctacaattacgctagctaataggcctatccatacaccaaatgggccgtaatttgggttgttggcaagaatatatgcaatagggaagcaaacgccccaataggaaatgagagaaatatagaatacaatttttacatccttgtagccccgtagaataccttgtaacggtgtaccaatggcatcgaaggcggagaagaaaacgccatacccgaggaatctataaattagattatatacctcttcatcatttgtaaataatgcggatatgctttccatatgagtgaatgtgaaagcacaaatcaaaatcgcaatgacaatggctaacacgcgagaaatgtaggagtattgaatagcttctttatgtcgctcagcaccgacttcatagcctacagcaatggtggaagccatggcaatgctaagtggtaagcaatagaacacgttggtaaaggcaatgaccgattggtgagccgctacgacagcggaaccaaagtgtaccatcaataggccggcaatactgaaaatgctggcttcaaaaaagatggaagaaccgattggcaagccgatttgtaattgctcacgtatgtattgccatttggggcttacccaatctttatagatacgatatccctttaatttaggatggaagagcaccatcgcactaaataaaataaagtttgtccaacatgctccggcaataccataaccagcaccgacaccaccgatttcaggtaatccgaagtgcccaaatatcagtgagtagtttaagaatacattcactacaaaactcgttactacaatggccatagaatagtgagttaacccgtgggaatcaacggtgttacgcaatgtattaacccataacagagggaataggccaagtgcgaaagctttcaaataattgatacaaacagccgtagcagcaggttctaaattaaggaaatttagtaatggtactaatccgaaaacaccgattaataatataataagtgctagggttgttgcaatataaaacccttggtagacgatggtaggtatactatctgttttcttggctcctaatagctgtgcaatgatcggggtaatacccattagggtcccttgtgcaaagatatagaataataaccatagattgtaccctgtagcaaccccagctaaatcaattgtactatattgtcctgttaagaagatggcgataaatgtgccccctacaagagaaaattgggtgatgcacataggagtaaataatttaatgaacaaccataatttttgtagtatagaatatgtttgatacataatgacctcctaaattgatgatatattttaacatagtctatctattatggctaggtgtattaaaaactatagaatatagttatatacaggtattcgtattacgaatagatggatacattacagtattgtacaaggtagattctctttagtataatgagtatattaaatattttcgttataggaggtacgaattggacattgtatctgttcaaggtttgttggcaatgttacaaatcattgtcatcgatattctgttggccggcgataatgccattgtgattggcatggctgcacgaaatttaccggctcatttacaaaagaaagccattttctggggcacagcaggtgctatcattttacgtcttgttatggcattcctcttcgttgaggctttaaatacaattccagcgcttcgtttggtaggtggtatccttttattatggattgggtacaagctcgttgctgatgatgacagtgagcataatatcgaggccaaggatagtttgcgagctgccatcatgacgattgtcattgctgacggtatcatgggtatcgataatgtaatcggcgtagtaggcgctgcaggtggccatatgacaatggttgctattggtatgcttattacggtgcctatcatcgtgtatggtagtacattatttgtgaaagttatcgagcgtttcccaattattctctacgttggtggtggtatcctaggatgggtcggcgctggcatgagcgtggaagatacattgattgctcatacagttgaaccgtatgcgctgtatattaaaatagctgccgttatccttgtagtaggcgcatctttagtagtaaaacaacttaaaaaataattggaatgtataatatctcttctcttttttacaggaggagagatatttttttgcagtagattttgaaagatattaaagcatttgttttagatgagaaaatacatgaaatatggtatagttaagggatagttatagaattaattatagttgaggtgcgtataatggaatttttagaagcggccacgtgggttacgattggcaaaattatattgatagatattttattagccggagataatgctgtagttataggtatggcagccggtaaattagcaccagaacttcaaaagaaagccgttatatgggggacggtaggtgccattttaatgcgccttctgtttgccaccgttttggtagaagcgttaaccttgattcctctcgttcatttaggcggtggacttgtgctcatatggattgccgttcagcttttgaaaggtgatgacgaagaggctcacattgaggctaaaaattccttaatgggcgctatttggacgattatcgttgccgacgctatgatgagtatcgacaatgtcatcggtgttgtgggcgctgcaaaaggtcatttagagcttgttatcgttggtatgctaattacggtacctatcatcgtattttgttctacactattcgctcgtattattaacaaattcccagccattctttgggctggcggtgcactacttggatgggttgccggtgaaatgatcgtagaagatccacttcttttaccatatattcaaggggaagaattactcgttaaatttggtgccgtattctttgtactcatcgtgactggtatcattaaaatttggaagaaaagagacgcgtaatgaacggtacaggtcgtacatctcgtaaacataaatctaaaggtagacaacaacatacaggtggaaaactttctaaaaaacaacaggccattttaaatgcgcctgttaaacttggtgaggaggttttggtaaccattcacggtattggcagtagtggagaaggtgtaggtcgcgtagatgattttaccgtctttgttccctttgccttgcctggagaaacggtgaaagtatctattaatatggtgaaaaagacctatgctacaggcaagttaatagatattgtaacaccagcttctaatcgtatagagcctacctgtaacttatatggtgtatgcggtgggtgccaattgcaacatattacctacgaagggcagctttcactaaaaacacaaaaggtgaaggatgttattgaacgaattggtcatcaaaatcctaatcttgtaaaacctgcactaggaccaaaagaaccttgggcgtatcgaaacaagatgcaaatgcctgtagggggtgctaaaggcgacattaagatgggattctatgcgatgggatctcacgatatcgtacaggggacgaattgtcctattcaagatgacggaaataatcgtatagcccaaatctgttatgacatagccaaagagcttgatgttgagccatacgatgaacatacgggaaagggcgtattgcgtcatgttatcggacgtatcggtcaatccggatggatggtcattcttgtaactgctactgaacatttaccgcatcaagaagaatgggttgagagaattacagatcgtattccacaagtggaaaccatcgttcataatgtgaatagtaagcgtactaatgttattttaggtcctactaactatgtgctttacggtgatggtatgattacagaccatattaaagacttacgatttaacttatctccacattcctttttccaagtgaatccagaacaaactacagtgctttacgatcaagcattagcttatgcggatcttaaaggtaatgaaactgttatcgatgcgtactgtggtacggggaccatttcattgtttttggctcacaaggctaaacatgttatcggtatagaaatcgtagaaccagctattatcaatgctcgtgaaaatgtaaaaaataatggttatgacaatacggaatttatcgtcggtgatgcggccgtagaaatgccaaaactctacaaagccggtgtaagaccagacgtcatcgtattcgacccaattcgtgcaggctgtaaagaagaagtcctaacctcagcagcagggatggaacctgaacgcattgtttacgtatcctgtaacccagccactatggcacgagacattgaaatccttacacactacggctatgaactaaaagaagtacaacctgtagatatgttccctatgacagcgcatgttgaggcagtggctttgcttactaggaacgaagtgacgcagtaagcattagcactgcccatgtgataggcgtccaagaacacgagacgaagacgaagtgcgattggaaacgccgaaccactgaggcagtggctttgctaactagaagcgaagcgatgtagcgaggattagaatggctcatattagagatatccaaaatttatggaaaagcttatttttaaaagtatatgttttgtaggtgagactatgaactttaagaaacaaattgttttattttcaattttagctatgtctgttatggcagtatctgctgaagatattagtacttataatcctcaagttattgagaaacaccaaattacaaatgaagatattgcatcagcaacatcttatggacagtctttagtagaaaagaaaaatatcaaaatgatatctactgctaagaaaaagtttattaaaagacgttatggtggaattttcccaagaaatgaattgcaaggtatcgtatatgttcaaactccattcgcaatttttgcaaatacggcattggaggatgctagaggtgtagcaagtacttattcaacaagaaatgctactaatatattacaggttagatctttcctttatatgccggaaagtaagatgtataatgatactactaatgttgttatatctatagtacaaaatggatatacatattatccaatagaaacagtacgtggcgatgatcaatatgaaggtcctggtatgtgggtaacagtaggttatcaatcattatttgaattatctaagattgatactaatagtccttttgaagttcatattaagtctgatgcggttaaggttggagatgcagtaattcagtttccagcattaaatgcgtcaaataagtatgttttggatgactcttattcactttatagaggtgatgcagtgtttatcgataagaaataatatttatttaagtgcattgttctagaactgaataaatctgattttttatttagacctaatataataaagcagctgtaatagaatacacttcgtttaaataatcaaataatagttttataatatatttaaattacaattttagatttcatattgtgaggaataatatggagtttatacatgatagaaagagtaatattcttttcagtctttatggtagtaaagtaaatagaatcagaattcataataaaacattgacgttaacagttgacgaaatgtatcaattggtagacggtgaagaaagagctttttccagtgaaatatcttttaaagactgtaatgtggatttgtgtaaggtactaatatttaacaaaaccttacgggaaggtcgatttactggaaagtccatttgtttacatgattttatgaatgagtatgcagattcagaatttgaaataattactgaaggctattatgctaatacaactacatataccggttggctttgggccgatgaaaaatctccagtatccatgattatgtatatttggaatagcggagatatggtgtatcgtgtcaaaaaataacccatgtttttaccgataaagtaatctttaaaagaaatacagcactatttaggaggacttttacaattttgaaacctagagagttatgtgaaaaagcttggcaggagatagcaagtaaatttcctgattttaaggtagttagtaaaggtcagaagttaaagaaaacctctaagaataaagaccttatctttgaaatctactttcaagctaatagaaataactatgcagatagcgtagagtttgttccacatattgccatttattctaaatctatgaaaaaagctaatattcataacgggtttgtatatggcggagaattaggtcgtttgttaaatagaacggaatggcattggtatcaattagcaggtgctaactatcaatatactgtagatgaagttagtaagttatgtgaggaatatataataccgctatttgaaggttttgaagatacagaacgtaatattgaaaaacttatagagggagatataaacgattataatctaccgtattatatttatcattatggtggaaaagataaagctcaacaatattttaataaaataatcaaaaattctgagttaagaagtatgtatattgacttttataatcagttgaaagaaattcctaaagaaaatatttcattaggcgtgagtgaattttatggatccactatgattgaatttgcatatataaatggaataataattgaagaagaataaataagtccatcgcatagaaacgatatgcgatggacctttttttgcttttatatattaaatttagatagattttatatggttgtggttaaatcaaatagaagttatatagtaaagtttgatgaatgattactaaaatttaaacttcatacttgcagaatatgtacggcctgcggtagcttcatcatcgtagaaaatacgattaaatacattttgaatacctaattgtaatgtcgcttctttggagaatttgtaattcattgctacattagagataaagtagctatctgaggaaccgtattgacctgtaatatcatctactgattgtcgacgacttacatattgagcatcccaaagggcattccatttaccattagtatattcaagacctgcatggaagatatgtttaggtatatcataattgatttcctcatatccgcttgcatttgtgttaggaagatctttatgttttatacgacccatttgccatgtatagtttccaaatacagaccattttgaggatagttggtggcgaagttctaattctatgccgcgacgagtttcttggtctacattttcatacattttataatctacatcaccattattatcataatgtgttacatatttaaccttatccttcgtttttacatagaatgcagatagatttaaagcagtttttgtgccccattcttttttcataccaacttcaaatgtatctgaacgttctggattaagatttggattcgctcgtactacatctgtgtaacgatatacttgactaagtggtggtggattaaaagagtgaccataggaagcatatacatttagcgaatcggttacataatgttcaattgctaatcttggactccattcagtatagctaccttcaccatgatttacggtgtcgtatctattattggtcgtatcataggtaacatgttgaccatcgaattttttgaatcggtctatacgaagtccggtataaatagcccaattgaaattaggacggtatgtgtcttggacgaatagggctaaattatttgtagcacctttattgatttcatacaatccaccaggatatgtggttgaatcaaaggaagaatgatttctccaattagttaattctcttcgtttttgttcaaagctttcctttttccagttaatgcccgcaacaatgctatgtttccccatacgatcccatactttttgtgcatcaaaattaattgtttttccaggatagaatgaatcatcaccagggccgctgtagttaggtgtatttggattgctagggctagagaatccatctttttttcgatctaatatattgaaagtaacttgtagcttatttttgtcatttttatattgtaggttatgagcatgatattcttttaatccatcatagcctaagtatctacttgttctaagtgctacatatttttgattgttaattttgacatttccagagaagataggtgcaccatttacggttatggtactcattggattctcataagcatatctatttttcgtatatagataagagtaggttaatgattctctatcatggagtttcatcgttacatacgcagatagattcttattattaaatgacttatctcctcgactacctaatagataggaaccatctttggtttgtggaactgggttatctggtgtaactgttacagtagacggccttatgttggcagctctgccggtaataaagaaacctggataaccatctgtttttctttgctctccggacataccgacagtaatacgattagatacttgtgcatcaaaccctaactcattatttagtgtcccatgagatccatatccaatttgtccatgccaatggatatcttttacagattgttttggttgttgttgttttgtttgaatgttgataacaccagcaacacctctgccaccatataaagaggagctaggaccacgtactaattcgatcctttcaatagaatgtactggtatagcttcccaatcaacaccattattaaaggtgttattcattggtacaccattgagtaatactaagatgtcagtagaatcaaaaccgcgaatttgtaatccaccgtttgctttttggcttttatacacgccaggtaacatttgtagagcatctgttacggtatcaactcttcgtgtttcaatatctttgtctgttacaacagatacagcacttggtgtttttatgatatcctccatagttctagtagcagttaccgtgatggtatgtgatactttaggttcatcgaccacgttggtatctgctgcatatacaatggatgcgctcatagccgttaaaatcattgaaaataacatgatttttgatgtactggtttgcttacaaccagttaatgttttctttcgtttaccttttttcatatttatgaccctctacactgataaatagttaaaacacatcatttttagtatagcattgaaaaaaataaaacattatgaatactagttatatgattataagtaatgataattatataaatagcgaaattagtttataattaatttaaaattatatttttatgaataaaaatatatatgaaattttgagtgtatagtatgaaaggggttaatgtgtagttattttttgtttgtgattttgtatattcatagagagatgagagagaagagaaaatgaataaagtacaaatgatgttaactggtaagataaattcccataaatgtaatcctaagaatgtaaagagccttagtaccgcagtaactgcttgtgcatttgcattaacattaggctcggttatggtattaagcacacctagtgcaaatgcagccggtcaagtaattggtggttatacgactggtaatcaggcactaggtgatggtagtgtcgttgtcagtggtggtaaggataaggcacctaacttagcagaaggtgaaaatagtgcagtccttgggggaacaaaaaatatggccgaaggcccttataccgctattgtagggggctttcaaaatattgttcacgaagaaattaaaaatggggtcattcttggtggtacaaaaaatcagattgaagcagtaggaaccttagtgggaaattatgccacaatcagcggtggggaagataatattgcgtatggtgagtcctcatctatttcaggtggtaattctaatggtacatatggtttgcatagctctatagctggcggtcgtggtaataatgcggctggtgaaattggttctgttattggcggttctcaaaataatgcagatggtaagggaagtacacttgcgggcggtttaggaaataccggggttggtatgtggtcctccgtatttgggggcagtaaaaatgaagcagtaggtactggcgcatccatccttggcggtggcggtcgtgaatttacaggtcgtaaatttgtgacccataaaaatattgcaaatggtgaatatagtacaatcgttggatctcgtgatgctatgaccgtaggcaatggtagtacggttgtgggtggttcgaatggaatgacacttggtattgcgtctacctctgtaggcggtggttttacaggttctaaggccgagaacagtttggcattaggtcataaggcaggtgctactgtcaaatatggcactgccattggttatgaaagcgtagctaccgaagaaggtactattgcatttggtcatgatgctggtgatgtttctggttacacagtaaaatatccagataaagaaatcaccacacacttaggttataaaaagactgtgccagattatgatacggaaccaacaataacacctactacatattcagatgctaaatataatcgtttggtgaaagtagccgatggtgtcgatgcacatgatgcagcaacagtaggtcaattagaatctgctattagccaagtgcaatcagttggtacaaatatagaaactacagttaataaagcaactgcatctagctatgcattagctgcattacaaccaaatttctctgaaggagaaactggattaggtgtagccgttggctttggtcattatcatggaaaaacagctactgctttaggtgcttactatcgtccaagccgaaatgtacaatttaatgtaggtactgtagtaggcaatggtaaccaaggttttaatggtggactaagctttaaggtaggatctgaatctaaatcaaatacaacatccactgatgaaagaatcgctcaattagaaaaacgtattcaagaattagagcaagctagaaataattagaaaaaaatagataagataaaagtatctatatacgtttttatcaagtggtaggcaaaaattcctaatctatatagggttataggacaaaaagtgttgctcttaatgccgatggaactagttaaatactagctccatcggcattttatcttttgagtaacttttacatataggacaaaaagtgttgctaaaaagtctgaaaccccttgattttactgactcaaataaggttttatctttctaaagagatatattttttagaaggagtataattatgaaactagtcagatgccctaattgtggtttcgtttgtaagagaaatggtaaaacaaatgcgggttctcaacgttggtattgtaatcaatgttcttgctcattcacaaataaagtgaataaaactaacaataatttacagatatttttggattggttatttggtaaacacacacagttagatatggctggcgatggacgttcatttcgtagaaaaacatcacagttttgggagctttggccattaccaccaaaagttgaatcatcaagtagtgtggtatttgttgatggtatttatttagctagaaatgcttgtattttaatctgttgtaatgagacgcatgtcttaggctggtatgtttgtagatatgagcattctaaggcttgggaggctttattacgacgtatttcatcacctatagtagttatatccgatggtggtaccggctttcaaaaggcattaaaaaaagtttggccgaaagccaaactacaaaggtgcttatttcatgcatttcaacaagtaaaacgctatacaacaatacgtcctaaaacgattgctggttgtgagttatatggaattgcaagggatttattaacaatacacacgcaagatcatgctatgaagtgggtacaaaacgttatgtcatggaaagtacgacatagggtattcctatcagaaataacagttgatgaaaacggtacgatacgacctaaacatgaacgacttataaaagcagaaaattccttagttaaattgattaacaaaagatgtttatttacttacttagatgcatcgttaacatgtacctgcccagctactaataatcgtatagaaggtggtgtaaatgctcagttacgcactatgttacgtaatcatagaggaatgtctattgaaagacgaataaaagcggtgttctggtggtgctatatgcactcaccaaacccgctttctaatgcagaaatacttaaggttatgccgaccaacaagagtatttctgatatatatcataccatacatgaacaatctaggttagaagcttctattccgacttggggtgatgctattgtttggagtgatttgcataattatgatcgcctatttaccaatctttgggactaaaatagcaacactttttgtcctataaccctctatatagcactaactatgaaaatggttagtgctattttattgcttatacagaggtaccgttttattgttttgaactcttgtaataagtaaattttgaaaatactggtcatcatctatggtttagtatggttatttaatatacactctatcttataaatgtaatataattaaattaataaatatcatattgaattaatatgttatgggaaactaactagggttaatttacaaatatattgataacacgtggggaaaatgttgttgtttacgttagctttaaaatgtatttaataaaataatgggagtgaaaagtagattatgaatgaatatcaaagagcagttgagattcttaaagattatgttgaatctgaaggtattgaattattttctcaagatattttaataagtgaattagatgtatttaaaggtatcttttctccagaaaagttagaagagttagatgatacaaatcttttatccactatgttctattcattaggtgaaaataagaataccttatgctattggcttgaaatgaatagtgattgcagagagaattttggcagtatcgcaggtggatccgcttataaatttggtttgtttcaaagtcaaaaatctggaaagtggacaactggatattcacaaaaatcagtagagctatcagtagaaaatgcagtaaagcttggtaaagaaattcgtgatgcactagtaaaaggggttaatataatacgtgatgcaaaattaaaaacagttcaagattatgaaagattagatgaaaaattaaaaaatgaggttggagaaaaatattatgaattagggtgggtacataaatatttttctatgatttgtaatgataaattaagcggatttcattcttccgattggcaaaagcatgtacttagagctttaaaaattaaaccaagtgaaaaagcatatggtcgaagtggtcagatttcaataatacaaaatttggctggatggtattataagcaatttttagatatattcagaaaccgttttggtgaggtgcgtcaatttattcgtttgggttgttcagattcaaaaaaaaattatgtaagtgaatggtataaacaaggtgtcgttggatttggatatcctaaaataggcgatttgacgcaaaaaactttaaaaaaagatatagataaagttattattcaacgagagcttgaagaaagttatattttttcagataagaaagttgcatctagaatagcaggggaattatttagattttataaaagtgataataatacagtatttgttatcatggaaggtgagaagttaatagcatgtgttgatgaaataggagaatattcgtttaattcatcgtcagagatgccacatcagaagaaagcgaattggaaattggtttttgatgatggggaaaaattgccggaaaagactgaaggtttacgtacaatttgctatccttttcataaacctgataatctattatttttatataatcgatattactatgataaagaaaaaagtgagcttatgaaagagaaggataaaaataatattaaccacgaaaaggctattaatttttatactaaaattcaatcttcttttgaacgcaatcgtataatatttggagcaccaggtacaggaaaaagttttaacttaaataaggatgctaaagaattgctgaaagatgattatgatgataatttagagcgaataactttccacccagattactcatatgcaaattttgtaggaacctataagccagttcctattaaaagcgatgagaaggattcaattacgtatgcatatgttccaggaccttttatgcgtatttatgtggaggctttaaagaatagtcgtacagatagagttaaaccgttcttattattaatagaagagattaatcgtgcgaatgtagcagctgttttcggggatatttttcagttgttagatagagattctaataatgtaagtgagtaccctattcatgcctctgaagatataaagaattatttagcatatgaacttggaggaaagcctgaagattatagtaagttgaggcttccagataatatgtttatatgggcgtccatgaatagtgccgatcaaggtgtatttcctatggacacggcgtttaaaagacgatggagctttcagtatttaggtatagatgatggggataaggatgttagtggaaagtatgtatatcttggaggtaaagaaaagcaaaagatagagtggaatcaactccgtaaagcaataaatgagtttcttgcaaatgaaaatattaatgaggataaacagctaggtccttatttcatttctaaacattgcttaatatcagataataatgaatttgatagtgataaattttgtgaagtatttaaaaataaagtacttatgtatttatttgaagatgctgcgagacaaaaacgatcaaagctttttgcaaacagtaaatatggacatactagatactcaaaaatatgtgaagcttttgatgaacaaggtgtagaaattttccataaagatattcaagctaatattaatattaaaagaattgatccagtatcggctcaatcagataatagtgatttattacaaacggacaatcaggagcgagactgattatgatttctgtatatttaagagagcagaaacgatatacacaaaaagagcttctcaaaatatttgtttgttctgaagagaagttagacttaatttttagtaagttaaaagaatttggaaaattgaaaatagtgaggaaatcaagctcacaacttaatatgtctaatcttgtagatgagtatatagaaattgttcctgtagaagctatttgtaaagattgttattatgtatttatttttgttggtattttaatagtagctggacgaattctcaaatgttatcctaagtatctatgtagtgttgataatccgataaaggagttacgagttgtttgtaaagttatagagaagtatagttcaaaagaacaaatcatatatatgttaaatgattatacggggaatagctcttttaatttattagcagtcctattgttccttatgcatgattattttgaaaatggtatctataataattcaaaaaatatacttgaagttaatggttcgggagaagttttatgggataaaactataaatgaaactttttcaatactttcaaataatagaccatattatattgagatgcagacaaagaaaagggttaatgatgattttgattattttaaacgtcttcatgagtgtattttgacactcatatcaaaagagttgatggaggcagatctcctatcattattcgaacttactccaattgatttaactgatgaatatttatatgagtttggcgatagggaatatatattatatagaattgaaaatgagttaaatatagagtttaatactaggaagcaattagtattaaaaggaatttatgcatatattaagcatggcggacagttagactacagagatggaatttctttttttggaactaattcttttaatctagtatgggaatgtgtttgtagtgaaattttgaataatcaattagatattcccttaggacaattaagattacccgttccgttaaataaagagtataattcacaaactaaattgattaatttaatagagaaaccattctggtcaatatttgaaaaagaagctaaagagacgcttattcctgatttgattacaatatttaagaatcaattttatatttttgatgcaaaatactatactcccaatttgaaacatggagaatcacctaaaggacaacccggtattgaatcaatttctaaacaatatctttatcaattagcatataaaaaatttattgatacgcatggttttgaaggagttaagaattgctttttacttccaactgaagatgatactattatatgtttaggagaagtatctatgaaaatattttcaaatttaggactagaaaacataaaagttagatgtattcctgcaaacattgcatatgattattatcttttaggaaaaaaactagatataaatatgctcaaattaaataataaagattgttataatcgttgacggatatgataaaagtagtatgttgaaagttaattatttgagaaaataaaaatagggataaaataatttttatcaaacctattgtatctatttgtgaaatttataaagtacaaaattatagggggattacaataaatggggtatgtataatattgatagtaataggtgttgtattctatttaaaaaataaagtatatctgattaattcggaggatattattagtacatcagagagtgatagattaaatgaaattgaaactaaatatgaggttgctattcaaatagaaatgattcccgtagaggctattccagataagaatgaacttgttgaaattaaggataaaaagttgctttcacgtataaataatcttcttccggaaatggcaaaggctagaactgctgtacaaaatactgtacagactgcaaagtctaatggtgaagtattatatagagctattcttccagcaggcactaagttgacagattcaaaatctatggaaggtgctgttcgtggtatttatcgtggaactaatagtatcaaaggacatgcaaactttgtagctgttgaagttgaaaaaagtacaaaaactcttgctaatacagcggcagcaacgatgggagttgcatcaatggtagtcggtcagtattatatgactcaaattaatgatgaactaggtaaaattagtgatggaatatctcaaattaatgattttttaaattatgaatataaaagtaatatacattcgctgctagtacacgtgaaaaaaatagctgattttcaaatagaaattttagaaaatgatgaacaacgtttattaaatatcaataatcttaaagatttggaaaaaaatgtacccagcttctcgcacaagctaattttactttagaaggatatgcaaagaaaaatgatttaaattatgaaggttatgagaaagcattaaaaactgtacagagttggtttatgtatcaaaacttattaatggatattttatgtagaatttctgatttagaatatgctttgaatttgggtggagcttcaagagaaatgtgtagtgtagtattaactcattattcggagcaggtacaaaagatacaatcagaagtttcgtcttggcatgaaaaaactgctaaacgattaggaatagaactggatgaatctcgtagaaaacgatctggtgttgacggtgtaatttattttattcctgggttatttaacgatgattttaactatagagagatgaatgaagaaacagaagagatgattgctaaacagaagatagggtataataacaaatttaaaagcgatagctctgaattatatttggatgatgtacaacttatatcaaaggatggtaaaatttattatttaccgatgaataaagtcgtctaaaaatgatgatattaatagcggaacatttatgtatatagttaatacgataaaaattagctaaataataaattcaagaaattcagggagggattaacatgttaggagcaatcattggcgatatagtcggttcacgatttgaatttaataattatagacataaggactttgatttctttacagatcaatgtgtattaactgatgatagtatcatgacacttgccgtagcaaaggcaattcttatgagtcagcccgattacagaaatctttcgaagaatgcagtggaatgtatgcagacgattgggagatgctatccaggttatggatatggcgatcggttctatagatggatctttgcagagaatcctaagccatataatagctatggtaatggttctgccatgcgagtgagtgctgctggatttgcagcacatagtttggatgaagcaaagcttctatctaaattagttactgaggtcactcataaccatcctgaaggtatgaagggggcggaggcgactgcagttgccatatatctagctagaactggcaaagatatacttgaaatcagagattatattaatcagcattattacactatggatttcacattggatgaaatcagagatacctatagatttgatgaaagctgccaaggtacagttccacaagcactacaagtcttctttgaatccactgattatgaagatgctattcgtaatgctatctcaataggtggcgacagtgatactgttgctgctatttgtggtggtgtagctcaggcctattatggtattccatcagacattagaaaacaggctctgtcgtttttagatactaaactgctaggcatattgacgtcctttgaagaaaagtatatgcctactatataattcttgattcaataatgatgccccatatatacgtataataaagaaacctatgtcataatggcgttccatttaattgaaaatttgttgaaaggtctcttacttttgtaagaggctttttctatatcaaaagttacaataaatttagtataattaaactatgaattatcaatatacatataaggtcgtattataagggagagacacatatgacacatcttaaggacttaggcagttttgaatctgtaccgaagttagtgacagatattataaatggaaatataactgctcttgaaagtgcattaaatagtggttgggatatagatgaacctatacaaattggtaaatatagtgagtattcacctctacaattagcgttagtgatgaactgcgtgccaagtgttcagtggctagttgagcatggcgcggatctaaatgatgaagagaatccaagtttcttattagctgtacggtatggtaatcaagagattatagactatgttgtggctcatggtgctaacattcatactttgaactgtgtgaacgtagatgcctttcaagctgccttatatggcaagaaatatgagaacttacaactcattcatgacttaggccatacagtacagaaatatggcggtaaagcctttagaaatgccattacagacgaaaattacgaggttctagatttctttattaataatggtgtagatatcaactacaataaacctgattcggtatatccttttaatccaacgccattgtgcgtagcagctcggtatgtggatttacagatgtgtaaatatctagtagaacatggtgcagatgtaaccatcacagaaaaggatggaatgcgtccctatagtattgctattgaaaaaggcgatatggaaatggcagaatattttaaaaatttagagcctgctgagtaccatgataaacagaataaaatggatcaattaaaaccatttaaactaccaaaagtgttaatatcctttttagagggagataatctttactttgaattgccagactcagattttatctctatagagttcttacctttacttgatacagttccatttaaatgggggcgtcgtaaactattacgtttatctaaagagctaggtgagtacaacgattatcaaattgtatgggaccctaaatctaaaaagatttcctgttatgatatggaacatcaagaactacgagagatctgtaaatttgatgagtttatagcggatatggcaaggcaattagaaattttgttttaatggatatcgtaaaggagaggcgatacatatgatagatacatttgagaaaacatatacggattggtctattgatgtaggtgagtacaaatatgaaggcataaccttgaaagaagtagagcaaaatttatattctattcaagataatgatatggacttcctaattgtttcaccatcaaaggctatttcagtaggtaataagctatataattttgtacaagtttgtagtgatcaacacacagaattactacatatagaaattagtgttactgctatagacgaagaaggtgccatcatatatggtaaaaatgaactaggccaccaagaggtgttacagatcatagaagactttattgcacatcataaggttccaacattagataattgggaaatcgtgttagatttaagacctaagatggaaagctatgtaaaggatactgaaaatgattaatgagataatatatgatgaacggttaaggcaatatacattgacctatgaaggcatacaattttgttgggatgagaagccaacagatgctaatgtagatactgctaaattattagctactaattatcataagaatatagattctattgttactttcattcataacgaaatccaagattggtatggcgatgtaaacattgatgaagtgaaaacacggataggtatgcctattattgaaccagagcgagatgctgtgacctattgtgagcaaacctttgatgatacgcacatcttttcctttacattttgggacaatgaattcaaagatttacattactttgccatagatggataatatattctccaatgatttagttactatcaatagcatgcggagtctattatgttatatacaccgaataaccttttgtataagtatattcgctatcgatttagacgaattcagattcaatgtaatatggtatatgatatagcaccagaggaagaagatgaaatttatcgcaatctgttaaaacagagagcgaagatattaattccagttggcatagtatatgcattaatatttgcccttactttcgcttggctattaggcacaagtgaggaattgaacccattaatgcaatgggaagtaagagttattgactatgttataccatttttaaataccattgattttaagtggtatgcgtattcactgaatttattgtgggcagctcttatattggcccctgtcgggattattaacgtatctccttatatcattttttcctatattatagataccattttgatacgacgcgaggtgaaagctttaataaaaaaatattccattgatcaaataaaatgtggttagattatatctatttgtttaggagagagtattatgagtaatctaaaagatttcaattggactggattttggaaagacaccgattatgcatttgagtcctatataggtagggaggttacggatgaggatattaagaatgctgaagctgaactaggctatacattgcctgcagcatatattgaactacttaaaaaccataatggtggtgtagtaaataagaattgttttattaacgatgatgacgattgtgtatatataacaggaatatatggcatcgatagagataaaaaatactctcttttaggtgagatgggtaatgaattttggatttcaaaagtaaaatatccccctatcggtatcgttgtagccgatacgatttccggcggtcacgacatggttttcctcgattatcgtgagtgcggtccaaccggtgaacctaaggtagtccgtgtagaccaagaatgtgattactccatgactcccttagcagataactttggtgactttattaagaacttatatttcaatatagaagaaattacggatgaagagtttcaagaattaagtgatacagaaaaggttaagctccttaatgaacaagagggcatcgatttcaagcgtgcgatggagttattaactaacataggcattgataatttgtcgcctatattgttaagctccttaggacgtatgtataataataatggccgcgcagcagaggctattgagttatttgaacgtatcgatgaggcacatcgcgattggtcttggtattatcgttgtggctatgctcatgggatgctagggtatggtaaaagctatgaatctgaacatgtacagaaggcattacaattaatagaaacaggcataaaaatgacgaaagaagcccatttagataaacaacttggttggtgctgtgaagtagtaaaatatcacctatttaaaatcaagccgaaacagtacaaggaggattatcctgtgatatttgaaaccattaagaatgtatttgataagaaaaacagtcaagatgctacagaaggtaaagatgtcgaagacgttaatgaatgcgatgaagataactatcctacatatgatatagtgcattggatatttaacaaacatacgtatagtagagatgagttttcaaaagaatataataaaattgtagaaaaatatgtagatgatgatcaaacagatgacgatgatagattagaagaacctgaaattctagtaacctatgaagcttggattgaaagtgaagaccaactttttgataatgaacgtgttaccgatgaagaattgctggaagaagataaagaagatggcatgtggcaggtagaaattatggctcatcttgtggcggataatggtacatattttactagagaagaattactctttaaattgcacaatttaatggctaataaagaattgggcgatcacgtattctttgaaggcattgaatacgaaggccatgaatgtgaaggatatggtctcatagataacgaagccggtatacctgtattctatattgtttgtggtagctagcttctagataatgtttattttaagactatatatgaaatatgataggatgtgacataatgggattaacggttgaacaatttaaagcattttctaatgcggagcaattacaaaccattaaagagcttaataattctggggatgtagaaactgttattaatatattaactgatgtgggcatggaaaatttatccgtacctctattaggtgagcttggtagagcttataacaataatagcaatgaaaaagaggctattaaggtattagaatctattgatgaagagtatcgtgatgcggtgtggtattatcgctgtgcctatgcgtatggagcccttgttttggataatagtgacgggtacacatcgaatactatgcaacagatgctaagattagtagataaaggtgtacgtttagctatagaagctaacctagatgatataaaatcgtactgttttgaagtcattgatatgtgctatttgcaaatggattttgaaacatgtgaatctgattatcctgacttgtgttctgcttataatgaatacgtagcagagaaaaagaagaaacgtaaaggtgtacctcgtcatcgcactatcacggttgaggaaattatggctacagacgatgtatggaccattaatgaacccatgtattggaccatcaatatatatggatcttacgatgattatatagaatccgcaaaaagctttactgtagagcaaagataccttaatgctatatcttggtacttcgcagaggttaataatggtggtcatcatcaattcttctataactcgacaggtattgtatgggaagatgctctagaaggtttacgactatttaagatggatatactagcggataatttacaatctgtcatcgattattttggtggctcagttccatttgatagggaagaacgatggaacattttaaaagattgggaaaatgaggatgaactgttcgatttccttgataaaaaagatgatgtagtatatgaatatgatggaatctatgaagacacattcgtacatgaacatcctgaattgtttgtatttgatggaacctatacggctccagaataaatttggtgagatagacatgttagataaacaaggcgtttatgattgtttgcgtgaccatcatatcgattttgaaattacggatcacgtaccgctatttagtatggatgataaaccagatgtagaactgccatatccagaatgggatgcgaagaatttatttatccgagaccataagcgggagcattactatttaattactgtacgcggttcaaagcgtgtagatttaaaacaattccgtaaggaacacaatcttaaaaagatttcctttggttctgaagaagagttatgggagattttgaagattaaaccaggtcatgtatcaccattctgcttactccacgatgaggagcgtaaggtgcattactacattgatgcggattataaggataatctcattggtatccatccaaatcaaaatgatgcgaccgtgtggttacaaggaaaagaccttgttaagcttatagaggagcatggtacaataattgaatatataacaatatagatgtaacataagaggttttacatgaaagttaaattgattcaaccgcgtatgttaaaacgtcctatggatacagatttaaaaatacgcatgtcccctcatttaggtttgttgacggtggctaatattattcgacatgattgtgaagttacaattgaaaatgaaaatattagacccattgattttgatgatgtgcctgacttagtaggcatagcagttactgtagatgttttacctagagctattgatattgcatctatatatagacaaaaaggtgttaaggttattgctggtggtatacatattaccactgcatctagctctgtgccaaaggatgcatttgatagcttatgtattggttttgcagaaaatacatggcctcaaattatagaggacatgaaacataatagattacaatctgaatatgtatctaagtctttaacttctgggaatgatattgtagcgcctgcatatgacatgatagataagactgattatttatggtataacgttgtttctacaagtcgcagttgccctcataaatgcgatttttgctataatagttctggaactcatcaatatataaatcgtaatatagatgatgtattagcagatattaaaagtttaggcacaaagcatattatgtttattgatgataattttattggtaatatttcttggactaaacagtttttagagcgtattaaacctttaaaattaaactggaatgcagcggttactatgaaaataggacaataccctgaattaatggatttgatgaaagaaactggttgtcagagtttatttattggttttgaaagtatcagtcctcagtctttatctagtgttcataagatgcaaaacaatcgtgaagagtttgaaagacttattagtgaattacataagcgtggcattatggtcaatgctagctttgtatttggtctagatggggacacgccagagacatttaaaaatacattagattggattattagccagaaaattgataccattacctctcatattgtaactccatatccggggactgaattttacaagagaatggaagctcagaatagaatttttgatcatgatttatctaaatacaatacgtctcatgtagttgtaacgccgcttggtatgtctaaagaggaattagaagaaggatatctttggatatatcaagagttatattccataagaaatatattccgtcgtatgcctaagactatcggaacgataccagcctatttaacctttaatttcttttatcgtagatttggccattttacatcaaaagtatgtgaacttttaacttataaacgtattggattatgggctgaaaaattatcaagatatatgtaaaggagttattaatgaataagagaatgataaaacgaattttgctaacttctgctattgccatattaggcgttagcacatcgtttgcagcattcacatttgataaacaagaacaagtagatacagcccctattgtaggtttatatcgttatcaggtgcctgctgaattacaaggtgcgtataatactgcaggtgttcagaatttaacagcctctatggctaacgagcctaatacattatctatgaatgtagctcatgtaaaaggtaatccatctgaatcatacgtagtggaggtatataaagatacggctgccttagaaacacaccgcaaatctgagcatttccaaaactatattaacgaggttggttctaaactgacaaatcgtaaattgtatgatgtacagcctttgttattgattgaaaaaccaaatgcgttatctttgattaatgacggtcaatctgttgtgaccttaacagattttacagtagacggtaatgaagttgatacagtacaaaaacaatatcaactagatattgaacgtgctattcgtgatgatgcgggctataaggcaggttacgtattacgtgaaagaaataataaaactcactggtatgttattcaaatttatagtgatgaatcagctttcaataaacatgtaaatagcccaggatatcgttttatgatgagccaaattcaaggtaatctacaaaacgttaccacaaaggttttagatggggatatcttggtaaatcatggtggtcaagattttgtaagaccataatttttgatatattataaacagtaaagttactgctagcatatgcatatgtatgtgctagcagttttttgttacataataggtgaacgtatagtctatactaaaaggagttacatatgacacaacaaaaacggttacgctatttggtggaaggcttagtagcagaatacaaagagaagcataacgaacatatagatatccctatgaatgaagaagagcaatttactctctttagatctttatgtaatattcgccctgctggtggaatgcctcttgaatggatgaagatagaggctgaatatttaaatatattggtccatgaaaagggcatcgtaaccattaatgatatggaagagcgagagactcagatttatctgtggcaaggagacattactcgattatctgtagacgctattgtaaatgcagccaataatcaattattaggatgttttgctccaaatcataaatgtatcgataatgccattcacacctttgcaggtattgaacttcgtatggaatgtgctagaatgactgagtatatggaaatgccagagaaaacaggtgtagctcgtatgacctatgggtataatttaccagctaaacatgtaattcacacggttggacctattatttatgagaaggtaacagctaaggagagaaatgaactggtatcatgttatcggtcttgtttgcaactagctaatgcttataacttacactccattgcattctgctgtatctctaccggtaagttcagattctctaatgaagaagcagcacagattgccatagatacggtacgaacatatttaaaagaaacaaatagtaaaatacaagtggtatttaatgtatttaaggatatagattatgacatctacaacaaattattgggataaataatatactccttttgaaattcataaaaatactgtatcatttaataatgacatacaaaaggttatgaatgatttgttagtttaaaaaggagttaatgtactatgaattataaatacacctatgaaagcccattaggaacaatgattatgcttggtacattaacgtatttaacagatttatttttcgtagatgaaagccatgctcctacttatgatgatgcggaatatattgaacaactaacaggcccctttgaagtaaccattatgtggctagaccaatattttaaaggtcaaaaaccatttattactccaccaatacaattagaaggaacagaattccgtaaatctgtatggtctatattacaaactatctcttatggtgaaacgacaacttatggcgaaataagtaagaagattgctgaaaaacaaggaaaagaaacattctctgctcaagctgtaggaggtgctgtaggacataatcctatatctatcattgttccgtgtcatcgtgtaatcggtagtaatggtaaattgacaggatatgcgggtggtattgaacgcaagaaatatttgctagatcttgaagcgaaacataaatagtacatattagattgtaaaatcatatttaaatagacttatagaaaattgacaggatatgcgggtggtattgaacgcaagaaatatttgctagatcttgaagcgaaacataaatagtacatattagattgtaaaatcatatttaaatagacttatagaaaaagaagaaagagattactcatgatggatagacacatcataagtaatctcttttggtgtatatagggggactatttaaattgatttactaaggtaccaatgccactaatcgatatagatacggtatctcctgattgtaaccaaccatatcgtttttcatttttaccgagtacaacaccactaggtgtaccggtaaagataatgtcaccctcttgtagtgtaatatactgagatacaaactctatgattgcatctggtttaaataacatttgttctaatttagcttgttgacgcacctcaccatttactgttgtggtaatggtagcattttcaaaatcaaaatcgtcaggtgatacgataacaggaccgataggggcaaagttatctagtgatttacctagaatccattgtgtacctctaaattgtaaggttcgagctgatacatcatttccaatggtatagcctaagatatgttctttagcttggtcgcgagatatatttttaccagccttaccaatgacgataaccagttctccttcgtaatcataatgaaggttttcatcttgaatgggaactatatcttgatgtgatgccaatgcattagatgttttcataaagatttctggaaaatcatgtgtagcaagactagtttcctctatatggtctgcataattaaggcctatacaaattatactgttaggattagtaataagtttagggttaatagattctttcataatagatacctccttatacattaggttgttaagttaattataatataaatcgtaatgtaaaaaataattttgacgaaataattatatagaggcatttttgtcacatcctatttgatatacttttaaaaaggtaataaaaggaggagttcctatgtatatgcatagaaatgtgacagataaatttataggtaccgtagtatcttgtgacattataagtacgggtagctggtatggtgatttaccagatggcgttccaaaggaagtgaaattaaatcgtaaagattactatattgaagagacacaacatatttctattaaggaagccattagtgttacctatggcattaaatgggagcatatttcgaaacctgtagagggtaaaatagagtccttaactactaaggagtactcaattgacgaatctaaaaaacaatatctattagagcttatggggcgtagattttccgatgatattgacctatatgatgaggatgagtgtgctgtccaggtgcagctcataaacactgaggatcagaaatttatatatgaatttccttttgataataccctgagggccatgtctatactattcagacaaatcctaggtatgcctacattacttttatttgatggaaatcgagaaaaagatagaattcaagagattcatattgaagtgcaaaaaaatatgtaccaagaatatggtgacgtaaatacattgaattttaattggaatgagccgtctatttccattgattgtaatagtaagcaatttggtcattctagccatagtcttagcgagtatgtagataatcaaatgattcatcaattgaagcaagatattgactttcacattggcgaaacgctatatagtctagattcctttagtcttagtgaaagtcatgaccttgatagagaccctgctcgtggtgggatagtaacagtacgtattaaatgggcgcataaagaggatacattgtttatcgggaatgtaactgatcagtatgtgcccacttggtataaaaatctaattaattttatacatgctcatacaagagataaatctttacaagagtttttacaatcaaatcatacatctgatagaagaatttatacgtattgttctgtatatatttttaagataaaccaggaattttattatcgtactgatagaaatgatatatatgaaggggatattgtaaaagttccgtttggatccgataatgcggttcgtactggtcgtgtagaatctatttcatatcatacgcgttacgacgtaccttatgatttgaatcgtactaagtttattatagataaacttccgacctctatagaatatgttgaaataacttgctcatagtgttaagattataagtatattaataagcatggaggttattgttatgagcaagaatatcgattgggataatctcggttttggttatgtagaaaccgactaccgttatttgactacatataaagatggtaaatgggacgaaggcggactaattactgatgctaacgttgttcttaatgaatgtgcaggtgtattccaatatgcacaaactgtattcgaaggtttaaaagcatactacactaaagatggtcacattgtatgtttccgtccagatcttaatgcagagcgtttaaatcaatctgcggaacgccttgtaatgcctacattacctgaaggacgattccttgaagctgtaaaagaagttgtgaaagcaaacaaagactttgttcctccttatggtcatggtgcaagtctttatattcgtccatacatgatgggtactaactccgttatcggtgtaaaacctgcagatgaatatcaattccgcgtatttactacaccagtaggcccttacttcaaaggtggtgctaaaccaatcaaaattcgtatcactgattttgatcgtgcagcacctcatggtactggtcatattaaagctggtttgaattatgctatgagtttgtacgctatcactgatgcacatgcaaaaggctatgctgaaaatatgtaccttgatgcggctactcgtacacatgtagaagaaactggtggtgcaaactttatcttcatcactaaagatggcaaattagtaacacctaaatctgatagtatcttgccatccattacacgtcgttccttgatgtatgtagcagaacattatcttggtatgaaagtagaacatcgcactgtttataaagatgaattaaaagactttgctgaaatgggtctatgcggtacagcagcggttatttctccagtaggtcaaatcgatactccagaaggcactatcaatgtaccagctggcatggatgatatgggccctgtaactaaaaaattatatgatacattacttggtatccaacatggtgaaatcgaagctccagaaggttgggtagttaagatttgctaatctttaagtaatatacaataatataatattaaaacatcctccataatcagaagattgtggaggatgtttgcgcttatagaatttatttgattggatctatcgatttagtttgatgtttttcgtgcactgaccttagtcataaatttctcgttgttaatgacaaatcgttcatgtgtgcctttaccaataattccaacaccatcggatgcttcgatggcaaaggagatttttcgtccttccacagctgttactgtagcagtggctgtaattgtagcacccattggggaaggagcatcatggctaatggatagggagatgcctaccgtgccttcaccatcatttaattctggttgtaccgctgcttgtgccgcttcttccataagtgcacacatagcaggagtagcgaatacctcaagagaaccagacttcattgtttttgcaatattagattctgtaactgtaactgttgctgttgcagattgaccaacttgtatcatagtaaaccttctttcgtaatgaactagaatatatttgtattatacaactcttatgagtatatatgctaattttgtaatgataaaatttattatttcctaaaatagacttaattatacagactctatagaatccgtgctataatagtactagttttattaaacgaggtaactatgaaagaacgaaaattttcgccttctggtgaaggcttggtgcaggtaatagcaggcgtattatttgtcgtactactaatcatcattaatattgtagatcctacattttacccaactatgtggcatctagcaacgagtggttctatggaggaaattgccgagtatattcaaggctatggtcctatggccatggtggtaagtatgctccttgatatttttgtcaatgctgtaggatttttgccatccatctttatttccacagcgaatggtcttgtgtttggcatgtggcctggcattattatttcatggctcgctgaaaccattggggtagtcatcagcttttacattatgcgttatttcttacgagatgcggcggataagctaatttctaagagtaccacattgatgaaggttgatgatttttccggtaataatggttttgtggtcatgttatttgctagatcattaccttattttccatctggtgtcatcactgcgctaggggctatcagtaagattaaaccgcgtgactatattttagcaaatttaattggtaaatttccgtctacagcccttgaagttgctattggcacagatattgtaaattttcaagaaaatatggggcgtctaggtattattgtcgtcgtagcagccattgtatattttattctatggaaggtatataaacgatatattaataaacgtaatgcagaacgagaacatgatcctaatgcttaataaacatgtatttctatgtaattaaaataaaagaggcgatactatgagtttttcacttcctgaacgcgtaatattaaaagggcctaatttcatccgtgaagtatttgaacgtggtgtgggtgtacctggatttatcagttttggcattggtaatccagcaccagaggcaattcctgtgaaagttatcgaagatgcctttgatttcatcgttcatgataatcctatgagtttattacaatatggtccgatgcaaggggatgcgcgattagcagaattgaccttacagcgtttatcaaaagttcaccatatgaatttagagggtcaaggtttgattatttctaatggggctggtcaactattgggcttggtacctattactgtatgtgaacctggcgatgaagtgtacatggatgattatactttcacaagtgctatcaattctgtacgcaatatgggggctaaggcagtcggcatcaaaactgatgagttcggtatgattccaagtgagttggaaaaagcggctcaatcaggcaagggaaaatatatctatttaattccaaatttccaaaacccaacaggcattaccatgccactagaacgtcgcaaagagatttacgctatagcatcaaaatatgatttgtttatctatgaggatgatccatatggtgaaatccgttttgctggtgaacatgtaccgacctttaaatcctttgatacggaaaaccgtgttctctatgccggatcctattctaaaacattatcggcaggcttgcgtgttggtttcttgttgggcccagaagatgttatcggcactatccaagcgttaaaaaataatacggcgggacaaatgccattagttacacaaaaggtggtagcacacgtactagaccacatcgattacgatgcacatttagaaaatgtacggaaggtatataaatctaaatgtgatgctatgatgcgtgtctttaaagacaaaggtagttccaaggttcatttgactcaacctacaggtggtatgttcgcatggatgacaatgccggatactgttgattgtgatgaattctttgaagcgtgcatgaataaaaatgtaggcattattaaatgtggtgcttttgcagcggatggtgtacaaaatggtcatgcattccgtttgagctatacggtgccaacaattccagaaattgagaaggggatggaaatcctttgtgctcttacaaaggactattgtggtgaataatttagtcatttaaagcgtataggtatattgaaaattattaaactaccatgatacaataacactgtaaatatatgatgtgttagttgtagaaatagctttcacaatgaacgatatttacaatgagataataattttctaactatatattgttgagggaagtcctcgaagaaagtaggtgtttactatgggttgcggtagcagcagtagtgattgcaatagttgtccatccaaatccgcaggttgcggtggtgcacaacagcctcaagatatgacggcgccattgcatgaattgagttccgttaaacatgttatcggtgttgtatccggtaagggtggtgtaggtaaatcctccgttacaagcttgatggccttaacgatggctcgtaaaggttataaagtaggtattcttgatgctgatataactggtccatccattcctaagatgtttggtatcaaggaaaaagcttacgctgacgaagttggtatgtatcctgttaaaactaagcaatatggcattgatgtgatgtctgttaatttgttgcttgaaaatgatacagatcctgtattgtggcgtggtcctattctaggcaatgttgtaaaacaattctacagtgatgttatttggaaagatatcgattatttattcgttgatatgccaccaggaacaggtgacgtagcgattactgtatatcaatccttgaaattggatggcattatcattgttacatctcctcaagacttggtatccatgattgttgaaaaagcagttaaaatggctgatttgatgcaagtgcctatcatcggtgtagtagaaaactactcttacttccattgtccagataatggtaaggattaccaaatctttggtgaaagccatattgaagaaattcttcaaaaatatggtctattattgttgagccgtttaccaatcgatcctaatattgcaaatttatgcgataaaggtgatattgagtctatcgacaaaacaaatttagaggatgtatctttgcctgagtaggatatatatgacgatgaaagctgtgcatagttttagatgcacagcttttttcatacaaagtttaattttttttcctatgtaggaggtatgtgtatgaaaaaactattgaactggattattccagtggtctttggtataggcctgtggtttattccaacgccggagggtttaacacctcagtcttggcacttattcgccatctttgttgctaccatcgtaggctttattacgcagccattaccaattggcggtgtatctatcgttgtaattactgtggctgctttgacaggtactttgaaaatcggcgaagctatctctggttttgctaactctgctatttggctaatcgtaggtgcattcttattctctcgtggctttattaaaactggtttaggtaaacgtattgcgtataatttgattgctgcatttggtagcagttctttgcgcctatcttatgctttagcattatctgatttgattttggcgcctgccacaccatctaatacagcccgtgtaggtggtgttatcatgccgattacaacaagtttggcaaaagctttcggttctgaacctcaagatggacctcgtaaaattggttccttcttgatgcaatccatttatcaagtcaatacgattacatctgctatgttccaaacatctatggctggtaacacattggttgctgcattggcacttcaatcctttggaattggcattacttggggggattgggctatggcagccattgttcctggtatcattgcattaatcattatgccgtacttcatttacaaagtatatccacctgaaattaaagatgctcgtgaagcacaacaaatgattaaagaagagttaaaaggccttggtaaaatgtccttccaagaatgggttatgctaggcgtatttattttagctttagtgttatgggctacttctcaattcacaaaaattgatgctacaactgttgcattcttaggtatttctattttgcttgctactagcgttcttgtttgggacgatgttaaaagtgaaaaaggtgcttgggatacattggtttggatgggcacattgatgggctttgctggtttcttgtcaaaattaggtttcatcaaatgggcaacagtacttgtaggcgcttatattccagaaggatcttggattattgccttcgttatagctgtacttattaatacatattctcactatgtattcgcatccttaacagctcatatttctgctatgttcgtagcattctccgcgattgctatctctgcaggtgcaccaccaatgttgacattgttgatgattgcattcacatctaacttgtgtatgtccttgactcactatgcagcaggtccttctccagtaatcttcaacactggatatgttcctcaaaacacatggtggaaactcggtttcttctcatctgttatcaacttaatcatctttgtaggattaggttctatttggatgaaagcaattggtatgtggtaacacataattacataaacgtatacgattatgtatacatgacgccgtcccttgtgggacggcgtttttgtgatacaatggcaatagattatgtatattacataacaatttgcatgtaataattgagtaggaggtcatatgaaatttgataatcctcaattaataaaatatatcaagggatgtacatctccgtatcatacggtagacaccagtttacagctattattagatgcaggatttacagagttatccttggaagaaccttggaatttaacatttggtgattatgtagttaatgtatatggtacaacattatttgcctttcacataggcgaggactatcgtcattccttacgcattgcatcggctcacacagattttcctgctatacgggtaaaacctaatcctattacagatgtaaaagggtacacaaagctcaatgttgaaatgtatggtggattaattcaaaatacctggttagatcgacctttaggtgcggcggggaccgttgttttaaaaggtgagaacccatatgatgttgattctgttctatttgatacgaagcggccaatcgctattattcctaatttagcaattcatatgaatcgtaatgtgaatgatggggtagccttaaatcgccaaaaagaaatgttacctatcatcatgatgaaagcagatgatgatacgacaaaatctgaggaagaggtatggaatcaatttttagcagacgagattaattgtgattcatctgaaattctatcctatgaaattacactctatcctgtaacagaaggtgcattagttggtacagatttcgatttcattagttctccaagacttgataatttaacgtcttgcttcggtgttctcgcgggtattgtagaggcaaagaaaaataaagttgacggtattcgctgtgcaatcctattcgacaatgaagaggtaggtagccgtactaaacaaggcggagcaggtatgttattgccaaacttattagaacgtgtgtatcgcagtttaggattaagccgtgatgatatggatctagatgtggctcgtggcttcatgatttcatctgatgtagcccatggattgcatccaaattatccagagaaaaatgatattaccaatttcccggtactcaatggaggcgttacattaaaacaggcctgtagccaatcttatgcaggcgatgcaaaggctattgccattgtgaaaggcctttgtgaggaagctaatgtagcctaccagatttatgttaatcgttctgatattccgggcggctcaactgttggttctatttcatcagctatgttaccaatgcggacgatggacattggcttaccattattggctatgcattccgctgttgaaacaatgggggctcgtgaccaagaacaattgaatcatttaatgcaacatttcttgggtgatgaataaattacataaatataatcttattcaaaatctgatatatgtgaaaacacatatgaaaaattaatgaatagaataatttctatattaagttaaataatttataaatataaccatattgatgattaatgcttttattatctgaaaattattgtataatataagtatatttgattcataatcggatatcaaaaaaagtgataaatgtttaagtaaaatatgtatttcgatatgcatacatacaatgtatatcaatgcacacaaatctatcattcgataggactcggtaggaggcaattatgaagaaaattaaatccgttttggtagccaatcgtggcgaaatcgcaatccgcgtatttcgtgcatgtaacgaaatgggtattaaaacagtagctatctattctaaagaagacacattgtccttgcaccgtaaccaagctgatgaagcatatttggttggggaaggtaaaaaaccagttgatgcctatttggatattgaagatatcatccgcattgctaaagagcatgacattgatgctatccatcctggctatggtttcttatccgaaaacgaagagttcgctcgtcgttgcggtgaagaaggtatcattttcattggacctcacgtagaacatttgaatatgttcggcgacaaggttaatgctcggacacaagctaaattggcagacattccaatgattccaggttctgatggggcattgcgtgattttgcacaattagaagaatttgctgaaactcacggctatccattgatgattaaagccgtaaacggtggtggcggtcgtggtatgcgcgaagttcaccgcaaagaagatttacgcgatgcttatgaccgcgctaaatccgaagctaaagcagcatttggtgatgacgatgtttacgtagaaaaacttattgttgaacctaaacatattgaagtacaaatcttaggtgatgaacatggtaatgtcgttcatttacatgaacgtgattgctctgtacaacgtcgtcaccaaaaggttgttgaaatggcaccagcttttgcattgccattagaaactcgtaaagccgtatgtgatgcagccgtaaaaatcatgaaaaatgttggctacgttaatgctggtactgttgaattcttggtaacagctgatggttccttctatttcatcgaagttaatcctcgtatccaagtagaacataccgtaacagaaatgattacggacatcgatattgttcattctcaaattcgtatcgctgaaggctatgatttgcacagcccagaaataggcattcctgaacaagatgaaattccttgtaaaggtactgcaattcaatgtcgtatcactacagaagatcctaagaacaacttcatgccagatactggtaaaatcttggcatatcgtagttccggcggctttggtatccgattagactctggtaatgctttcacaggcgctgtagtaacaccttactatgattccctattggtaaaagcaactgcattcggtcctaacaacgaagaaactattcgaaaaatgcttcgttgcttgaaagaattccgtattcgtggcgttaaaacaaacattcatttcttgattaacgttcttgaaaaccctgaattccaaagtggtaactacacagttaacttcattgaagaccatcctgaattattcgaattaaaaccagatcgcgaccgtggtactaaattgcttcgctatattgcggatactacaatcaatggttactccggtgcaggccctcaagaagtgcctgattttgaaccaatgcaattgccatctaaactagatgtatctccagcacctggtacaaaacaaaaattcgacgaattaggtccagaaggcttcagtaaatggttggctgaccaaaaacaagtattctttacagatacaacatggcgtgatgctcaccaatccttatttgctacacgtttgcgtaccatcgatatggctcgtgtagctggcgatgccgctaaaggtgtaccaaatctattctccttagaatgttggggcggtgcaacatttgacgtatcctatcgcttcttgcacgaagatccatgggaacgtctgcgtatgttccgtaaagaagtgcctaatacattgcttcaaatgttgattcgcggtgctaatgccgttggttatacatcctatcctgataatgtagttcgtaatttcattcaattgtccgctaaaaatggtatcgacgtattccgcgtatttgatagcttgaatagccttgacaatatgaaggttgctattgatgaagttcgcaatcaaaataagattgctgaagttgcattgtgctacacaggcgatatcctcgacagcaatcgtcctaaatacaatcttgattactatgtaaaaatggcaaaagaattgcaaaatgctggtgccaatatcattgctattaaagatatggctggtttgttgaaacctcaagctgcatacaacttagtatccgctttgaaagacgctgtaacagtaccaattcatttgcattctcatgaaggttctggcaatacgatttactcctatggccgcgctgtagatgctggtgttgacgttattgacttagcatattctgcatttgctaatggcactagccaaccaagcatgaattctatgtattacgctttagctggtactgaacgtcaaccacaaatgaatattgactacatggaagaaatgtctcattacttcggtagtattcgtccttactacagaggcgttgataaagctgaaaaatatccaaatacagaagtataccaacatgaaatgccaggcggtcaatattccaacttgcaacaacaagctaaaatggttggacttggtgatcgttggacagacattaaaaaagtatatcaccaagttaatatgatgtttggtgatatcatcaaggtaacaccttcttctaaagtcgttggtgatatgacattgtacatggtacaaaataatttgactgaaaaagatatctatgaaaaaggtgatactcttgatttccctcaatcagtagtagaattcttcgaaggtcgtctaggtacaccatatcaagggttccctgaagaacttcaaaaaatcatcttgaaaggtgctcgccctattactgttcgtcctggtgcagtattacctccaactgatttcgaacatgttcgtaatgaattaagcgaaatgggtgctaatactactgatgaagatgtaagtgcatactgcttgtatcctaaagtatttaaagactacactaaatttactaaagactttggtaatgtatctgtactagatacaccaacattcttctttggtatgaaacgtggtgaagaaattcaagttactattgaaaaaggtaaaacattaattatcaagatgaatggtgtatccgatcctgatgaagatggtaatcgcatcgttctctttgaattcaatggccaaccacgttctattaaagttcatgataaacatgctaaaacaactggcgttgttcgtcgtaaagtaaatgaatccaaccctggtgaaattggtgctacgttgtctggttctgttgttaagattctagttaagaaaggtcaatccgtaactaaaggtgaaccattaatcgtaacagaagctatgaagatggaaacaacaattacagctcctatcggtggtatcgttgaagaaattcttgttcgtgaaggcagccgtatcgaatccggtgattgcttgttacacattgaagatgctattaaacgttaatttcatacgatttagcacgtaagtgcataaaaaagtcccccatataatactcttttgtattatatgggggacttttcctactaaatatggtactatataaggtataagaaaataggcgtattgtgcctttttcatgattactgactgattagaaaaggagtattagctaatgagatgtccttattgccaacatacagacacgaaggtaacagactcaagaacgacagatgaaggaaatagtatccgtcgtcgtcgggagtgtattaattgtggacgccgctttactacttatgaaatcatcgaagaagtaccactcatggtagcaaagaagaatggtcgccgtgaattatttgaccgtggtaaattgttaaatggcttgttgcgttcttgtgacaaacgaacagtgcctatgtccgttatggaagaagtggtcaataatgtagagcgagacattcgcaatgaagtaaatcaagagatttctacagatcgtattggtgaacttgtattacaacaattaaaagatattgaccaagttgcctatgtacgttttgcttcagtatatcgtaagtttgataatattgacagctttatggctgaacttaaagcattaaaaaaattagatgctaaaaaagcaaagaaatagcgtgaatatatgattgatttacattgtgatacgataatgcaattaatcgaccaccctcatgatggtgatttattttctaataactggaaaattgatattgagcgccttatcaaggggcatagtcgattgcaggattttgcattatttgtagacttagaagaacaagacgattcgtatggtagatatgaatctatgcgccaattgttcgatagtcagatacaaaaatatagcgactatatcagtcatgtgcgttcttatgatgatattacagcgtgttatgaaaatcataaagtagctgctttattatccattgaagaagggggagttcttggaggcgatttagctaagttagacaaggcttacgctgatggtgttcgacttattacattgacctggaattatcctaatgaattgggggaacctaatactggagattctcataagaaattgactgaaacaggcattgcatttgtagaacggatgcaagaattaggcatgattgttgattgttctcatcttaatgatgggggaacagaacaattaggcgatattcttgatgtgccttttattgcatctcattctaatgcgcgagaagtgacagctcatcgtcgtaatttgccggaccacttgattcgtctaattggcgaaaagggtggcgttattggtttgaactttgctcaatccttcttggggacttcacccatcagtcgcattgatgatattgtgaagcacggattgtatatcatcaataagggcggcgaagatgtaattgctctaggcactgattttgatggtatcaagccaaatacagaaattgaggatatttcagatatgcatcgtttgtatgatgcatttagaggcgccgggctttcagaagaacaaacggaaaaactattttggaaaaacgcggatcgcctactaaaggagattttataatgacagatataaatccaatcattgcggatcgatttacagaccatcttgatgtatttagtaaaacaatggatcagatggatgttattcaagaaattgctaaccgctgtattgtggctttgaatagtggcaataaaattttattctgtggtaatggtggttccgctgcggattctcaacatcttgcagcagaacttattggacgttttaaaaaagaacgccgctctcttgcatccattgcgcttactacagatacatctattttgacagctgttgccaatgattatgactatgatgcagtatttgcgcgtcaagttgaaggcttaggccgttctggggatgtacttatcggtatttccacatcgggtaattcaaaaaatgttgtgaaagccgtggaaatggcacgaaatacaggtatgcacacgattgctttcaccggtgaaggtggcggtaaattggcagaattatgcgatcttacactagctattccaagtactgttacggcgcgtattcaagaaatgcatattttagctggtcatatcatttgcgaacttattgaagaagattattaatcgagatagggaagaaatcacagatttcttgaaaggggacctatgattacaaaaacagtgaatgagtttttgacaaattcattaccgaacctaaacattgcagttatcggtgatgttatggtggatcgttatgtatttggcgatgtgagccgtatttcaccagaggctcctgtgccggtcaatcgcgtatcctctgtgaaagaagtacttggtggggcaggtaacgtagcgtctaacttagccaatctcgattgccatgtctatttaggggccgtagctggtgtcgatgaccatggtagagtactcgataacttattgaccgctgatcatattgatacatccggtctcatccatgatgaaagtcggtctacgattactaaaatgcgtattttaggagaccgtcaacaaatgatgcgcctcgattttgaaacgattacacctattacagctgctgaagaagaacaattgatcagttggctagaagagctttgtcaacgtggattacaaggcatcgtcatatccgattatggaaaaggcgtatgcacaccgacattgttgcaacatgtattcaagttggcgaacacgtatcaagtacagaccatcgtagatcctaagggtgctgattggtccaaatatgatggtgctacatgtattacaccgaatgtaaaagaattgggtgaatccttaggtcgtgtgattccaaatgatgatgcatctgttatcgaggcggctaaggaagtacttaataaggttaatattaaatatattatcggtactcgttccgcaaagggcattaccgttgtggctaaggacggtagaacttggcataatccagcaacacaacaggatgtattcgatgtgagtggcgctggtgatacggtcgtagctatgatgatttcatgcttagccagtggtttatccatgcgtttagcactacatatcgctaatggcgctgctggcatcgtcgtatctaaggtgggaacatatccaatccatcgccaagagttgattgagttatggcgctctgtacgacaattgacaacatctagcccattatatacaaaagaagaaatgaaggcgttaatcgataaatggcaaagcatggacgaaaccgttgtatttacaaatggttgctttgatattctgcatcgaggacacattacgtatcttcaagaggcggcacaacttggggctcatctcattattggacttaactctgatgcatctgttagacgtttaaagggtgaaacaagacctatcgtatccgaagaggatagagcagcgttattaagcgccttacaatgtgtagatggtgttgtcctttttgaggaggatacacctgccgaattattagcgtacttacgccctaatattcttgttaagggcggcgattataaaaaagaggatatcgttggtagagaatctgtagatgaagtagaggtactttcatttaaagaaggatactccacatcggatatcgtaaagaaaatagccacgatggctaaggaggggaaattatgattattgtaactggtggtgccggttttattggtagtaatattgtgaaagccttaaacaaacgcggtcgcaatgatattctaatcgttgatgatttaacagatggtcgtaaaattcgcaatctccaaaatttagattatttagattacattgactgtgatgattttgatgctgccattgcagacggcacattcaatgtaggtcctattgaagtcattttccatgaaggtgcatgtgcagatacgatggaatacaatggcaaatatatgatgaagaacaactacgaaggttccaaaaatctattccactattgccaagatcgtgctattccatttatctatgcatcttctgcatctacgtatggcaatggtacaaatggctttgttgaaacgccagaagcagaagaagctttaaatccgtatgcatattctaagctattatttgaccgctatgtacgtaaatttgagggcgaatatacagcacaagtggtaggtttacgttattttaatgtatttggtcctaatgaagcacataaggataaaatggcatctctagtacgccaaatgttctataaaaaccaagaaacaggcgttatcaatttgtttgaaggcacagatggctatgaaaatggtggtcaaacacgtgatttcatctatgtcaaagacgtggtgaatgtaaacttctatttctgggaacatcctgaaatttctggtacattcaactgcggtacaggtcacgcacatagcttcaatgaattcatgcaagctgttattgactataatggtaaaggtcgcattgaatacattccgttcccagaagtgttgattggtaaataccaaagctttaccgaagcagacacaactaaattgatggctgctggctatgataaaggctttacaccattagctgatgccgtaaaagaatattgtgaattattagataataacgaaggttacttgcgttaatttgttgtgacagattaatgtcaattctttgataattgtaaaggatgtagtatgagaaaggtgttattcctcgatagagatggggttatcaacaaggatgtttcctatctctataagatagcggatctacagtgggttgatggtgcaaaagaagcattgaaattagcttatgattctggttatgaacttatagtcgtaacaaaccaaagtggtgtggcacgaggttattataaggaaactgatgtacaaatcctacatgattatatgggaaatgaactatttaaagcgggtgcacctattttacatttctattattgcccacatcacaaggatggcgttctagaacgatatgctgtcgattgtaattgtcgtaaaccaaagcctggtatgattttgcaagctatcaaggattttgatgttgatgtagaacatagctttctcatcggtgatagccaacgtgatgtagatgctgctgaggctgcagggataaagggatatctgtttacagaatccaatctattacatttcatgaaaaagattttaaagcattaatttttggatgaaccacatttgtgtgtattcttcgttcatagaggggttattatgaaggactattccaatatactcatcataaaaatgagttccttaggtgatgtcattcacgcattgccaacattatatgcattgcgccaaaatttgccgcacgcaaaaattacctgggccatacatgaacaatttgcgagcctcttgccaggtaccccttgggtggacgaagtaattatcatcgataagaaacaattaaaatcgccgtcttatttatggaatcttcgtaaagaactacatagtcgtcatttcgatatgaccttagatttacaatgtatcgccaaaagtgccattgtatctctactatcgggttctcctgagaaatatggctattgggaacttcgcgagggcagtcaattagttaataaagctctagtaggagctcataaatatgatcatgttattgagcgctatctcgatacggtacgtgccttaggtggcgaagtggatggcgtggaatttccaatgcctcatgaccatacagcagaagggaagattcgcaaccggctatccgaactaggtgtaaccgatgattatgttgtcgttgtacctggtgcgcgatggattgttaaggaatggccgttattaaattttggtgaattatgtattcgcctttgtgaaagtggtaaaaaggtggtcattgcaggttcgcctgatgatcgtgaaaaaggtcaatttatagaaaactatgtgaagagcgataatctcattaatttagttggtcaaacgaccatggctgagttaatcgagttgattcgtcactgccatattttcatcagcgctgatacggggcctttacatattgccaatgcattaaagaaaccattaatcgcgttgtttggtacgacatcaccgcatagaacgggcccatatgggggcagtcatgtacatcttattatttcccctacctcgaaggctacacctgaacagccgctagtagatgatcccgactgtatggcacaaattccagtagatgcggtatgggatgtatattctgaaatgttgagaaaggatttatgatggaacttgattataaacgtattgtcgtaacctttctcatgcatttaggtgatgtagtattaacgactccatttctagaggtgttgcgtaaagcagcacctcatagtcatatcacctatgtgattgatgaaaagttacaagatgtgatgaaatacaatccttatatcgatgatttgattacggtcgataaaaaaggacgtcataatagcattaaagggttaaatgaaatcgctcgtcgcattaacgaccaaggtcgtccagatatcgttatcaacctgcatcctaatgaacgtacatcatacttggcatggaaaattcacggtaaggtaacgacagggatgagtcatttcctatttagaccatttatgacgaaatatacccgtcttgatcgcaagacacgtcatgctgctgatatgtacattaacgtattagagcaattaggcgtcaccgacgtagctaatcacggattacatatcgagactagtaaggactggaatgacgaggtattccgtttttataaaagccaaggcgttatgcctcgtgataagattataggttttaatatcggcagtgcagtgcctgaaaaacgatggcccgcagagcgttttgcggatgtagccgattattttggcaataaagggtataaaactgtattctttgggggccccatggatttggacatggtaaaacctgttgtagaacagatgaagacgtcgccaatcgtggctacaggtgcttttaaattgggccctttagctgcggccatgaaatggtgtgacttgctgattacgaatgattctggacctatgcatgtagccattagtcagggtgttcctatcgtagccctttatggaccgtctaatccatttttctatggtccgtaccaagcaaaatctattgtacttgagtcgatggaccattatgaaattggtaaaagcatgaaacaggttattaaagaaggcaagtacaaaggtatttctgttattaccgaagaacaagtgattaaggcagctgaaacattactgcaggaatcgtaagttatggattatattatttttgatttagagtggaatcaaccatatagcaacgacattagctttatgaagcgagcacggatgccgttgaccggtgaaatcattcaaatcggagctattaagctcaatgagaatttagagattgtggattcgttcacaatgtatgtaaaacctaaatatttaccacatatgcataagcatgtaaaggcccttacaggaatcaccaatcaagatttgaatcgcggtgtcccatttagagcggcctacagtcattttcaacaatggtgtggcaaggattatatgctcctatcttggggcgctgacgatattcttatattgcgagaaaatttattgatccataaattaaagagtatcgactatgattcttgggcggatgcacagatgctatacagctatcaacgatatggcacgacacaacagtactccgtagctcatgcgatggaggatttacatatatcatctgaagaattatctgctcataatgcacttcacgatgctatatttacggcacatatctgccaaaagctagatttgctaacagcattattgcattatgattccatacggaaagaggcgccaaatccatttttatatccaccgggtttgacattctttatgtacgataactttcaagaaaagaaacgtatcgtatatgatagacgagtgcgattatccttttgtccctattgtcaaagtcggttggaaacgacacgtcctgagcggatacaaggagataagcatttatctataggcgtttgtccgaaacatggagcatttgccattcagttaaaggtaggaaaatatacgattaagtcgggaattaccaagttttatgtaacaaaggtattgagtcatagtactgatgaaatcgataaactatatagagaaaaatcggaaattaaccgagagaaagagcgactctactatgagcgccgtcaaaaagaattattagaaaaatcaaaagcataacacatgatatactgtgctgtatgcttatataggaaggaataaaattatggaacgtaaatatgcttggcataattatgacgaacaaacattacaagacgtgatgtcattaggtgactcgtatcgtcaatttttggataatggtaaaacagaacgcgaatgtgtcattcaatctgtagaagctgccaaaaaagctggctatgttgatttaaaagacttgattaaatctaacacgccaattaaagcgggcgataagatttactatactcatatggataaatctattgcgttatttaatatcggtaccgataatttagacctcggtatgaatatccttggtgctcatatcgattctccacgcattgacgtaaaacaaaaccctcaatatgaagatagcaatttggtgttttgggatacacactactatggcggtataaaaaaataccactgggtagctatgccgcttgccattcatggagttgtcgtaaaaacagatggtacacgcatcaacattaatattggtgataaagaatctgatcctgtattctgcattacagatttattgcctcacttaggacaagaacaaatgcaaaagaatgcagccaaggtgattgaaggtgaggctcttgatcttctcatcggtagtcgtcctgttaaagatgaagaaaaagaaggggttactaaatttattaataaccttcttgaaaaagaatatggatttgtagaacgcgatttattatctgctgaacttgaaattgtaccagctggcaaggcgcgtgacatgggctttgatcgctccatggtattagcatacggccaagatgaccgtgtctgtgcttatacatccttggtggctatgctcgaagttgataaggtaaaacgtacgacttgctgtttattggtagataaagaagaaattggttccgttggtgctacaggcatgcaatctcgcttctttgaaaatgcggtagcagaaatcttaacattgatgggcaaacctaattcagtaaatgtgcgccgtacattggaaaattctcgtatgctatcctctgatgttagtgctggatatgatccattgtatgcatctgcttttgaaaagaaaaatgcttcttacctaggtatgggcgtcgtatttaataaatttaccggttctcgtggtaaatccggttccaacgatgccaatgcagaatatatgggctttatccgccgtgtaatggaatctaataacgtaacataccaaacggctgaactcggcaaggttgaccttggcggtggtggcaccattgcgtatatcatggccttatatggtatgaatgtaatcgactgtggcgttgctgttcttagcatgcatgcaccatgggaggttacatctaaggccgatatttatgaagcaaaacgttgttacgtagcatttttgaatgcagatgatgaaacaatctagtatgatggggctttcaccattggtgaaagtccatgttatgtgaggtataggatgaaacaaacggaattaggcgctgctatcgaggcggcgaagggagaggcaacagaggttaagaccgtaaaggtcgatatttttgatattcctgaaacaaaggcaaaagaatatatcgctacccgcgaagaggtggctaaagctgctatggaggtcatgaaaccatattgtgtgactgttaaacgggaaaccttagatgaagatgaaggagaagccgttgtgggctattatgtaacgggagaaattttaatgtgtgtcatccttgacccatttgaagtgcccgtaatgaaggtggccctcgataaggggacactaaaagaatacattctagcagccaatgaattgacagaggatatgctagcttctctagataaataataaatctgttagaatacaatatgtgctctacataaggacaaatgtaaaatactttagtctgatacattgatgtagtgcacaaagttgtttataatagaagtattattatttcgaatataggaaggaagacccaatgaacttgaaaaaaggcattgccctcgcgctcacggcggcagcattgatggctttcacaggctgtggcacaaatgaaactacatctaatggagagtataaggttggtgttgtacaactcgtagaacatccagcactagatgcggcaaataaaggttttgttgatgctcttaaggaaaagggcttatctgataaaattacctttgatcaacaaaacgcacaagctgaccaatctaatttgaatagtattgcacagcgttttgtatctgatcgtaaaaatttgattttagcaattgctacgccagcggctcaatccatggcgaacgcaactcatgatattccaatcttgggtacagctattactgattacgaagctgctaaacttgttaaatctaatgaacatccaggtggtaatgtatccggtacatctgatatgaaccctgtagaacaacaagtagatttgattttaaaagtattgccaaatgctaaaacgatcggtacgatttatagctctagcgaagtaaattctcaaattcaagttgaaaagatgaaagcttacgcagcgacaaagggcattaaggttgaagaggttactgtttccaatgtaaacgatattcaacaagcggcacaaaaccttgtatctcaacgtgttgatgccatttatgtaccaacagataatgtggtagcatctgctatgagcaatcttgtagcgattaccgaccctgcaaaaattcctgtattcggcggtgaagataaccacgtaaaaggcggtgcggttatgtccttatctgtagactactacaaacttggttaccaaactggcttgatggcggctaaggtgctaactggtgaagctaaagtcgaagatatgccgattgaaatgcaaaaagaattcaaattagttgtaaataaagataaattacaaaaattgggcatcaccttaccagaggatttgatgaacaaagcaactatgatttagtacttaactggtaaggagttacacatgaactggaaaaaaggtattgcagtggcacttagtgccatcactgttatggcaatggtagctggttgtggttccaatactactactagtgaccaaaagaaaattggcgttattcaattagtagaacatccatcccttgatgctgctaataaaggctttgtagatggtcttgcatctaaaggttttaaagatggggaaaacattaaaatcgaccaacaaaatgcacaagctgaccaatctaatttgaatagtattgcgcaacgtttcgtatccgataaaaaggatttagtactagcgattgcaacgccagcggctcaaacgatggcaaatgcatctcatgatatgccaatcttagggacagctattacagattatgtgacagctaaacttgttcaatctaacgaacacccaggtggcaacgtaactggtacttctgatatgacacctgttgaaaaagaggtagatcttatcattgcattagttccaaatgttaaacgtattggtgcgatttacacatcctctgaaattaattcccaattacaagttgaaaaaatgaaagcctatgctgctacaaaaggtattacagttgtagaagctacagtttccaacgtaaacgatattcaacaagcagcaacaaatcttgtaaatcaagatgtacaagctatttatacaccaacagataatgtattagcatctgctatggctaacttagcacaaattacagatgctgctaaaattccagtatttgcagctgatgaaggtatgacaatgactggtggtgtagcaacatattctgtagattattataaattaggttatcaaacaggtttgatggcagctaaagttctttctggcgaagcaaaagttagcgatatggccatcgaaacacaaaaggatattaaattgactgtcaacgaagaacgtgctaaaaaattaggtattacaattcctgatgcacttcgtaaagatatgaaataaaagaggagattttgatgttagatttagtggtaggcaccataacaacaggccttttgtggtccttgttggcggtcggtgtattcattaccttccgcgtccttgatgtggccgacttgactgttgaagggacattcccaatgggggcggccatttccgccatcttgattacaactggtatgaacccaattctttctatcttgattgctggcgtaggtggcatggctgccggtgccgtaacaggttggatccatacaaaattaaagattcctgcattgttagctggtatcttaacgatgattgctttatattccattaaccttcatattatggggaaagccaacgtatccttacttcgcatggatacaatttatacaattattggtagcgtgcttcatacaccaaatatgtggtctgctgccattgttggtgttattgtagctgttgttgtatgtttattactgttctggttcttcggtactgaaattggtaccgcattacgtgcaacaggcgttaaccctcaaatgattcgagcccaaggcgtgaacacagataatatgatcgttcttggcctattaatttccaatggtttcgttggtatgtccggggcgcttattggtcaatttcaaggctttgctgacgtaggcatgggtattggtaccatcgtaatcggcttggcatccgttattatcggtgaggttgtattcggtacaaaatcctttgttcgtagcctcattgctgtagtacttggttccatcgtatatcgtatcgttatcgctgccgtactttacatgggtatgccaccaaacgatttaaaattattcactgctattctcgttgccatcgcactttctttgcctacattgaaagccaaatggttagctcgttaaggaggacactatgttagaagtaaaaaatatggtaaagaccttctttaagggcacaattaatgaaaaaactgcactacaaggcatcgaccttcgcttagaagaaggcgatttctgtaccgtaatcggtggtaatggtgctggtaaaagtacattgctaaactccatcgctggtgtatttcctgtcgatgaaggcagtattactatcaataatattgatgtaacaaaaatgccagaatacaaacgtgctaaatacattggccgtgtattccaagaccctatggttggtactgcaggcaatatgcaaattgaagaaaacttaatccttgctatgcgccgtggcaaaaacttaggtcttaaatgggcttttaaagatagtgaacaagcattctttaaagaacgccttgcactattaggtctaggccttgaagatcgtctatctgcacggatgggcctattatctggtggtcaacgtcaatctatcacattgcttatggctactatgcttcgtcctgatttattactcttggacgaacatacagcagcacttgatcctaagacagctgaaaatgtattgcaattaacagataaacttgtttcagaacataatctaacaacccttatgattacgcacaacatgcgtgatgcattgcgcttcggtaatcgtcttatcatgatggacgctggtcgtatcatctatgatgtaaaaggggaagaaaagaaaaaattaacagttgctgatttgttacaaaaatttgaagtagctggcgaaggtgcgttaagcgaccgtatgatgctcggttcaaaataagtacctaaataatatggtctaaaaaagaggggatattatcctctcttttttcatgaaaacctttacactatggggattatactgtatacttaactaagtcataagacatatcgtaagcgaagtattcgaatctccaacggttacttaagcttatcgagattattatttttttaggaggtaacattaatgttaactacagaagctaaattagcagtaattaaagaatacgctactcatgaaggtgacactggttctccagaagtacaagttgcgattttgacaagccgcatcacatacttaactgaacacttgaaagaacacaaaaaagaccatcattcccgtcgtggtttgttgaaattagttggtcaacgccgtaacatgcttgactaccttcgtcgtaaagatatcgaacgttaccgttcccttatcgaacgtcttggtcttcgtaaataatacaattagccgtccatttggacggcttttttattttatttccttgtgttataatgaatttaggcaaagggaaacaactgccgataatctattgtggaaacacagaaaaaaggacagagcggcaactctgtcctttttattgtgctagttgctatttaaatctactatctagccacttgatgatgtaatggcaagttacaccacctatgatagtgattataagggaaacaacataatccactatagaaacacctcctttctgttgccagaataggagttagcaacaattaaagtatatcatatggatagaaaaaatagcctaatttaattagatgatatataataataaggtatacgtataagaagatttttaggaggaataggaatggaacaattccaaatggacctagcaggtcgtacgcttacgatcgagactggggaacttgcaaaacaagctggcggtgccgtaatggttggttatggcgatacacgcgtactcgttaccgctacaggttctaaagaggcgaaggatatcgatttcttcccactcacagtagattatgaagaaaaaatgtatgctattggtcgtttgccaggtggttttattaaacgtgaagcacgtccacctgaatctgctatcttgaatagccgtttgattgaccgtcctattcgtccactatttgataaaggtgtacgtaatgaagtacacgttgtagctacagttatgtccgtagatcaagattgtgatcctgctatctgtggtatgattggtgcatctgcagcattatctatttccgatatcccatgggctggcccaatcgctggcgttcgcatgggtcgtgtaaatggtgaatttgtcgttaacccaacaaaagcacaattagaagaaactgaccttaatatcgtagtagctggtacaaaagatgctatcctcatggttgaaggtggcgctcaagaggttccggaagaaaccattcttgaagttattatggctgctcacgaagaaattaagaaaatcgttgcattccaagaagatgtaaaagctaaagtaggcaaggaaaaacgcgtatttgaaagcaaagacgtacctgctgaaatcgctgatgcagttcgcgcatatggtcacgataaacttgacgcagccgttcgttgtgcagataaacaacaacgcgatgcacaagaaactgaagtacgtgaagacgtattagcacatttcgcagacatctaccctgataacttagctgatgtaaataaagcattcgatgcaatgacgaaggaaattgttcgtcatatgatcactgttgaaaaaattcgtccagatggtcgtaaacttgatgaagttcgtccaatctcttgtcgtacaggcgtattgcctcgtacacatggttctggactattcacacgtggtcaaactcaagtattgaacgtagctactgtagcgccattgtctgaaaaacaaacaattgatggcatcggtttagaaacagaaaaacgctatattcaccactacaatttcccatccttctccgtaggggaaactcgttcctcccgtggtcctggacgccgtgaaatcggtcatggtgctttagctgaacgcgcattggtacctgttattcctagcgaagaagaattcccatatgcattgcgtctagtatctgaagtattagaatctaatggttctagctccatggcttccgtatgtggttccacattgtccttgatggacgctggtgtgcctattaaagctcctgtagctggtatcgcaatgggtcttgttacacaaggcgaacactacacaatcttaacagatattcaaggcatggaagatgctcttggcgatatggacttcaaggtggctggtacagctaagggtgtaactgccatccaaatggatattaaaatttctggtttgtctcgtgaaattcttcatgaagcattggaacaagctcataaaggtcgcatgcatatcatgggcattatgttagataccattgctgaacctcgtcaacaaatgtcccaatacgctccacgcatcattacaatgaaaattgatccagacaaaatccgtgacgtaattggttctggcggtaaagtaatccgtagcatcattgacgaaacaggtgcaaaaattgacatcgaagatgatggtactgtatttatcgcttctgtagaccaagaaggtgctgcaaaggcgcgacaaatcattgaaaaccttactaaagaagttgaagtaggtgaagtataccttggtaaagtaactcgcttgatggcatttggtgctttcgtagaagtattaccaggtaaagaaggtcttgtacatatttctaaacttgcaaaagaacgcgttgaaaatgtagaagacgttgtaaatgtaggcgacgaaattatggttaaggttatcgaaatcgataaacaaggccgtattaacttgtcccgtaaagattgtttgaaataagaggtgttacatggatattcgtggctttgaagtagtttctgcttttgaagaacaaaatatcaatttaccaacacgtaaaaccacagaaagcgcaggctatgatattgaatgcgctgaagctgttactttagaaccaaatcaagtggttctcgtgccgacaggccttaaggcttttatggcatacgacgaataccttgctatccacatccgttctagcatggctatcaaacgcaaactagcacttgtgaatagtactggtatcatcgatagtgattactacaacaatgaggacaacgaaggtcatatcatgatcgccctcctaaactttggcaacgaacctgttacccttgaaaaaggcgaacgcgttgcacaaggcattttctctaaataccttattaccaatgatgacgatgcaacaggcgtacgtacaggtggtattggtagtactgggactatgtaaactacatataattctttatagaatggtgaaagccgctcaacttaggttgggcggctttttgtgt

SEQ ID NO: 713 - DNA, 716867 bp, Veillonella atypica
  source 1..716867: mol_type = genomic DNA
ctaaaaatatagaaggagaagtcatacttcatgatacacttgaagatgcagtagaaactttactgactaataatgattctaaaagtgcattattaggatgtgtagtataccctgacttacataaaattgttttttctaatttagatcgaattatactttatgatgtctttatagataatacatacgatatggtattagcttcgaatggaaaatgtgtaaatgaattaaattgtattgcttctcatcctgcacctagtggattaattttggataattatcctactgttaatgtggagtatgctaccagtaattctaatgcgggattaagatgcttacaaggggaagtagatggatgtattacaacgaaagccgtagtgaaaacatataacttaaaagaattaattaattatggagccgtacctatggggtttacagttcatattttaaaagagaggtaatatgaatacttatataagagaaattgttgataaaactaatttattacagtcttatcaatctgaagagggaactctaataaatgttgagaatcgtgatagagttcgtactattttgtgtgatattgtaaataatattgaagaattaaatgatgagtttatttctgcagagtataagagtgcattaattagcgatataaatacatatattgagtcagaatatcaaaatttatgttttgataactctgtaagggcacttaaaaaggtagaaaatttatcgaaatttttcttttgggggccattgcgtctagctaatgggctacgacacggatggaagtttgaaacatttttatctattcgtgaagaacctatggagaaagaatttgacattatgtataaaacctattcacatcctaaaaatatatgtcaatcttcaaagttgttaatagggagtaatggtgtagaattaggtaataatattgtattcttcccagaaaatgtaaaatcaaatattaagtttaaaaagcaaagttgtgcggtttttttctttgataagttttacgatatatataatacgataacattaccacttattgataaaataggattggggaatttggcatctagcagtagaaatattgatagaaatgtaacttataatgctagatgtgtttgggggtatcttcatgattactatcatcatcaaggtgtattaccttttgatgaacatattcagttgaagactaattggtatgtaggtgtattggaagaaataaaagtagatgtacaaacattattagctctttcgatggatgttactttgccatatcggaatattgtttttgagtttgtattgcttgatagaattttcagatatacacaagaggttaatatatataggaatttcgattcagctacatcattttttattatacaatatttgttgaatcatgatgtgattttaattaagaatggtaaattagaaattaatttatctaagatgattgagaaattaaaagttttggtataagagattgaagagatagaaggtcaatttactaatgatgaagatacttttaagtgtcaatgtaaaaaatactttttcaagactttagaggcacctaaaactcctaatgattattatgctatatcaggccaattagctttaaatttagtacaagttgggattttatagttataacttatattgtgaacagataccgtatgcaagtataaaaaaataacgtaattatgcttgcatatatacttgcaaacatatataaatgctggtgaacctagataaatactgactttggctacacacttctaagccgtgggtcgggggttcgaatccctcctggatcaccaaagaaataagcggatagctcgtaatgagctatccgcttttgcattgctattttaaattagaacaggcctgtactaatttgaagggtcctatgtataggtcttgttagaaatagaacaggcgtgtactaatttgaagggtcctatgtataggtcttgttagaaatagaacaggcgtgtactaatttgtaggcccctatatatgtaccttgttagaaatagaacaggcgtgtactaatttgtaggcccctatgtatgtgctttgttaggaatagaacaggcgtgttctaatttatagaaccctatgtatccctgtcgaattattagtttgcatcaatctctacggtatcgataatcagattttaccgctctaattgttggtacttcaaataagaacggattttatttttcgtatgagctctataaattggaggcttttttaatctgtgttataataatcatgaatataagatgaacttgcattgtaaggtgattaaaacaggtttgggtgataataatgaatgacatatcacgtatatttaaatcaataaggctcgataaatacaagcaagatactacttgtttatatgatcctattcgacatttattagttcaaaaaacaccggaagaagaggttcgtcaaaaaacaattaagtttttacaagatgaattaggtgtgccagttgatagggtacttgttgaagaatcaatgagtcatgtaaaaaaaggtgctagaggtagagctgatattgtcgtgtatcgagatgataaacgaaaagatgcgcttatggttgttgaatgtaaagctcctcatatagatatatattgtgatgaggtgcttgaacaagctgaacgatatagaaagatagttaaagctgattatgttatgcttattaatgggtatcaagttgcaatatatcaatctaaaaaagagaaatattttgaagtagaaaatattcctacataccaagatttattagatgataatttggcttttgttgaaaagagaatcattaatccttatacatatgaacaaataatgttaaaaggacttcaagaaaaattttatgattgtggatattttggagatgatacagcggaaaataagaaaggattttatctcaatcttttaaatttaatattattgaaggaagatactaataaatttattcttgagaaaattggtgttgttaaggattgctttagaggtatgactaagtttggtaacagtggtggaggctcatatcaagtatggtcaagattatttattgcgaaggattataagcggagagatcaagtacttggaattagtatatgtggaacagcccatacagaaaatgatgaacattggggaactcgattaggtaatacacaattaaatgtatctataaccaataaagaaaatagacaccattccttacaacttaatttagataagttctctaattataattctcaagctaataagattgtgattactcataacggtgctttatcatatggtaggggaggctctgtaaaacaggatattgttcgtgcctatatacgaaaaaaagctcctgaattagtttgtggtaattgcatatatcttggcgaacttgataattctcaattgttagaatggcatcaagaatccgtacaatcatttgtgaaaaatctattaaaatatgctatattacgagatgaaatacgtgctcagtataaaaaataaaatttagtattatttatagaatagtgaaaatattgaaaaaggatgatagtgaaatgtgctaaaaattgccattttaccatcatcctttttatttgtatcaattttgtcccataaccctatatatgtgccttgttagaaatagaacaggcgtgtactaatttgtaggcccctatgtatgtgccttgttagaaatagaacaggcgtgtactaatttgtaggcccctatgtatgtgccttgttagaaatagaacaggcgtgtactaatttgtaggcccctatgtatgtgccttgttagaaatagaacaggcgtgtactaatttgtaggcccctatatagtcctttgttagaaatagaacaggcgtgttctaattctaaggaccctatgtatgagccttgttatgaatagaacagcctgtactaatttgtagaaccctatattaccagtcaaatcattagcttgcatctatctttacggtattttctctcaaccattgtgctagttctgtatttgtcatattacctgcggcgacattgataatcatattttcgacgtctagttgtgtagcagtaatatcgaatccattgataattagatacacatacatgctatgcaatgctgttcgtttgtttccatctgtgaatgggtggttgttggcgatgccgtaacataattgtgctgctttatcgtagagggatgggtatagatcatttcccataaaggtttggaagggcgtattgacggctgacgctaataggttttcatcgcgtacacctgatgaaagtataaatgcattttctaattgtttatggagctcatagatgtcttgtatggtgaattgtatgttaggtgtgctcatttattctccaatgctttatatagtttgtaattacgttctaatacttgtagcgaaatgtcttttatccgcttttttaattctttattagtatcactagtcatgatgggggactcttgggttgtttggagattgccgattttcggatctttcagtgtcatagatcaaactcctttactatatatttgactttttatttcttatatattgacttttatatttattatataggtaataaatcaatataaacaatagagttcctaataaaacaatcagaaatctaaaataggaaacctcttgtgaatccagtatttatctacattttcatcaacaaaagtatatttgtcaaaataaaagtcaagaaaagtcaaaaatttatactttgacctattgactttttgacttaataagattattataatgacataaggttaaagaaacctagaaataaagcaagaaattaaagagacttaaaaggtcaaacagatatacttgtagtgaaaaagtgaggtaatttatatgaacaacaatttcaataactttggtagcgaatttggtagcatgaatgatttgtttaatcaattgatgagtaatatgggcggttattccacagaaaaccgtcgttataaaattaatggtcgtgaagtaactcctgaagagtttgcttattatcgtcaaacaggtcatttgcctactaatgaagaaatccaagcagcacaagctgcagctcaacaaggcaaaatgaaaaaggatggtatccttgctcgtttaggtacgaacttaacagacgaagctcgtaatggtaagcttgatcctgttattggccgtaataaagaaattcaagaaactgctgaaatcttagcacgtcgtacaaaaaacaatccagttctagtcggcgatgctggtgttggtaaaacagctgttgtagaaggcttggcacaagcaatcgtaaatggcgatgttccagcagctattaaaaataaagaaatcatttctatcgatatttccggtttggaagctggtactcaatatcgtggttcctttgaagaaaatatccaaaatcttatcaaagaggttaaggccgctggtaatatcatcttgttcttcgacgaaatccatcaaatcttgggcgctggttccacaggtgatggtcaaggctctaaaggcttagcagatatcttgaaacctgctttgtcccgtggtgaaatgactgttatcggtgctactacacaagatgaataccgtaacacaatcatgaaaaacgcagcacttgcgcgtcgtttcaatgaagtaaaagtcaatgccccatctgcagaagatactttcaaaattttacaaggcattcgtccattgtatgaagcgcatcataacattgaattgccagatgccgttttgaaagccgctgtagattattccgtacaatacattcctcaacgtagcttgccagataaagccatcgatttgatcgatgtaacagcagctcacttggcatctcaacatcctgtaactgatattaaaacattagaagcagatattgcagatgctaaggcaaaacaagaagagtttgctcaaaaagaagattacgaatctgctattaacgaaaagatgcgtattcaaaaattacaagaagaaatcgacaaacatactgataatcaaaaggttgtggctaaggttaacgatgtagcggaagcggtagaacgtatgactggtatcccagtttctcaaatgggtgcatccgatattgaacgtttgaaagatatgaaatctcgtttacaagctcatgtcatcggtcaagataaagcagtagaagctgtttctaaagctattcgtcgtaaccgtgcaggatttgacgaaggtaaccgtccaatcggtagcttcttattcgtaggtcctactggtgttggtaaaacagaattggctaaacaattagcacttgatatgttcggtaacaaagatgctatcatccgcttggatatgtccgaatacagtgaccgcacagcggtttctaaattgattggtgctacagctggttacgttggttacgaagataactccaacacattgactgaacgcgttcgtcgtaatccatactccatcgtattgttcgacgaaatcgaaaaagcagaccctcaagttattacattacttcttcaagtattggatgatggtcgcttaacagatggtcaaggtaacacagtaaacttcaagaatactgttatcattgctacatccaatgcaggtttcggttatggcagcgacaatgatgatgaaaacaaagtcgatgtaatggaccgcattgctccattcttccgtcctgaattcttgaaccgtttcaatgctgttatcgaattcaatcaattgagcaaagaagatttgaagaaaatcgttgatttgatgctcgaccaagttaacaaaactttggctaaaaaacaaattaccttagatgtaactgacgcagctaaagatttgttgatggaacaaggttatgacaaaacaatgggcgctcgtccattacgtcgtgttattgaatctgaaattcgtgataatgtaactgattactacttggatcacatcgatgcaaaacacttgcttgctgatgttgtagatggtcacatcgtaatcagcgacaaggatggtgctaacacatccgatgctaaatccgatgatgacaaatctgcagaccacagcaaacaagctgatgatgctgcatccaaggacaataaataatcggtaggctattgaccctttcattgaatcccttacaactctctccatatacacacatataacaatagtcctattgattgtgaaagcactcgacattacgtcgagtgcttttttgcgttattatatgaattttgtatacatgacaaaaatcattgataacgtatcaatatattttgtataatcatgttactatattctatagaattaaaagaaaagatgaagaatataaggggaattagaatataagggaaattagaatataaggaaaaccaagcatataagaaaaattaagaacgagaggagcatagtgatgtcacattatatagatttaaatagcgatttaggtgaaagctttggcaattatacattgggcatggatagtgaggtgttaaatcatgtcactagtgccaatgtggcttgtggttggcatgccggtgatcctctcatcatggaggccactgttaagatgtgcaaggagaagggcgtagccgtaggggctcatccgggatatcctgatttaatgggatttgggcgccgcaagatggcggtgagtcctgatgaggcacgggcatatatgatctaccaactcggtgcgttgcaaggattttgcaatcagtacgatgtagagttgcagcacatgaaattacatggtgctttttataacatggcgtgtgtaacgccggaattagctgatgcggtattagatggtttacaagcggtgaatcccaatgttcgagcgatggtgctcagcggtagttatatagctaaagaggcagagcgacgaggtattccagtgatacaagaggtctttgcagaccgaggctatacagaggaaggcaccttggtaccccgtacggaagagggggctttcataaaagacccacaagaggcattggaacgggtgctcatgatggtgcaagaaggcaaggtcgtaacgaatacaggcaaaacaatcgatattgtggccgattccgtatgcgttcatggcgataatcccaaagcgatagctttcacaaagtatattcgtgaaggcctcactaaggcaggtgtcgtggtagcgaattttcagaatcgatagattacagtcgattgtataagaatagatagaatcagaatagataaaaggagtcaatatgaaaccgattacaggtaaagcaagtttatctgtcctcttaggggcagcatttttgatggccacgtcgtccattgggccaggatttatgttacaaacggcggcgtttacaggccagttacaggcggattttgcgttcgccattgtggtgtccgttattttctccatcattgcacagctcaatgtatggaccatcatcggcatatcccaaatgcggggccaagatattgcgaataaggtcttgccaggccttggttacttcgtagcgttcttgatttctcttggaggccttgcgtttaacatcggcaatattggtggtgcgtctatgggccttaacatcgtattcggtatcgatacgacgacggcagcagccatcagtggtatcttgggtattctattatttgcatcccctaaaatgggtggcgttctcgataatacggcgaaagtgttgggtacagtgatgctcgtactcatcggttatgtagcgttttctactaatcctcctgtagcagaggccgcaacccatgccattgtgccaaccaattacccttggctagctacgattacccttatcggcggtaccgtaggtgggtacattacattctccggcggccatcggttgattgatgcaggcattacaggtcgtgaacatttaaaagatgtgcgtcgcgctgccttcatgggcatgtccgtagacgccattgttcgtatattgttattcttagccgtactcggcgtagtatccatgggctttgcgttagatccaaaggacccagcaggttctgcgttcttacttggtgctggtgaaatcggtcataaattattcggtatcgtattcttctgtgcagcgttgacatctgttgtgggtgctgcctatacatcggtatccttccttaaaaccttgttcaaagtggtagaacggtatgaaaaattgaccatcatggcattcatcttcgtttccacatgcattcttatctttatcggtaaaccagctacgctgttaatcgtggcgggttctgtgaatggtttgatcttgcctgttaccttagctgtaatgctattggcaacgcgtaagacgaatatcgtaggggactataagcacaatccaattctattctataccggctggatcgtcgtgcttgtgaccgcctatatcggcgttacatccttgcaaggtattgcaaaattattaggttagggggcatgtatgaatcccacaatttcaccgattggggatagtgctatctccatcgaatttggtcaagttattgaccctaagattaatcagcgtatccgtcagactgtggcgggtattgaaagcctccatttagaggggattattgagatggtgcctacctattgtgcgcttctcattcagtatgatgcattgcgctacacctatgctgaactgtgccacattcttgaacctatctgtacgcagcctattcaatctgatgaaagtgaactcgtgacggtcgttgagataccgaccgtctatggtggtgaatttggtccagaccttggatttgtagcctctcataatcaccttacagagtccgacgtggtgagcattcatagcggcacggattacctcgtgtacatgatgggctttatccctggttttacctatttaggtggcatggatccgcgcatcgctacgccgcgattgtcttcgccgcgtacacatattccggcagggtccgtaggcatcgcgggtgagcagaccggcacctatccatcggattcccctggaggatggcagattataggacgcacgcctctgtccatgtacgatgcatcccgtgaagaggcggcccttcttaaggcgggcgactatgtgcgctatgttcctattgatgaaagtgcgttccactgtattaagaaattgggctcttcttttaagcccgttgtgcatcatgtaaaggtaggtgaccttcgtggcggtaagtgaatataagaatacgtcatttgaggtggttgcgcctggtatgatgaccaccgtccaagacggagggcgcgtaggctttcaacaatatggtatgcccgtggccggtcctatggatggtgaaagctatgctatcggacaagcccttgtaggaaatacgacacccgtaggtgctttggagtgtaccgtactcagccctacgctcaaggtgaaaggtacgtgtattgttgctttcacaggtgccgacatgagacctaccattaataatgtagaggtgccgcggtacattccttttgtatgtcataacggcgatgtcatctctggcagctttagccaatgtggggtgcgcatgtatatttccttcgccggaggtattgatgtgcccgaaatcaacggtagcgtgtcgacacatacaaaggcgaatatcggcggatttgagggacgtcccttagtggagggcgacgaagtgcgtttaaaggactgcatgcgtgatactatcatctgcgactatactagagaatcaaatcatttatttaatacggttctatttaatcggggcggccgtgaatgccatgaaccgctgcgcgttgtactgggctcgcaagcaaagcactttacagaaacaggtatccgtaattttagcagtgaactctatacattgaccatccaatgcgaccgcatgggatttagattagatggagcccctgttgaacacatcgacggcgccgatatcatctcggatggcgctgtgtttggatccattcaagtcccatctgatggcaatccaattatactcatggcggatcggcaaacgacggggggctatactaaaatcggtaccgttattacggcggatttgcctagacttagccagttgcctattggggatggaattacctttgatattgtatctgtggaagaggcacaagagatgtatagggtatatatgcaaaatttgcatagcaaaatcaacttggcttccgcacaaagtacatttgtattctctctgaaaacaacaatataatacgtaaaaaacgactgatttataagtttacacataattttgtatgtatatgtattttatgaaagccactccttgtagtaaggagtggctttttcgtgtataaagtataaatcaacattaaataatttatcgtattacttaaaaatatatcgacatattttcttaaataaaaatcttctataaaaaatgagaataaaatgaacagatttggtatagattaagttgtgtgaaatcaataacggattgataatgagaatagcagaaacgctacatatgatgaaaatacatacgaaatgaattaaaatacataaagaatttatatagaacatagtaaatacaagaaaaaataaaaatagacaaaattcgaaataagaattaaatattcttaatccgtataatttacaattgagaaatatgagggaagtatgatagaataatgaaatcaaatccatagttttttagaagttaatggattttattgctctacaaagagctaaacttcattatgtttttgaaaatatatttcatgtagttgagaggttagttagtgaaaaggaagcgaaaatgaataaaatctttaaagttatttggtctaagtcgaaacaatgctatgttgtagtatctgaattggctaagaatacaacaggaaaaaagaaaattattgtggctagtattttagcggcaatggttgctgggcaagcgatgcaggttgaggctgcatatgggaaaatttcgcctagtaatggtacaggatctttagcgatttctggtgctggtggtagtcctgctactgcatctacagatgatgctattgcggttggtcaagatgcgtctgctacaggtcgaggtggtattgcggttggtagagagtctaactctgttcataatgctctttcacttgggtggatagcttctgcaaaaaatacaggcgccattgctattggctctgctcttgaagagcctggtgttcctggagaaaaagaggtggtgtcagaaggtttttattccattgcaattggtggagcatcacaatcttctggtagtacttcaatcgctttaggtgtcaagtcttctgcaactaaagaaagtgctactgctattggtaagagttctaatgcatcgggaattggtgcttttgctgctggtttacaaactaatgcttcaggtgctggatctattgctattggtggtgctacttctgatactgcatctaatggtgcaacggcctctggggctgcatctattgctatgggctataaatcgaaggcaagttcccaaaatgctgtttcaattggtagtgaatctaaggcgcaagaattaaatgctattgcaattggtactaatacgaatgtaacaaagcaaaatgcgacagccgtaggttctggtgcatctgttacaggtcataatgctactgctgtagggaatgaaacaactgctatagagcaatatgataatgcttttggttataaaagtactgctaagggtggtgcttctactgcattaggttattatgcaacatcttctggcaataattctgttgcattaggttctcaagtcaatacaactggtattgctgctacggggattggttatactgtgacatcttctggtaatcggtccgtagcattaggtgcatcaattacttcaaatggtgattatgctacaggtattggttatagcgtaaactctaacggtgagggtgctattgctattggtgcaggaactgatacgttgggtgctatcccagctaagcaagtagaagcaactatgaagaatgctattgcgattggtcgtgcaacgagtgctaccggtgaaagtgcaacagcaattggtactgaagcaactgcatctacttctgatgccattgcggtaggtagaaaatctaatgcttctggtggtacatcaataagttttggttataatacaaaagcaacaagtacaaattctgttgctattggtacggatgtatctgctacagctgaaagtgcgattgctctcggtcgtaagacaacggctagtgatttaaatgcaactgcagttggtccattagccaatgcttccggaaattctgcatctgcttttggtatgagtgctactgcgtctaaagcagagtcgttagcgttaggtacgagtgcttatgcatctttagataagtctgtagcacttggtagtaattctacaactgctacaaatgcaacaagccagggttctgttattattggtggtaaaacaataagttggaatggtgcaccaacagtgacaggtacaggcatgcaagtttccgttggctctgctggtgctgaacgtcaaattaagaacgtagcagcaggtgaggtatctgccaatagtactgatgcaattaatgggtctcaactatatgcagttgctgaaggccttcgtacaaaatatgtatctattaattctaccgtagctaataaccaaaataatgatggggcaactggtagtaattccatggcgattggtcctaatgcgtctgcaacaaaagctgattccgttgccgtgggcattaacgcacaagtaactggctctaacagtgtagctattggtaatactgctttagctaaacaagactataatgtagctatgggtagtgaagtaactgcggatggaaataatagtgtggctatgggccgaatggcatcctctacaggcatggcatctttggctattggtacatatggttataataattcgacagcaagtggtaaatatagtattgctattggtcgtgatgtcacttctagtgcagaagatgcgattgcaatggggcgtaactctcaagctacagcaaattacgcgttagcactaggtgcagaagctaacgcatcccaagcatctggcgttgcacttggttatgcttctacagcagatacagctgcgggtgttgctggatataatgctaatacaggacgcagtgatacatatactgccttaagtggaaacgtattaacaagtactttaggggcagtttctgtaggcaactctactaatacccgtcaaattactggtgttgcagctggtaaggccgatactgatgccgttaacgtagcacaattgaagagtgttaatttagctttcacaggtaactctggtagtggagacgttaatttatctaagagtaaattagctgttgaaggtggtactgattcctttgttactactacggcggctaataagaaattagagattaatacaacacaaggtaagttgaaaactacgtctggtacggtatctgttgatggtaataatggtttagcagttgctcagaatgtagcagatgttattaatcaagccaatgcagatcgaactattacatataaagctaatggtacaggaagtaattctgttaaactttctgatggtttaaactttacaaatggtactactactacggcaacagtaggtacaaatggtcaagtatcctttgatcttaatacgacaacacagaaatcgattactgattctgctactgctgtagcccgtacgatttctctaggcggtgatactggtactacaacagctaaatcattaacgtctggtaatgttaattttggtattaaaagtggtagctctacatatcttacaacgactgcaaatggtaatgatgtgaccttgactgtcaatgagcaggctattaaggatgctgctaaggatgcatcatctttcaaggtgaaagctaatactaataccgcagaagatgttaaaggtggcgatacagttgctttcaacgatggtgataatattgctattacccaaactggtaagacctttaaaattgctacggctaaaaatgtaacatttgatgcggcaactattggtggtaatacaactatcggatctacagggattacaactaataaggtgactgtgggcactatttctatcgatggaactaatggtattaatgcaggtaataaagcgattactaatgtaggcactggtcgcgtggctaatagcaatgctgacgataccaatgttgcgaacattggtgatgttaaggcaatcgctactgatgctgtagctaatttgtccacaaatcttagtattacagatggtacgactagtggtactgttaacttaaagaaccaaagtttaaaagttgttggcacaggtgctgccaaagcaactgtcagcggtcaaacaattacggttgatgtagcaaaaggtacgttaacagctaactcgacaactggggccttaacaggtactactggtgtggttgatgctaacgatatggcttcggctgttaatacagcgattactaaagcggtagataatgctactggtacgcaagcattgaatttgacagacggcactcatacgggaaccgtaaaacttagcacccaaacattaagtgtaagtggtactaatggtgttcaagctactgtaggtggtcaaggtattaccattggcttggatacagctactaaaaatcttattactaattcctctacagcagtagataacttaggtaaaaatacattcacattaaaagcggattctacagatacaacagctcaagaccttaataaatctggtggtttagcatttaaagtagcaggtgatggtaactttacttctacgtctgctgctggtgatacagtaactgtttctgttaaacaaggtgtctttggtagtaatgcagatggtacagccaaatctactactaatggtgtagcaacaactgacaaggtagccgatatcgttaatacaactgtttcaaatgctgtaaacaatgttacaagtaaccaaaaccttaaaattggtggtgacactactgcagctaactcagcagtaaaccttaaaaatgatacattatctgtaaaaggtgataataaatatatttcaacagcagcatctggcaatgacattaccttaacggttaatgaacaagccatcaaggatgcagctaaagatgcatcatctttcaaggtaaaagctaattctactgctgcagaagatgttaaaggtggcgatacagttgctttcaacgatggtgataatattgcgattacccaaactggtaagacatttaaaattgctacggctaaaaatgtaacatttgatgctgcaactattggtggtaatacaactatcggatctacaggtgttacaactaataaagtaacagtaggtggtatctctattgatggtactaatggtatcaatgcaggtagtaagcaaattactaatgtcgcaagcggtggtactacagctacaaatgctgcgaatattggagatgtggatactaaggttacaactgccattaatgatttgaccactaacttgactaaaaatacaactattgcttacacagcaaacacagctactccaggtcaaactgtatcattaaaagatggctttaacttctctaatggtacattaacaactgcagaagtagcagctaatggtgttgtgaagtttaatgtaacgcaaggttctttgtctactgatggtaatggtaatatcacaaacacagcaggtgtagctacaacagatgatgtaaaaaatgctgttaataccgcaattaacaaagcagttactaactcttctacagcggttaatactctaggggcgaatactttcacattaaaagcagattctacagatacaacggctcaaaatcttaataagtctggtggtctagcatttaaagtagcaggtgatggcaactttattactacgtctgctgctactgatacggtaactgtgtctatcaaacaaggtgcatttggtagtaatgcagatggtacagccaaatctactactaatggtgtggcaacaactgataaggtagccgatattgttaatacaactgtttcaaatgctgtaaacaatgttacaagtaaccaaaaccttaaaattggtggtgacactactgcagctaactcagcagtaaaccttaaaaatgatacattatctgtaaaaggtgataataaatatatttcaacagcagcatctggcaatgacattaccttaacggttaatgaacaagccatcaaggatgcagctaaagatgcatcatctttcaaggtaaaagctaattctactgctgcagaagatgttaaaggtggcgatacagttgctttcaacgatggtgataatattgcgattacccaaactggtaagacatttaaaattgctacggctaaaaatgtaacatttgatgctgcaactattggtggtaatacaactatcggatctacagggattacaactaataaggtgactgtaggcactgtttctatagatggaactaacggcattaacgcaggtaataaggccattactaatgtaggcacaggtattgtggctaatagcaatgcagataatagcaatgttgctaacattggtgatgttaagactatcgctactgatgctgtagctaatttgtctaccaatcttggtgttacagatggcacgaataatggtactgttaacttaaagactgaaaaattaaaagttgttggcacaggtgctgccaaagcaactgttagcggtcaaacaattacggttgatgtagcaaaaggtacgttaacagctaactcggcaactggggccttaacaggtactgctggtgtggttgatgctaacgatatggcttcggctgttaatacagcgattactaaagcggtagataatgctactggtacgcaagcattgaatttgacagacggcactcatacgggaaccgtaaaacttagcacccaaacattaagtgtaagtggtactaatggtgttcaagctactgtaggtggtcaaggtattaccattggcttagatacagctactaaaaatcttatatctaactcctctacagcagtagataacttaggtaaaaatacattcacattaaaagcggattctacagatacaacagctcaagaccttaataagtctggtggtttagcatttaaagtagcaggtgatggtaactttacttctacgtctgctgctggtgatacagtaactgtttctgttaaacaaggtgtctttggtagtaatgcagatggtacagccaaatctactactaatggtgtggcaacaactgacaaggtggccgatatcgttaatacaactgtttcaaatgctgtaaacaatgttacaagtaaccaaaaccttaaaattggtggtgacactactgcagctaactcagcagtaaaccttaaaaatgatacattatctgtaaaaggtgataataaatatatttcaacagcagcatctggcaatgacattaccttaacggttaatgaacaagccatcaaggatgcagctaaagatgcatcatctttcaaggtaaaagctaattctactgctgcagaagatgttaaaggtggcgatacagttgctttcaacgatggtgataatattgcgattacccaaactggtaagacatttaaaattgctacggctaaaaatgtaacatttgatgctgcaactattggtggtaatacaactatcggatctactggtattacaactaataaagtgacagtaggtggtatctctattgatggtactaatggtatcaatgcaggtagtaagcaaattactaacgtcgcaagcggtggtactacagttacaaatgctgcgaatattggagatgtggatactaaggttacaactgccattaatgatttgactactaacttgactaagaacacaagtattagttacacagcaaacaacgatactccagttaaaactgtatccttgaaagatgggttcaaattcactgatggtacattaacaactgcagaagtagcagctaatggtgttgtgaagtttaatgtaacgcaaggttctttgtctactgatggcaatggtaatatcacaaatacagcaggtgtagctacaacagatgatgtaaaaaatgctgttaataccgcaattaacaaagcagttactaactcttctacagcggttaatactctaggggcgaatactttcacattaacaggtgataatagtacgtctacaacaggacaagcactcaataaaaatggtggtttatcctttaaagtagcaggtgatggcaactttattactacgtctgctgctactgatacggtaactgtgtctatcaaacaaggtacatttggtagtaatgcagatggtacagccaaatctactactaatggtgtggcaacaactgacaaggtagccgatattgttaatacaactgtttcaaatgctgtaaacaatgttacaagtaaccaaaaccttaaaattggtggtgacactactgtagctaactcagcagtaaaccttaaaaatgatacattatctgtaaaaggtgataataaatttatttcaacagcagcatctggcaatgacattaccttaacggttaatgaacaagccatcaaggatgcagctaaagatgcatcatctttcaaggtaaaagctaattctactgctgcagaagatgttaaaggtggcgatacagttgctttcaacgatggtgataatattgcgattacccaaactggtaagacatttaaaattgctacggctaaaaatgtaacatttgatgctgcaactattggtggtaatacaactatcggatctactggtattacaactaataaagtgacagtaggtggtatctctattgatggtactaatggtatcaatgcaggtagtaagcaaattactaacgtcgcaagcggtggtactacagttacaaatgctgcgaatattggagatgtggatactaaggttacaactgccattaatgatttgaccactaacttgactaaaaatacaactattgcttacacagcaaacacagctactcctggtcaaactgtatccttaaaagacggtttcaaattcactaatggcacattaacaactgcagaagtagcagctaatggtgttgtgaagtttaatgtaacgcaaggttctttgtctactgatagcaatggtaatatcacaaataccgcaggtgtagctacaacagatgatgtaaaaaatgctgttaataccgcaattaataaagcagttactaattcaagtgcagcggtcaatacactaggtacgaatactttcacattaacaggtgataatagtacgtctacaacaggacaagcactcaataaaaatggtggtttatcctttaaagtagcaggtgatggcacctttattactacgtctgctgctactgatacggtaactgtgtctatcaaacaaggtacatttggtagtaatacagatggtacagctaaatccactactaatggtgtagcgacaacaaatgatgtagccaacatcgttaatacaaccgttactaatgctgttactaaagcgacaggttctcaagtactcaatattacagatggcactaataatgactctatcaatctgaagaatgacacattgaaggttgtaggtacagatggtgttactactgcagtgagtggtaaaactattactgtaggtttagatacggctactaaggataagattaacaatgctagcgctgcaacgaataaaaatatttctcttgctgcagatacaggcactgtatctagccaatccttaaaagatggtgatgtatcctttgcagtgaaaggtgctactggggattacatctctaccaacatgaatggtagtactgtggagatttctacaaaacgtgcaaccatcaatagtaatgccgctacaggtgaagcttccgtaactggaaatgatggccttgtaactgcaaaaaatgtagctgacgctattaatgcggcgactgcaaaagcagtatctcaatctgcatggaaacttgctgcagatggtacgaccggtacagaaacgatttccggtggtgacactgttaacttcaaagctggatccaatatggaagtatctcgtactggcaaggatattacctataagacaaaagacaatgttgctttcacaacggtaacagctggtacaggcgctaatgaggttaaattagacggcaatactggcacggtaactgctaaggatatcactgctacgggcgatgtaactgctaaaaatgtaactacatctggtaatgtgactgcagcaggtactgtgaaaggtgacactgttcaaggtaatactgtgaaagctggtaatgtaacaattacaggtggtacaacaaataccattacaggtctatccaatacaacatggactccagcaggtggtattcaagctgatcgtgcagctactgaaggtcaattgcaacaagcaattaatcaagtaaatgctacggttggtagtacagcattaactttcaaaggggatacgaatcctgcacaatctatgacattgcaaggtaatacatttgctatcactggtgatacgatgattaagactacaacaaatactaatggtattggtttatctcttgatacatcaaaagttaatattgcctatgctgcgaatggtttgaatggtcaaacaacgagcattgcaagtggatttaatttcactgatggtgatcatacaaaagcaactgtagattcgaatggcgtagtgaaatacaatgctaaaacatcgactatttccgttgcaaatggtcatgctgcggctagtggcaatgatctcgcaactgcagataatgtggctgatgcgattaatcaaatgacccaaaacaatgcggggaatacaacgcaacttcgtcaagaaattagcaaggttgctaccgaaacgcaacgtgtaggtgctcatgcggctgcgatggcggcgttgaaaccaattcaatacgatccattggctccaacacaaatcatggctggcgtaggtaactatcgtggtgaaagcgcagcagctttaggtattgcacactatacaaatgacaatactatgtttaacgtaggcgtgtctgttggtggcaaccataatatgattaatgcgggcgtaactcacaaatttggcataagtgctgaaaagaaaaatattcctgatcgttataaagcgggccctattagctccatttatgtaatgcaagatgaaatgactcaattgcgttctgaaaatgaagcgtacaaggctaagcttgataaacaacaatctgaaatcgatgcattgaaagcagccgttgatcaattgcttgcttctaaagcatagttttaggtgcatacacaatttatatatttgtatatcttcatgtatgaatatgtatatggtgaaagccaccactcgttatgagtggtggcttttttgtgttcgaatttatctatctcattaaaagattatcttaaatataaaataaattagaaaatatactttgaaaataaaatattacatcgattgataaatacgagatgaaaaatacgcatattaaaaataaatagaaatattttatggaaagtcggttaacaattaggttgcataataattcataaatatttatccaaaaagataaaaatatacatagacaaaaataaaagaaatagattaaatctatattcttttggttttcgagaatatttgatttgcaattaaatattcgtataatgcattgaatttcattgtttgatatagataaaatatgataaaattatgaaatgagctttaaaatgtaatgggtatattttgaggcataacgaaatacaaatactagagattgatttatataagatatggttttgagagatagttagtaaaaggaaaacgaatgaacaagatttttaaagtaatttggtctaagtcaaaacagtgctacattgtagtatctgaaattgcgaagaacaaaacaggtaaaaagaaaatcgtagtggctgggatatttgcggcattggcgatggttaatggtggatattcaaccgttaccgctgccctaccgggtggcgttacaggccaaaatggtatgtggattggtaatggcgctactgtagatgggactgtaaaaggacaaaattctatagctataggtcgaaatgcgaattcaaaaacagcaaaatcaatagcaattggttctgattctgtagctgagggtgtatataagaactcatcagattataccggggctacagctgttggtgcgcatacaaatgctagtggtgcaggtgcaacagcacttggcgtatcaacttctgtaaaaggagactacagcataggtgtcggttggaatgttaacgtatctgaagccaattcaattgctataggtgtgcaatcaagatctgctaaggctgctgcgacagcaatgggaccatccgctagaggttatggtgagggctctttatctttaggctatcaagctcttgcaggggctgatgtttatggttctagtatcaatgttaataatgatcctagtagggataataatagcactattaatagttatgctaagtggggggacacggctattggcttgcgtgccgtagcaactggtggtaatgcaacagcacttggtcgtagtgcgagagctgcagcagcaaacgcaattgctattggtggtgggaatggtaattctgctactgataatactgataaaacagaggctacaggtgagaaagccactgcaattgggtataatgcaaaggctgtaactggtaatgatacagctataggtgcaggtgtaactgcaagtggtggtgcatccactatgattgggtatagctctactgttactggtaatcaggctttcggtggcggctctggcttatctgttgcaggtggtggatctgtgggcttaggctataatagttcaacaacgagtgataaatcaattgctatcggtcatacaactaaggcgacccaagcgaatactgtagcaataggcgcatcagcaactgcagctggacttaactctattgcgatgggtaatagtgctagtataactgcacctactgcagggacaactcttggtggacaggattctattgctattggttctagtgcatcagcacaacagcactcctccatctcagttggttttggcgcttcctctaatggtgtacgttctgttgctattggtccaaaagcttctgctacagatgaagatacaattgctattggttcgggcggtgttaacgcagataaaaataaccaagctactggtgccaatggtggttcttataactctactgtagctggtctttctgtaactaatctatattatggtgcaaaaagcgttgataaacagtctatagctattggctatactgcgaatgctaaagaatcaggtatagcctttggtaacaatgcagtatctgatggcggtggtggaactgccatgggtaaatctgtattaagtcgtaatggtggtttagttgtaggtcagtctagttatgcaactggtaaaaactccgtagcgtatggtaatactgcaaaagctagtggtgaaaattcaactgcaataggctattatacgactgcagaaggtcaaaatgcagtggcggttggctatagtgattctgctgcaggcaagaattctatatccattggtagtactaatcaagctacgaaggaaggttctatagctattggcagaggtaataacgcaaatgaaaacaatacagttgttattggtagagactctactgcttctggcaacttagcggttgcaatgggggcgagtgctactagtaaaggtgttaacgcagtagctattggtaatgatgtaacagccgaaggtgataatagtgtatccttaggccgtagtgcaatatctaagaacgcctcatccttagcaataggcacatatggaactaagggaacagctgcaactggagcttacagtattgcaatggggcgagatgtgactgcttctgctgaaagtgcaattgctatcggtaaagatgccgtttctgataagaagaatgcagtagctattggtagtggtgcagatacatcttctgctgcgactgcacaatcttctgcgactatagcgggtaaatcatattcttggtctaaaggtgtactttcaggagcagacctagcaggtatgcaagtgtctgtaggcaaaagtggggctgaacgacaaataaaaaatgttgcggctggtgaagtatccgcgaacagtacagatgcaatcaatggatcccaattatatgcagtggcgagtggtttggcaaaggatcttaaagttccttatgtatctattaaatcaggtacaacaggtgctggtagtaatgtaaataatgatggtgccacaggtccaaactctatagccattggtccttctagtgctgttacaaatcaaaatggcgttgcttttggtaataatgctcaatctttaagtgatgatagtattgttatcggtagaaatgcaaaagctgaatctggtttaggattcactactacaagtagagctattgcaattggtgcgaattctaaagttgctacaaatgtaacacaaggtattgctattggtagtggtagtcttgctgatgaaggtgccgttgttacaggtgaccaatccattgctattggtggtaatgtaaaggttgctggtcatgcggctatagctatcggtggtgatgatggtctaaaagcaggtagtgttcaagtaacgtatacaaatgcaaataatcaacaagttaagggaagcttacaatctgcaattctaggtctaacaggatatgatataagcaaatataaggggacaaccgcatctcatgctggtgtggcctatggtacaagtgcacgtgcaggtaatgctggtgttgcccttggtactgcatctgatagcatgacccgtaaagatgaaaatggaaatatcatttatcaaaaagatgcatcgggtaaagagattattgatcctgtaacaaaagataaagttgaagaagttgtaacaaatgcagtagctataggtacaggtgcacgtgctaattttgataactctgtagccatcggtggtggttctaatacagaccattatgcaaccaaacagacacaggccatcattgatggtgttgaagttaaatgggccggtggtgacaatattgctccaggtgacgtagtatcctttggtgcgaaaggttttgaacgacaacttaaaaatgtggcaccaggtgaagtgtccgcaacaagcacagatgcagttaatggttctcaaatctactcattagcacgtaaagttaccaacattatgaacggtggttctggctcagttgtgaatgtgaattccttaggtcaaccactttcaaaggttgtaactactgaaaatggtaataaggttgaaaaatattatcggacaagtgatatcagagaggatggaactgttccaacaggtacttcagaacagacaccaacatccttagctctagttaatgtttctgagccgaatgcaaatttacgaacaacaaaacctcgtattcttggtaacgtagctaatggtgtaaatgataatgatgctgttaatgtatcacaattaaaagcggcgacagtaaaatatttttctgtaaactctacagttggtgacaatagaaataatgataaggctaccggtacaaatgctattgctgttggaccagctgcacaagctgctggaaataatactgtatccgttggttatgctgctggatatcaagctgatggtaaaaataatgttggtatcgggacagatgctggccgcaaacttagtggtgataataatatcagtattggtagtagttctggaaataactctgttgataataatccaaataaaagaactacttatacaaataactctgttatgcttggtaatgaggctaaagttatagatagtagtgctcaaaatagcatagataatgttgtagttatcggtaaccgtgcaacaagtagtggaacatcaagcgttgtacttggtacttcagcaagtggtacagataaaaatacaattgcaataggtaattcatcgaaagctactagtattagtgcggttgcattaggtaatactgctaatgcaactggattaaatgcaatggcattaggtttaaatacaaatgctagtgatgaaaattctgtagcaataggaaatactgctaatgcatctgctaaaaatacattggctatggggacaaatacaaaggcattgtctgaggccgctatagcattaggaactaatgccgaatcaagtggatttggttctattgcgattggtgaaaagagtaaggctcaaccaactactgctacatctccagcaggaagtgttgctataggttatagaactgaatctactggtgattttgctgttgctttgggcagtggcaatggctcttataagggtgcttctgctaatggagttgggactgtagcggttggtacagcgactgttaccgcaagtggtcgtaattttcaaactgttgtaggttttggggcgagaaccaataatgaggatgcagctgcatttggtcatgaagcgaaggcttactctgagaagtctcttgcattaggttcaggaagttcagctactgttaccggtggtgttgcattaggtagtggatctgttgcagatactgataaaaataaaaaaggctttgatcaaataactggtcgtactgatacctatgctggattaaaggatgaggcttttacgtctactgctggtgctatatctgtggggaatgtagcgaataaagtaactcgtcaaattacaggtgtagcggcaggtataaatgatacagatgcggtaaacgtagcacaactaaaaagtgtcaatttagcttttacaggaaataccggtaatggtggtgatgttaatctttcacaaagtaaattagcattaaatggtgataatcaatacattacgacaaaagctgatggtaagaccttaacaatttcaggaaaaaaacaggagattactgtatctaatggtgtggcatcagcaagttcaggcatggctgatgcaagtaatgtagcacaagctatcacgcaagctgtatcggatgcaaagtataattggaaattgtctgctaatggtcaaagttcaaccgaaaccattgctaaaggtgacactgtagattttagtggcgataataataatattactgtaagtagaactggtaagaatattagtactaaattgaatgaaactattacagtggattctgttaatgctaagaaaaaagtgacagttggtactggtgcaaatcaaatcgcattagatggcacgttgggtgttgcaactgtgggtgcttccggacctaatcaaattataatgaatggttcttcagggattattcaaggaaacaagtttattggaaattcctttaaggctggaagctctttgattgataatgatgggcttactattacaaatggtccatctgtgcttgccacaggaattaatgccggaaataaacaaattacaggtgtttcgagtggcggtacaatagatactaatgcagcaaatattggtgatgtaaaaaaagcagtagcaaatgtatctcaaaacttaaacatcagcgatggcacaaataatagttctgtagctcttaaaaatcaaaagttaactgttactggtacaggtgctgcgaaagctactgttaataatcaaactattaccgttgatgtagcagagggaacgctttcaaataatgcagacggtactgtgaaagccgatgctgctggtgtagccacaactaaaaatgttgccgacgttattaataagactatctccgataatcaatatagctggaaactatctgctaatggcgaagccactactgcaactgtaggtaaaggtgataccgtcgatttcactggcgatactaatattacagttgatcgtaataataaagatatttctgttaagctaaataaaaatcttacagacatgaactctatatctcttggtaatgccagaggtgaaacaattgtcttgaatggtggcgatggtagtattaaagctggtaaagctgagtttaaagataatgttggtgctggttctactattactagtgatcagttaaagtttacgaatggtgcaactggtgctaatgagtccacaactactattgctttagacacggtatctattcaatcaggacctaatagcagtgctcttacatccaaatatctcacgttcagtgataaagatggtaataatgctgaaggcagtgcaaaagggatggcattccagaatgcagctggtaaattagtacaatttactgttgatgaaatcaaggctggtggcaataaaatccaagaggttgctgaaggtacagctgatactgatgcggttaatgttaagcaattgaaagatacaattggcggtcaatccttaacatatcgtgcaaatacatcggctgatacagatgctaaatctgttaaattatctaaaggtttagactttgtaaatggtacatccacggtagcctctgttgatgaagatggcaaagtgtcctttgatcttaatacagcaactaagactcaaatcaatacgaatactacagatattgcaacaaataaagacaatatagcaaccaatacagcagatattgctactaataaaggtaaaattgcgacaaataccactaatattgcaacaaacacggcaaatattgcccatactattgctttagctgatgataacggtacatctacgactgctaagtcattaaagaatggtaatgtatctttcaacatcaaaggggataaccagtttatctcgacagctgcatctggcaatgatgtaacattgacggttaatgaacaagcgattaaggatgctgctaagtctgcctcttctttcaaggtgaaagcgaatactcatgctgaagaagaggtaaaaggtggcgatactattgcctttaacaatggcgataacattgaaatcagccaaactggtaagactttcaccatcggaacggctaagaatataactgttgattccgtaactgcaggtaatacggttatcaatacgtctggtttaacaaatggtacaactgctattacaggcacaggtattaaaacagataaagtaactgtaggtggtatctctattgataaaactgctggtatcaatgctggtagtaaggttatttctaatgtagccagcggtacggtaaataataatgctaccgatgattctaatgcagcgaacattggcgatgtgaaacaagctgttgctaacgtgtctcaaaaccttaatattactgatggtacaaataatggcactgtgaaccttaaaaaccaaaaccttaacgtggctggtgctaatggtgtaacagcgactgttaataatcaaacgatcacagttggtttggacgcgaatactgttaatgctacaacgaaggggattggccttactgctgatactggctccactggtaataaataccttaaagacggtgatgtatcctttgcggtaactggcgatggcaatcttgtgagcacgtctgctacggcagcgggtgtgaaagttgctgttgatgcggctaaggtgaaagatttagctgtttctgctgtaacagtaagtaaggatacgaaagctgacaatccgattacggtaaccccaacagcgggtgctaattctaaagattatgccatcggtatcgatacaacaaaacttgcggctaaaacggatttaacataccgtgctaatagtgctgctgatgctaatgcgaagaaggtttctttatctaaaggtcttgattttgtagatggtggatccacagttgctactgttgataatgatggcaaagtatcctttgatcttaatacagcaactaagaatcaaatcaacacgaataccacagatattactgctaataaaggtaaaattgcgactaatacaactaatatcgcagccaatacaactgcgttagctagacatatctcccttggtgcagatactggcactgtgtccagccaatccttgagcactgctgatgtggcatttaatgtgaaaggcgcaacaggtgactttgtatctactaatatgaatggtaatacggttgagatttctacaaagcgtgctatgattaacagtaatgctacgacaggtgaagcatctgtaactggtaatgatggcttggcaactgcgcaaaatgtagctgatgctatcaacaaagcggctgatgcagcaaaagcaggtgcggcttggaatattacaacgaattccagcacaaccgataaaacggctgttaaaggcggcgatacagtagatcttgttaatggtgataatatcgagattacacaagatggtacagataaaaagaaaatcactgttgctactaagaaagatattactgttgattctgtaacagctaataataaagtaactgttggttctggtgcgaataaaattaccttggatggcactgatggttctgtaacgggtaaagctttcacagggactactttcacaggcacgtcattcacaggtacgtccttcacggcaggcaatacggttatcaatacgaatggtttaactaatggcacaacggccattacaggcactggtgtgacaacagataatgtgaccgttggtggtatttccattgataaaacggctggcatcaatgctggtaacaaggtcattagcaatgtggctagcggtggcactacattgacgaatgctgcgaatattggcgatgttcaaaatgcagtggctaacttgtctcaaaacctcaatattacggacggcacacatgacggcactgtagaccttaaaaaccaaaaacttaatgtagctggtgccaatggcgtaacggcgactgttaataatcaaacgattacagttggtttggatgctgacacagttaacgctactactaagggcattggcctcactgctgacactggttccacaggtaataaataccttaaagatggggacgtatcctttgccgtgaccggtgatggcagtcttgtgagcacaactgctacggcagcaggggtgaaagttgctgttaattccgcaactatcactgctggtaaagatggcacaattactgctcctaccactgatggcgtagcaactgctaaaaacgtagcagatgctatcaatgtagctaaaaaggcgtctaaaactgaaatcactgctaatacaggtgaagcagctaatgcaacaacaggtaatgtgacattaacatctactacggcagctgatggtcatacaatctatgatgtaaaactcaacgataaggtgacacttggttctggtgctaatgcggtaacgattgatggtacatcgggtgctattacaggtaaaacggctactattggtggcgttactgttaacggtacggctaatactattggcggcttatctaatacaacatggaatggcacagccgtatctggacgtgctgcaacagaagaccaattgaaagcagcaactggtgctacgacattgaagttcaccggtgatgtagcgactaatactggatccgtaaaccttaaggatgatacattcggtattaaaggtgatggtaaatacatctctactgacgtaaatggtaaaaatgtaaatcttacagtctctgaagcagaggttaaaaaatctgctgtcgctgctgtaacagtcagcacagatacaacagatgctaataatccattgaccgtaacacctacaactagtgcagatggtacaactaaggattacaaggtaactattgatggtactaagattgcgaataagacgaacttgtcctataaggcaaatgatggtactgcaaaacaagtttcattagccgatggtttgaacttcaagaatggtacgttaacaactgcatctatcgatgataatggcgttgtgaaatacgatgtaaatacagcatctatcactgctggtgcagatgggaccattacaggcccaactacagatggtgtagcaacagctcaaaacgtagctgatgcaatcaatgcagctaaaaaagcgtctaaaactgaaatcactgctaatacaggtgaagcagctaatgcaacaacaggtaatgtgacattaacatctactacagctgcagatggtcatactgtttatgatgtaaaactcaatgataaggtgacattaggttctggtactaatgctgtaactgttgatggtacaacgggggccattacgggtaaaacggctactattggtggcgttactgtaaatggtacggctaatactattggcggtttatctaatacaacttggaatggcacagctactactggccgagctgcaacagaagatcaattgaaagctgttgcagatgctgcatctagtcaaacttggaatattacggcagataaagcaggtacaactggtgctcaaacaggtactaagaaaaatgctactgttggtaacgatgaaactgttgaattggtagcaggggataaccttacaattaatcaagatgaacgtaagtttacttattcattgaataaggatcttgctggtttgactagcgtatccattggtactggtacaactggaactattaaacttgatggcgcaactggtaaaattactgctaaaaatgcagctattggtggcgtgactattgatggtgacaacaagcatgttaatggtttatctaatacaacttggaatggtacagctacaactggccgagctgcgacggaagatcaattgaaagcagtggctgaaacagctaaaacgactactgatgcagttaacttgaaattcactggtgatacaaatacatcccctggtgttgtaaatcttaaagatgatacatttggcatcgttggtgatggtaaatatgtatctactgatgcgaatggcaagaatttgactgtgaaagtatctgaagcagaggttaaaaaatcggctgtagctgctgtaacagtaagcacagatacaacagatgccaataatccattgactgtaacaccgacaactagtgcggatggtacaactaaggattacaaggtaactattgatggtactaagattgcgaataagacgaacttgtcctataaggcaaatgatggtactgcaaaacaagtttccttagccgatggtctaaatttcaagaatggtacgttaacaacagcctctatcgatgatgcaggcgttgtgaaatacgacgtaaatactgctgctattactgccggtgctgatggcacaattacaggtccaaccactgatggtgtagcaacagctcaaaacgtagctgatgcaatcaatgcagctaaaaaagcgtctaaaactgaaatcactgctaacactggtgaagcagctaatgcaacaacaggtaatgtgacattaacatctactacagctgctgatggtcatactatttatgatgtaaaactcaacgataaagtaacgttgggctctggtgctaatgcagtaacaatagatggtacagctggtaaagctacgattgggtcctctgtcattaatggtgtcaataacacattcactacaggtggtgctaaggccataaccttagatggtgccacaggcacaattacaggtacaactgccaatatcggtggtgttattgttaacggtacggctaatactattggcggcttatctaatacaacttggaatggcacagctactactggccgagctgcaacagaagaccaattgaaagctgttgcagatgctgcgggtagccaaacttgggaaatcacagccgataagaaagctggcacttctggtgctcaaacgggtacaaaagaaaatgctaaggttggtaaggacgataaggtgtccttaattgctggtgaaaacctaactgtagaccaagcaggtaaaaactttacatactctttgaatacggaccttgtgaagatgaactctgcaacctttgaagcaacaggcggtaaaacaactgttatcaaaggcgatagcattgttcaaactgatggtgctaatgtaaatacatctaatgctacatccaatacaattacagatggtacaaacacaagtgcaatcacagctggtaaaggacaaattggttccgttggaatcgatggtgtagtaagcaagattacgactggtggtgccaatgcagtagtgattaacggtgctgatggcacaattaagactggtacagtaacagtaactggtggtacaacaaacgatatcactggtttgtccaacactactgtgaccggtgcagactttgctacaaaaggtcgtgctgctacagaagaacaattgaaagctgccactggtgctactacattgaaattcacaggtgatgtagcggctaatactggatctgtaaatcttaaagatgatacattcggtattaaaggtgataataaatatatttctactgacgtaaacggtaaaaatgtaaatcttacagtctctgaagcagaagttaaaaaatctgctgtagctgctgtaacagtcagcacagatacaacagatactaataatccattgaccgtaacacctacaatgagtgcagatggtaccactaaggattacaaggtaactatcgatggtactaagattgcgaataagacgaacttgtcctataaagcaaatgatggtactgcaaaacaagtttcattagccgatggtttgaatttcaagaatggtacattaacaactgcatctatcgatgataatggcgttgtgaaatacgatgtaaatacagcatctatcactgctggtacagatggtacaattacaggtccaactacagatggtgtagcaacagctcaaaacgtagctgatgctatcaatgcagctaaaaaagcatctaaaactgaaattactgctaataccggtgaagcagctaatgcaacaacaggcaatgtaacgcttacatctactacagctgctgatggtcatactatttatgatgtaaaactcaacgataaagtaacgttgggctctggtgctaatgcggtaacaatagatggtacagcaggcaaggcaactattggttcttccattgtggatggtgtaaacagtacattcactacaggtggcgctaatgctgttaagttagatggtgcagccggcacaattaagactggtacagtaacagtaactggtggtacaacaaacgacatcactggcttgtctaacacaactgtaactagtgcagactttgcaacaaaaggccgtgcagctactgaagaacaattaaaagctgtaggcgaacaaacatggcaaatcacggcagataaagatgctactacatctggtgctcaaacaggtactaagaaaaatgctaaagtaggtaaagacgataaagttcaattgattgctggtgaaaaccttacagtaaaccaaaacgaacgagacttcacatactccttgaataaagatcttgtgaagatgaactctgcaacctttgaagccacaggtggtagaactactgttattaaaggcgatagcatcgttcaaactgatggcacaaaagtgaatacatctacagcaggtggtagtaccgttgcagatggtactaagtccacagaaactacagcagatggtcaagtcattaaagatggtgctaagtctaacaagtccactgtagatagtaatgttattgatgatggtaatggtaatgtaaatacatccaatgctacatctaacacaattacagatggtacaaatacaagtacagttactgctggtaaagcacaaattggtacagtaggtatcgacggtgtagcaagcaagattactacaggtggtgctaatgctgttgtgattaatggtgcagatggcacagttaagactgggacagtaacggtaattggtggtactacaaacgatattactggtttgtctaataccaccgtaaccgcagcagactttgcaacgaaaggccgtgcggctacagaagaacaattaaaagctgtaggcgaacaaacatggcaaatcactgcagataaagatgctactacatctggtgtacaaacaggtactaagaaagatgccaaggtaggtaaagacgataaagttcaattgatcgctggtgaaaacctcacagtgaaccaaaatgaacgagacttcacatactccttgaataaagatcttgtgaagatgaattctgcaacctttgaagcaacaggcggtaaaacaactgttatcaaaggcgatagcattgttcaaacagatggaacaaaagtgaatacatctactgcagcgggtaatactgtagtcgatggtgctaaatcgacagccactacagctgatgggacaactgtaactactgctaacggaaatactaattacgcagcagatggtgtacgtatcaatacaactggtaagactcctgtatcgttaacggatgccggcttagataatggcaataatgtaattaaaaatgttgccagtggtcatgtgaataatgatgctacagataatacaaatgcagctaacattgcagatgtgaaaaaagcaataactacagtgactgcaaatgccggtgaagcagctaatgcaacgacaggtaatgtaacattaacatctactacagcagcagatggtcatactatttatgatgtaaaactcaacgataaagtaacgttgggctctggtgctaatgcggtaacgattgatggtacagcaggcaaggcaactattggttcttccattgtggatggtgtaaacagtacattcactacaggtggcgctaatgctgttaagttagatggtgcagccggcacaattaagattggtacagtaacagtaactggtggtacaacaaacgacatcactggcttgtctaacacaactgtaactagtgcagactttgcaacaaaaggccgtgcagctactgaagaacaattaaaagctgtaggcgaacaaacatggcaaatcacggcagataaagatgctactacatctggtgctcaaacaggtactaagaaggatgctaaggtaggtaaaaatgacaaagttcaattgattgctggcgaaaacatgacagtaaatcaaaatgaaagagactttacatttacccttaacaaagatcttgtgaagatgaattctgcaacctttgaagcaacaggcggtaaaacaactgttattaaaggcgatagcatcgttcaaaccgatggcacaaaagtgaatacatctactgccggtggaaacactgtagcagatggtactaagtccacagaaactacagctgctggtcaagtgattaaagatggtgctaaatctaataaatccactgtagatagtaatgttatcgatgatggtactggtaatgtaaatacatccaatgcaacatctaacactgttacagatggtacaaatactacagcaacaacatctagctctgtaactgtcaaagataacgctggtaacagcacagttattacaaaagacaacattacaactggtgttggtggtaacaaaatcactcttgatggtacagctggtaaagctacagttggttcctctgttgttgatggtgtaaataacacattcactactggtggcactaatgctgttaagttagatggtgcagccggtacaattaagactggtacagtaacagtaactggtggtacaacaaacgatatcactggattgtctaatacaactgtaaactctgcagattttgcaacgaaaggccgtgcggctacagaagaacaattaaaagctgtaggcgaacaaacatggcaaattacagcagataaagatgctactacttctggtgctcaaacaggtactaagaaggatgctaaggtaggtaaagatgacaaagttcaattgattgctggcgaaaacatgacagtaaaccaaaatgaacgagactttacatttacccttaacaaagatcttgtgaagatgaactctgccacattccttggtacaggcagtaatacgacagtcattactggcaacagtattacacaaactgcgggtactcaaacgaatacatctacagcagctggcaacactgtagctgatggtactaagtccacagaaacaacagcagatggtcaagtcattaaagatggtgctaagtctaataagtccactgtagatagtaatgttatcgatgatggtactggtaatgtaaatacatccaatgctacatccaatacaattactgatggtactaatacaagtacaatcactgctggtaaagcgactattggttcttccattattgatggtgtaaataatacatttactactggtggtgcaagtcctgtaacattaaatggtgcaacaggtacaatcaccggtaagactgctaatattggtggtgttactgtagatggtacaaataaccatgtaatgggccttgcgaataaagattggactccaggtgtaacacaagctgtttctggccgtgccgcaacagaagatcaattacaaaaggtttccgatgcagttggtgctggttggaaggtcaacactggtaaggttactggttctactggtgaatctaatggtgctacatccactaaggtagcgagcggtgaagaagttcagttccaagctggtaacaacttaatcgttgatcaaaatggtaaaactgtagcgtactccttgaataaggcacttaaagatttggaatctgctacgttcaatggtacaggtactaacaaaactgttattactggtgattccattacacaaactgcaggtactcaaacgaatacatctactgcaggtggcaacactgtagcagatggtactaagtccacagaaactacagcagctggtcaagtgattaaaaatggtgctaaatctaataaatctactgtagataacaatgtaattgatgatggtactggtaatgtaaatacatccaatgctacatcaaatacgattacagatggtacaaatactacagcaacaacatccagctctgtaacggtcaaagataatgctggtaacagtacagttattacaaaagacaacattacaacaggtgttggtggtaacaaaatcactcttgatggtacagctggtaaggctacaattggcgcctctgttgtagatggtgtaaacaacacattcactacaggtggtactaacgcggtaactatgaatggtgctgcaggaacaattaaaactggtactgtaacagtaactggtggtacaacaaacgatatcactggtttgtctaacacaaccgtaaccgcagcagactttgcaacgaaaggccgtgcggctacagaagaacaattaaaagctgtaggagaacaaacatggcaaatcacggcagataaagatgctactacatctggtgctcaaacaggcactaagaaggatgctaaggtaggtaaaaatgacaaagttcaattgattgctggcgaaaacatgacagtaaaccaaaatgaacgagactttacattcactcttaacaaagatcttgtgaagatgaattctgcaacctttgaagcaacaggcggtaaaacaactgttattaaaggcgatagcattgttcaaaccgatggcacaaaagtgaatacatctactgcaggtggtaatacagttgcagatggtactaagtccacagaaactactgctgctagtcaagtgattaaagacggtgctaagactaatacatctactgttgatgaaaatacaattgtagatggtactaagtctaataaatccactgtggatggtaatactattacagatggtacaaatactacagcaacaacatctagttctgtaactgtcaaagacaatgctggtaacagcacagttatcacaaaagataacattacaactggtgtaggtgctaacaaagttacccttgatggtacagctggtaaggctacgattggttcttccgttgtggatggtgtaaacaacacattcacaactggtggcgctaatgctgttaagttagatggtgtagccggtacaatcaaaactggtactgtaacagtaactggtggtacaacaaacgatatcactggattgtccaatacaactgtaaactctgcagattttgcaacgaaaggccgtgcggctacagaagaacaattaaaagctgtaggggaacaaacatggcaaattacagcagataaagatgctactacttctggtgctcaaacaggtactaagaaggatgctaaggtaggtaaagatgacaaagttcaattgattgctggtgaaaacatgacagtaaaccaaaatgaacgagactttacattcacccttaacaaagatcttgtgaagatgaactctgcaacctttgaagccacaggaggcaaaacaactgttattaaaggcgatagtatcgttcaaactgcaggtacgcaaacaaacacatctactgcagcaggtaatactgtagctgatggtactaagtccacagaaactacagctgctggtcaagtgattaaagatggtgctaagacaaatacatctactgttgatgaaaatacaattgttgatggtactaagtctaataaatctactgtggatggtaatactattactgatggtacaaatactacagcaacaacatctagttctgtaactgtcaaagacaatgctggtaacagcacagttatcacaaaagataacattacaactggtgtaggtgctaacaaagttacccttgatggtacagctggtaaggctacgattggttcttccgttgtggatggcgtaaataacacattcattacaggcggtgctaatgctgttaagttagatggtgcagccggtacaattaagactggtacagtaacagtaactggtggtactacaaacgacatcactggtttgtctaacacaactgtaaattctgcagactttgcaacgaaaggccgtgcggctacagaagaacaattaaaagctgtaggcgaacaaacatggcaaatcacggcagataaagatgctactacttctggtgctcaaacaggtactaagaaggatgctaaggttggtaaagatgataaagttcaattgattgctggggaaaacatgacagtcaaccaaaatgaacgagactttacattcacccttaacaaagatcttgtgaagatgaattctgcaacctttgaagcaacaggcggtaaaataactgttatcaaaggcgatagcatcgttcaaactgatggtactaagactaatactgctacagcgtctggtaatactgtagcaaatggtactaagtccacagaaactacagcagatggtcaagtgattaaagacggtgctaagtccaataaatctactgtaagtagtaatgttatcgatgatggtaatggtaatgtaaatacatccaatgcaacatcgaataccattactgatggtactaatacaagtacaatcactgctggtaaagccaacattggaaacattgctgttgatggtgtgaacaataagattactatgggtactggtgcaaatcctgttacactagatggcgctaatggtcatttggatggtttaactaatacaacatgggttccaggtgtaacaaaagctactactggacgtgctgctacagaagatcaattgcaacaagtatctgatgcagtaggcgctggttggaaggtgaatactggtaccgttgctggttctagcggtgtatctaatggtgctgcttcaactaaggtatccagtggtgaagaagtgaaacttcaagctggggataatcttgttatcgaccaaaatggtaaaacagtatcgtactctttgaataaagaccttactaagatgaattctgcaacctttgaagcaacaggcggtaaaacaactgttattaaaggcgatagcattgttcaaacagatggtggtaaaacaaatacatctaatgcagcgggtaacactgttgtagatggcaataaatcaactgctacaactgcagcaggtactactatcactgatggtgctaagacgaacacatctacagctgataaaaatgtaattaatgatggcgcaggtaatactaatgtatccaatgcaactagtaatacattgaaaaatgcagctggtgatgaaactaaggctgatgctaagggggtaactgttaaagatgctgctggcaacaatgcaactttcactaaagatggcataacgattacaaaaactggtaaagatacggtttccttgactagcgatggcctcgataatggcaagaataagattgtgaatgttgcggctggtgtggcgaatacagatgcagttattgttggtcagttgaaagagtatgctgctaagtccactactgaattgactgctaataatggtgaaactgcaggtagtacgaagggcaatattgtattaactaagacaactgctgccgatggtcatacaatttatgacaataagttgaatgataagattaccttagggacagatccaacgaaggcggttacagtagatggtactactggcacggtaacaggcttaactaataaaacttggacaccaggttctatcgtttctggccgtgcggctacagaggatcaattgaaagaggccgtagctgattctggttggaaggctgctgttgataaagagggatctggtcaaagtactgttgtaggtacaagccctgaaaaaattaaggctgaagaaaccgttactttcaaagcaggcaataatatgatggttactcaaacgggtaaatctatcagttatgcggtaaattctgagcttacagacatgaagtctgctacatttaaggatgcagctggcaatacaacggtaacaaatggtaatggtattaccattacgcctggtagtgcaaaccctacaaatccacatgcaggccctgtatccttaacgaaggatggcctcaataatggtaataaccaaattaaaggggttgcaccaggtacagatccaacagatgcagtgaatgtatctcaattaaatgcgtccaatgcaaatactagccaagctatcaatcaaatagcaggtgaagtacaacatgttggtgctcatgcggcggcaatggcagcattgaaacctattcaatacgatccattggaaccaacacaagtcatggccggtgtaggcaactatcgcggtgaaactgcggcagcccttggccttgctcattacacaaatgaaaacactatgttcaacgtaggcgtttccgttggtggtaaccataatatggttaatgctggtgtaactcataaatttggttacagcccagaaaagaaaaatattccagatcgttacaaagcaggccctattagctctgtgtatgtaatgcaagatgaagtctctagccttaaaaaggaaaatgcggaacaaaaatatgttatcgcggaccaagcagctcgtcttactacgttagaagctgagaacgaacaacaacgtcgtgaattagcggaaacgaagaagggcttagatgatttgaaagcagcggtagataaattgttagcatccaaaggctaagtaatatatgattgataataaaaatcaacttgtaaagatataataatcttggaataaaataaagaaccctcttaactacgatacttataccctgatgggtataaaacgtatgcaagggggttctttgcgtttttgatataagttattatttaaaatgcataacatatgaatgacttctcatatgttatatgatataatacggtaatattatgggaagtttaatgtaatctcttgaggtttattatggggagtcattatgttaacatcattacaacgctggttctcagtagatactatattaccgatgaaggatcgactggggccggtagatactacaaaaaacttatataataaatacttaaaaattgcttggcctgcgaccttgcaaggactcatgatgcagttgatgactgccattgatttggctatggtaggctccttgggtgcctctgcactggcttctgtaggtatcatgggacaaccagaaatggttatgctcgtcatttgccgggccttatcgattgcagtcaccgcaattattgcgcgccgtcatggtgaaggtgatgtagatggcatgaatgcagtgctcaagcaatccatactactgaactttttaatttatattccattgctcgctatgtgcttatttaatttagagcatattttgcgatttaccggcgcagaggacgggtatattgaaacggctgtttggtatggtcggttcattgtcatgagccttgtgttccagtcctttagccaaatcgtaggaggtgccctcatcgggtatggcaatacaaaggttatttttaaatccaatgtggtggggaatatcttaaatacgattatgaatttcttcttaatctatggtattgcctttttcccagaatttggtgtcatgggggccggtatttcgacgctgatcagtagtgccgttatcgcagcattgctattgcgggctatttcgcaacataccaagactggtctaaccttattgcatccgtcaaaatggcgctttgagcgttccgtacttcatacggtattccacgtaggaggtagctctttaggggagcagttctttgaacgttttggtatgtatacatataccatgattgtggcatcccttggtgccgtaccgttggctgcacattatgtgtgtatgaatttgatggatatattctattactttgccatgggccttggctttgccggggcttctcatacggggcaaaacttaggacataaacggccggatttagcgaaggcttttggtcgtatcggtgctcgcatggggttatttgtggggttcgttagcagtctcatttttattagtgccggtcatttgctggtacaagtctatactcgtgaaagcgaggttgtcacattagctacggcattgatgggcattatggctattgctgcctttcctcaagcactacaacaggtctttgcaggtgtattgaaaggtgcaggcgataccttctatatcatgaaatattcattaatcagcgttgctgttattcgtccaatcattacctatatactatgtattacattaggtctaggcctatatggggcatggatttctctatgcttagatcaatcgttacggcttgtttgtgcctacatacgttttataggtggttcatggcagcataaggtggtataggtacattgaaacttttaaaatagtttatgaaagttttatgaaaaacttcttgcctagtaattaagaatggtatacaatacagatgtggaataaatgacacgttggggaacgtgttgtttgtaaaaatcatcaatttcacgtatatatgtaagggatatatatatgaatataaagaggcatcggccagtaatggtcgatgcctcttttatatgcgtgcgcacatgactaagcccccagataaacagggggcttgtaatatgtttatgagattaattatagattattacatgctagccatgcggacatagcttttttgcctgctgctggtagggactcggagaatactcgtgcatctttgcggattctaggaatatcaatgctcgcattacatagctctgcacagtggcccacaagccagctttcaataacggtcggatttgcctctaggtgaaattgcaatcctaaaatatgattgccaatcgaaaaggcttggttaggacagaggtctgtttcagcaaggcgaacggcgccttctggaatgtcaaattcatcgccatgccagtgtagaacaggcgtattgcctaagagggctagtggtgtatggtgcccttcagcagtaaagcgcaatggtccaaagccgatttccttcttaccatggctcatagggcccacatggccgcccatgatgcgggaaataagttgcgccccaagacagatgccgagtaatggttttttactatcgatgcggtccttaataaacttgatttcatcggtcaaaaaaggataaatttcttcgtcgtatgcgccaataggggccccacagacgatgaccagatctgccttacttgcatcgtattgattaaagtcagcaaggggggcctcaatatattctaaggtaaagcctcgttctattaataaaggttctaaaataccggcgttttcaaagtggatatgacgtactacataggctgttttactcatggttcctccttataactacgtacaactattctattgctagtatatcatattctatagaattttatgtgagctttcacacaaagtaaagcaagttggaagagtcatgtttgtttttatacaattatattgaataatatcgttgacatgaccgaaaatttgtatatattcataaggctttcattaggatattgatttttttcgaagaattgtatacaatagaattatcgttaaaaaagcccttatgtgtgtaagggtgattaatggagggaataatacaatgaataaaaaattaatagcattattggctgtagctacaatgggtatttctgttgtaggtgctacaccacaaacgcaatttacaaaaggtgaaactcaagttgatcttggcgctgcaagcgttgaaactaaagcagacggttttaaagctgctcataaatggaatttcgatggcaatatcactcacgcattgcgcgacaaaactgctatccaatacggttaccatggtttgaactctaaacatgttgattccaacatgcaagaagtaaacttgattcaaacattgagcaaaaactttgcattgtatggtggttttggtcgcattcatagtgatgctatcaaccatacaaacaatatcgctcaagttggtattatcggtaaagctgctttaggttctaaagtagacgtatacggcaaagctggtatcggtacaaaagaaactacaacttgggaagcaggtttaggttacaaagcaactgatgatcttgatatcaatgctggttaccgttatgtaaatacaaaagcaactgataaccacaacgtatccttccaaggtcctgtagttggcttatcctaccgtttcggtggcgctgaaaaagctgaacctatcgctgtaactccagcaccagctccagctcctgtagttgaacacactgcagcacctgtacaaaaaccagctaaagctgattactatgtacaatccatctacttcgattctgaccaagacgttcctcgtgcagaccaaggtgctaacttacaagctgcattgaacgctgctaaccaatacaaaaacgaccaagtaaaattgttgggcaatgctgatactgatgctaaccctcaatacaacattggcttgtccgaacgccgtgtacaagatgttgcacaatatttggtaaataatggtgtagatgctaaccgtttgatcggtatcgctaatggtgatgcaaaacctgttgctactaatgcaactgcaaacggcaaagctgaaaaccgtcgtgtagacgttttcattcaccgttaatttgagctttctcaatttaatctaagcccatataagtccatcttttcgtctctctatatattttgagtgcgataagatggacttttgtgttatactaaatctattagaaatactactgtacatatgtaatctgatcgttgtcatatagctttcatttacattgtgtacaatacttaccatgtgtttagtaaaagtgagttattagtatggaaaaatttaaatattataaggagcttatcggcgcgattatccttgcaggactcatgatattggtggccttgcgcattagcgatattgcatcgggcatcgatgcattgataacggcctttgtaccgcttatcgtaggtgcctgtatggcttttgtcctcgatattctcgtcgtccgctatgaacgttggttatggccgcgtatcaaatctgggtggcggtataagattcgtcgtccgttgagcattatcctatcctttgtgacgattagtctcattgtgtactttattgcccgtatggctgtgccgcagttagtgcattccattacacttatcgtgtccgcagcaccgcagctatatctagactttcaacaatggatttatcatttaagtaataccattccattggcctcgaaccctacggtattaaataccttgaatggtgaaagtatagttaactatacgcgtgaatgggggaccaagggtggcacctatgtggtgaatacgatgggcacgattctttcgtggaccgtaaatattgcattaggtcttatctttgccatttacatgctactcgataaggaacgcctcatgtcgcaaggtaagcgtattttgaaagcctatgcatctgatacgtgggtgaatcgtgtaacctatgtggccaaggttgctgttcaaacatttagtagtttctttgtaggacagtttatcgatgccttgattttaggtatcatggtgggcgttacattatggatttgtaatatttcctatgctacgaccattgcctgtgttattggtctcactggtttaattccattagtgggtatatatgtaggcggcttgatgggggcagttatattgcttaccattagccctatggatgcgttgatttacgtcattattttagaagttttacatcaaattgaaagcaatgtgatctatccaaaaatcgtaggtaattctgtagggttacctgggttatgggtctttgccgctgttatcataggcggtagtttgatgggcgttacaggcatgattataggcgtgccattagtagccacttgctataaattactgatgactgacgttgaagaacgtttagcctctaatgaaggcttatagcatttattagctgtaatataaataaaaatacaagtttgtagaatccgattactattgggaggattataatgaataaaaaattactatctttggttatgactggcgtgttggccgttggtgttttttcagtagccacaccgtatgaagtacaagcgcgtaagactaaaccagaaacaagcacagatattacaattaaacgtgcacctggtcaatctgtggttatgacaatgagcgaaattggtacgattttccaaaatcgtttccctaatgcagcgttacactctgtagaattgaattccaatgatttggcctatgcttacaaagtaactggatatagcaaatatcacgaatacaaaatgaaaattgatatcatcactggtaatcaatccgatatgagcgaaggtggcaaacctaaacgcgttattggtgaaatcttcaacaaagataaagttatcgaaccatctcaagcagaagcagctgctaaagcgcaattaggtgcagatgctgttatgaagggctggaaggttgaagctcacaatggtaaagttaattactatgtaacgatgcatcaaaatggtaagaaaacagtagtgactgttgatggtaatacaggtgcttacattgaacaaagtaaagcaacaaaattacctccagaaccagatcaaggttttgacaaacgccgtacgaacctcgtatggggccatgatatcgttatggataaaaaataatataaaaaatagggagtcaatatctaatgatgttgacttcctatttcatttgttaggtacaatcgattaccaacggttttcgtagtacgcttgtgtccacataataacctcgataagagatggatgtggactcattgtttcacctacggtgattacggatctaggatccatgttgcgcataataccttttttacgcaatcgttttgtgcgctcagatgcgatttcttcattgatggctgtcaatggggttacaccgctgttcataaggttaacgtatggttggaataggatagaggcttgtggtccgattacgtgaataccaaggatatggtttgtatctttgtcgaccacgatttttacaaagccgtcgtttacatcaccaggatcaatgcccatagcatagcctttggcagtagaggaatagaagtttttgcctgtgcctacattgtaaccagccttaattgcttctgcttcggtaagacctacgctaccgatttcaggataggagaaggtaacttttggcaacacgtcgtagcgggcccaacggaaatctgcttcatttttggcaaagtaaagattatgtgcaatgatatccgcttcgtagtttgcgcgatgacggaatgcaggttcgccgttcacatcgcctaacgcatagatgccgtccacagatgtttcaagaaactcgtttgttttgatccagccctttggccatgtttcaatacctgtattttcaaggtgtaactcttcggtagcagggcggatgccagcggctacaagaatttcttccaccttagtttctgtgatttcacctgttgtacgatcttttgtaacgacaacttttaagccatcttcttggcgaacctttacggtatcttgatttagaattatgttaataccacgctctctataattgttaaggagatgctcggacatatccgcatcttcctttggtactaggcgtacattatgctgaataattgttacatcggtaccggcagagtcaaatacatgagcgaactctactccgataggaccagcgcctaagatggcaagggatttgtacggttgtttaggaaacttgttgccaaagaggctttcactagatagataaccggcctcttgtaagcctggtacatttggaatattactgtaaccaccagtacctagaataatagttggagctgtgatttctacgatgccagatccatcgttaaggtggatgttcatcaccttatcggacacaaagcttgcagcaccgcgatatacatctacgttgtcatacgcgttatagtaatcatagatgcctgcagacttgtcaatcatatgccatgtacgtttagctacagtgtcccaatccattgttgcatcgccaacattgacgccgattttgccgaactcttttacctcttgtacagcattcgcagctgtaaccataaccttcgtaggaatacaaccacgagttaggcatgtgccaccgaatttacctttttctatgatagctacttttttacctgtttttatagcagcgtcagcaacgatggttgcaccacctgtacccactacaataatatcgtattgtttcatgttgattcctttctatatatatctagtaatagttattattattaaatatattataccccattatattgaaaataatcaatatagaaaatatattgtttttgttattagtgaaagttggcgcaagggtaaactttcacaaaaagaaaagacgacctcatggatcgtcttgttctatatgatggtttaatcccagttttcgtgatagccacgttttgcataatctgcagtagcagtgaagagaatatctgtactggaattgagtgctgtttctgtggagtcttgtaataccccgatgatgaaaccaacgcctactacttgcatagccacatcgttggagataccgaatagggaacatgccaacggaatgagaagcaaggagccgcctgctacgccagaagcgccgcaagcgccgatagtagcgataacggatagaaggatagctgtaggtacatccacgatgatgcccaatgtatgagcagcagctaatgtcataacagtaattgtgattgcagcaccgcccatgttgatagtcgcacccaatggaatggatacggaatacatatcagggttaagtttcaaacgtttagccaagtcaaggttgacaggaatgttggctgcggagctacgtgtaaagaacgcatagatagcagattcgcgcaaacatttgaacaccaatggatatgggtttcggcgtaagtagatgaaggataaaagtggattgattaccaaggcaacgaaaatcatggagcctaagagtaatacgagaagttggaagtagctgataagtgcttcgataccatttgttgcgatggaatcagccacaagacccatgataccaagaggtgcgaagcgaatgatccaacctactacagtcgtaattgcttgagagatggattccattacttcttttgtattcataggtgcatgacgtagagcaccaccgatgataagagcccagcctaaaatgccgatgtagttagcggacattaatgcttttacagggttatcaacgatattcttgagtaaagttttcatgacttccgcaatgccttgtggaggcgctgcatcagcggcactagctgctagatgtaatgtagttgggaagaaccagctcacgagtacggcaagtgcagcagaaaggaatgtacctaatagatagagcgtaattacggagcccatacctgttttttgtccggagcgatgtttactaatcgccgcgatgactaagaagaatacaaggattggtgcaatacctttgagggcaccaacaaataatacccctaatagcgataattcgtttgcaatatcagggacatagagagccgtcaaaataccgataatcataccgatgatgatttgttggatgaggctgactctattaatggatttcataaatcgattcataatagactccaatacttaattagactacataaaacaatgaattttgtcgtttatcgaagagaaataataaatcctcatagaaaagacatatgtcattatataacgaacattgttataattcaatagataaatactaattatatgatgcatttttttctatgtgaacattttgtaattctttgtatatatagtatatatattagaattcctctaagttctagaatgtcatcgttggttatggtatactgtcaacatgtgatattcttgattatgaaagtgggtaccatgaatactaaagaatttaacacgtatgaagacaaagaacaatttgtgcaaggtgtattttctaatattgccaaacattatgatttgatgaatacattgctcagctttgggcaagactatttctggcgtaagttcgccgttaaagaaatgaatattggaccttatcaacatgtgctggacgtagcttgtggtacttgtgtgtttacgaaagaagcgttgcgccaagagccgactttgacagtagaagcattagactttaatgcagaaatgttagagcaaggtcgtgagcgtttggatcaagcggatttgttagaccaagtgaacttggtccaaggtgatgctatggcattgccttatgcggacaatacatttgatgcggctatgagtggctttgcaatgcgtaatgtacctgatattaaacaagtgctatccgaaatgcaacgcgttgtaaaaccaggcggcaaggtggtagtcttggaattggctaaaccaagtgcatttgggtttaagcaattatataatttctacttctcctatatattacctattataggcaaattaagtaaggataattcttcctatgcctggttgcctgaatccttgcgtcgctatcctcatcaaagcgaaatcttagaaatctggaaatctctaggttatgaaaatgctacctatactgaattaactggtggcattgtggcggttcacgaaggtgttgtgccagaatccactacaaaataatacaaaaataaagaccgtataacatagttagtatcgtatgttatacggtcttttgttatgtttgttgtttgaaagtgattgattatagaccatagtcgattatgttgctaaaacgtaatggacatagtatgtaactaacaatctataaacaatagttgttattgtagatagtatacaatatctgcatcttgagatacgattaacgatcctttttcaacaggtgtagaagtgctaagatttgcagcaagcactttggcactgcgatagtagccttggtcgaatgtacttgtttctgtgttgctaatgtttacagtttttacaggacctaaggtgcggcctagagcagcagcaattacctcagccttgtgttgaccgttttggatggcttctgtagttaaagaatcggatagctgttgagatgtgtcgttttggaatgaaaggctgtttatgtcatttgcaccagcattgacagctgcgtctacgaccttacctacactatccaagttattgattttaactgttacaaggttagatactctgtatcctgtattaacgcgtttgccttcttggtaatcattagtaggattgattgaaatattggacgtgtaaatgtctttttttgcaacatttaaatttgaaagtctgctaataaggtcgctcatgatgcgatcattatttgacttagcggcgttgatatttgtgttttcacttgtaatgcctagtgtgagtattgcataggtaggcgccacagagcgggaagcctgaccagtgacatggatttcagatgtatcaaatgatccttgtggtgctgcaaagcttgctgtagccacagaagcacaaatagcggccaaagcaactgttttggtgaataagcgttttgagaatttcatatatctctccttatatagtattaaaagaacgggggcataccccctaaaatatgacatgtatatctttataagtatagtattaatagaagaggccgctagcccactctaagtatagtactaatagaaggtacggagggctcactcattgaaacataacatgtatatcatcgtaagttaagtatattgtacaaaatagattgcgtaaaatcaatatattttattgaaaaatgagtcaaaagtgaaattttgtaaaaatgagaattaggggttgcgtaggtatgtggtttgtactataataaccatacagtcgttgaggcgactgtttcttaatgaggaaacactagatacaatctagattctttgttagttattttggaattttatgtaaatccctcacatagaggtaattacaaaattctaaaaaagattataaaaagtgcttgacactgaatggtcaacatgttattataatctagtcgccagttggtgaaacacttcaaacgaaagtgcttcgaagctagaaaatatctagtctgactggtacagatctatgaaaactgaacaatgataggtaatcaatcatatgattgaacatatgccagagtgcgggttttgacaaagtcaaaaccaaccataattcaaagttacttaaatgtaacgacaacaaatattgagctactcaaatagcttcaagatatcttggagagtttgatcctggctcaggacgaacgctggcggcgtgcttaacacatgcaagtcgaacgaagagcgatggaagcttgcttctattaatcttagtggcgaacgggtgagtaacgcgtaatcaacctgcccttcagagggggacaacagttggaaacgactgctaataccacatacgatccaatctcggcatcgagactggatgaaaggtggcctctatttataagctatcactgaaggaggggattgcgtctgattagctagttggaggggtaacggcccaccaaggcgatgatcagtagccggtctgagaggatgaacggccacattgggactgagacacggcccagactcctacgggaggcagcagtggggaatcttccgcaatggacgaaagtctgacggagcaacgccgcgtgagtgatgacggccttcgggttgtaaagctctgttaatcgggacgaatggttcttgtgcaaatagtgcgaggatttgacggtaccggaatagaaagccacggctaactacgtgccagcagccgcggtaatacgtaggtggcaagcgttgtccggaattattgggcgtaaagcgcgcgcaggtggattggtcagtctgtcttaaaagttcggggcttaaccccgtgatgggatggaaactgccaatctagagtatcggagaggaaagtggaattcctagtgtagcggtgaaatgcgtagatattaggaagaacaccagtggcgaaggcgactttctggacgaaaactgacgctgaggcgcgaaagccaggggagcgaacgggattagataccccggtagtcctggccgtaaacgatgggtactaggtgtaggaggtatcgaccccttctgtgccggagttaacgcaataagtaccccgcctggggagtacgaccgcaaggttgaaactcaaaggaattgacgggggcccgcacaagcggtggagtatgtggtttaattcgacgcaacgcgaagaaccttaccaggtcttgacattgatggacagaactagagatagttcctcttcttcggaagccagaaaacaggtggtgcacggttgtcgtcagctcgtgtcgtgagatgttgggttaagtcccgcaacgagcgcaacccctatcttatgttgccagcacttcgggtgggaactcatgagagactgccgcagacaatgcggaggaaggcggggatgacgtcaaatcatcatgccccttatgacctgggctacacacgtactacaatgggagttaatagacggaagcgaaaccgcgaggtggagcaaacccgagaaacactctctcagttcggatcgtaggctgcaactcgcctacgtgaagtcggaatcgctagtaatcgcaggtcagcatactgcggtgaatacgttcccgggccttgtacacaccgcccgtcacaccacgaaagtcggaagtgcccaaagccggtggggtaaccttcgggagccagccgtctaaggtaaagtcgatgattggggtgaagtcgtaacaaggtagccgtatcggaaggtgcggctggatcacctcctttctaaggagacatacaccaggccaagagcttggatgtcacttaggtcgacactttggccagtaagtagacgtagcatatgcgctagctgtacttacaacctacattgttcggttttgagagatttgtaaatgatttctcaatttaatatgacgtataaattacgcgttaatctaggcgcatgagttgaacgacgtcgccacgtaatggtaattacgtaagacaagtgaaacgaatgcaacgacgagtaacacggaatttatcggcagatttgttctttgaaaactacatagaagataattattatatatatttgtaaggtcatctcttagaatttctaagtaggttgacccgagcacataggaaataattctctgacttattggtgacgtacatgaaaatgtacggctacaaaaaacgacaatgtatctaatgcatgtcaataaaatctcaaatacgaaagtattttaagtaaagattttaagggcgtacggcggatgccttggcgatatcagccgaagaaggacgcggtaagctgcgataagctacggagaggtgcaagcaacctttgacccgtagatttccgaatgggggaacccggcagtggttatgcactgtcacccatacctttgagtatgaggagggcacctggggaactgaaacatctaattacccagaggaagagtaatcaaacgagattttcttagtagcggcgagcgaacgggaaagaggccaaaccggagcgggcaaccgcaccggggttgaggacagtcatcaagtgtaaatgaggtagaagaatcgagttggaaagctcagccgcagaaggtgaaagccctgtaatcgaaaccttgcatacatgggactgtatccagagtaccacgagacacgtgaaaccttgtgggaagcaggggggaccaccctccaagccaaaatactgatatcgaccgatagcgcatagtaccgtgagggaaaggtgaaaagaacccctggcggggagtgaaagagaacctgaaaccgtatgtctacaaacagtcgaagtctgtatatatatcaggacgacggcgtgcctattgaagaatgaaccgacgagttactgttgctagcgaggttaagtggaaaacatggagccgcagcgaaagcgagtctgaacagggcgttcagttagtgatagtagacccgaaaccgtagtgatctatccatggccaggttgaagcacaggtaaaattgtgtggaggaccgaactcgtgagcgttgaaaagctttgggatgagttgtggataggggtgaaatgccaatcgaacacggagatagctggttctccccgaaatagctttagggctagcctcgaggttgagagtataggcggtagagcactgatcgggctaggggccataccggttaccgaacctagtcaaactacgaatggctatacttatactcgggagtcagacagtgaatgataaggtccattgtcaagagggaaacagcccagaacaccgactaaggtccccaatgtcatactaagtggcgaaggatgtggaatttccaaaacaaccaggatgttggcttagaagcagccaccatttaaagagtgcgtaatagctcactggtcgagagactctgcgccgaaaatgtccggggctaaagtatgaaaccgaagtcgtgtcatatgcagcaatgtatatgggtaggggagcgttctcatcggattgaagcagtaccgtaaggagttgtggactggtgagaagtgagaatgtcggtatgagtagcgaaaagaatggtgagaatccattccaccgaaagcctaagggttcctgagcaacgatcgtcgtctcagggtaagtcgggacctaagccgaggcggaaaagcgtaggcgatggacaacaggttgaaattcctgtaccggtgtgaatcgtttgattgaaggagtgacacagtaaggtaggtcagcacgcgattggaagtgcgtgtttaagcatgtaggttgagttataggcaaatccgtagctctaaaagctgagatgtgatgacgagctgtttacagcgaagtgattgatcctacactgtcgagaaaagcttctaggtagagacacatcgcccgtaccaaaaccgacacaggtaggcggggagagaatcctaaggtgcgcgggaaaaccctcgttaaggaactcggcaaaatgcctccgtaacttcgggaaaaggaggactcatgtagtgtgaagggcagtaacgcgtggagcatgaatgagtggcacaagagaggcgcaagcgactgtttaccacaaacacaggtgcctgctaaagcgaaagctgatgtataggtgctgacacctgcccggtgctggaaggttaagaggaggggttagacttcggtcgaagctctgaattgaagccccagtaaacggcggccgtaactataacggtcctaaggtagcgaaattccttgtcgggtaagttccgacccgcacgaaaggtgtaacgacttgcgcactgtctcaacgagggacccggtgaaattgaagtacctgtgaagatgcaggttacccgcgactggacaggaagaccccatggagctttactgcaacctaagattgaacttagttaatgaatgtacaggataggtgggagacttagaatctagggcgccagtcttagaggagtcgttgttgggataccaccctttgattaattgatttctaacaggccgattaacaaccggctggacagtcttaggcgggcagtttgactggggcggtcgcctcctaaagagtaacggaggcgcccaaaggttccctcagagcggacggaaatcgctcgaagagtgtaaaggcagaagggagcttgactgcgagacggacaggtcgagcagggacgaaagtcgggcttagtgatccggtggtgccgagtggaagggccatcgctcaacggataaaagctaccctggggataacaggctaatctctcccaagagtccatatcgacggggaggtttggcacctcgatgtcggctcatcacatcctggggctgaagtaggtcccaagggttcggctgttcgccgattaaagtggtacgtgagctgggttcagaacgtcgtgagacagttcggtccctatccatcgcgggcgcaagaaacttgaagggggctgctcctagtacgagaggaccggagtggacgaaccgctggtgtaccaattatcctgccaagggtacagttgggtagctacgttcgggacggataaacgctgaaagcatctaagcgtgaaaccagccttgagatgaggtttctcatagcataagctagtaagatcccatgtagacgacatggttgataggccaggtgtggaagagccgtgaggcttggagctgactggtactaatagatcgagggctttacttaatacaataagcagaaaatgtgcaacaaatatatataacttctatgtggttttcagagtacaaactctgacagattcagtggcgatagctacgagggtccacctgttcccatctcgaacacagtagttaagctcgtaaacgccgaaagtacttggctggagacggcctgggaggataggaagtcgctgattaagctaaaaaaggctaaccaaatggttagccttttttgttatatatacttacatgtagagtccgaccagcgtacctgagaaaatagagtatggggtgatagaggcgcgtagagacgtttgtgattcacacatcatatttaaatatgcacaaaaaattactcattttacaatttgtttaaattctattcactcataattcatatagaatctttatactatcaatagttgattgagatcaactaggaaatggaggtctactacttaataacttttatctgtcccttttacaaataatacaaacaacacaacacaaaacaatacaacacataaaacaacacttaaatacacaacaatactctccctgtgtataaaaaacaatacatatacaaaactctctaattatatataccttctcccgtatatataacgataaaagttacgtagacaaaaagagcccgaaagggctctttccttttttcgtataaatagtattgttatagaataattatctgtttgtatacatgaaagtgaggggacaattatctttatactttaatagtaatttatgtattatataaaaaagatgaaattcttaaatatcttagaattaccttgacagatgggggcgcttcttggtattatattcaagtatcaagtacacttgatgtgcataggggtatagctcaattggtagagtagcggtctccaaaaccgttggttgtgggttcaagtcctactgcccctgccaaactttagagctgcgaccttcgggtcgcaattctataaaaaagttacttaaaaatattaaaataatgcttgcaaaaagctagtcattatgttaatataatcaagtaccaagtacatgactcagtagctcagctggatagagcgtttgactacgaatcaaaaggccaggggttcgaatcccttctgggtcaccaaattaaaactcacacgaatgtgtgagtttttttattttgtctaactatattttatggatcttatagactaatactaacttaagtgcctttttagaattagaacaggcctgttctaatttgtaggcctcatatagataggccaacttagagatactacaggcctgttctaattcgtagggaccctatatggataggtcgtctcagagatagaacaggcctgttctaattcgtaggcctcatatagataggccaactcagagatagaacaggcctgttctaattcgtagggcctcatatagataggccaactcagagatagtacaggcctgttctaattcggaggaccttatatacggaggcttaacaataataaaacggagctgctttgtattaacagctccgttttgttagttggatacttcttttaattgccctgcagcaatcgccatatttttagaatagatagcttgcatataaccataggtgtctggttttaattcttttagcttagggtttttcttaatgtttctacgtagaatttgacctgtacgagcatcaattagattgatttcgtcttgtgtccaatagatggtatcagcatcttggttgaaatagtaatgattgatatattctgtcatgtaatacatggcaccttgatggctatatgttttggcgatgatttcgtagttattgccttcgcctgcatggacgatgacgcgattatctgcatagtattgttggccgttcatgcgatacatataggaatagcctctagcgttctctaggtcacctatattaactgcgtaggcactacccgttaaggcaaggaatgtaagcgttagaatagctaattttttcatagtatggtgattgctccttatttggcatgaggctgatctgattcagcgacgacgttgaccacaacttgttggtcggatggtattcgactcatgataaccggcattggttgttccatggcttgagcaatgccttttatttgtcgaatcgcaactggtacgggtgtagaagacccgtcttgaaagttttgttctagtgtattgatttcgctaactgttaaacctgcttttgctgcaaatgtttcttgtgaaagttgatgttcctcgcggaatgcttttataatgtctccgatatacataatgacctccataatgtaaattactctatcattatacatgaaagcatgatgagataatagatagattgaaatatagtcttttgttattagtgtattataaatatttatttatgaaaatgtaaaaaaggtttgacgaaagtaacatacggtgataatataaacacatagacaacatcatatttgggaataggtgctgaaaagcataatagagaagctggttaaaggccagcacggtcccgccactgtatggttgagcgagtctaattaagtcactgggaaactgggaaggctagatgagcgttgacaccgagtcaggagaactgcctattcaacattcaccatttgacctacgagtgatagggaggagaagtttgagactccctttttacgtacccgtaaaaaggatttttttgtgtaaatgatgttttgtagtacacaaattataatctctgtattgttagagcagtcatggtgaatataccgtttggtattatcagcatggcttttgttatgtctgttaatatatttattggtaaatgtagggcatgcatttattcatcatcatcctaaaaagagagatggtcctagcacctaggttaggtgtttggaccatctcttttttgattcttggaactttagagttgatagatacatagacatcttgaaattgttaattctatatatatgatgaagtctcataaaaattacaaaaaatgattgacgtcatatataataagtggtattataatttcagtcggtacgcgggagtggcggaattggcagacgcaccagacttaggatctggcgccttacggcgtgggggttcaagtcccttctcccgcaccaactatatttgcacctgtaggtgctttttttttgcccatttacatctgttcaaggaaacaggtgtttttttgcatattcgtaaatatgctataataaattatcagtactattgtacttgtaacagatatgtttaagatattatatagataatcattatatatggtgcagtatggatacttcaattgatacactgctttcacaaaacccatctatgacagatgggctaaaggcgtttcgcgaaaagggaaagtcagttatatatggtttaagcggatcgcaaaagtcgttcctcttaagttgtgctgttccagaggaacaagtacaatctattattatcgtggtgcacgataaagaacataaagaattgtgggaacgggatttggcgtttttctggcctaatgtgcaggtattgccatttcccattacagaacgtgtagaatttactaccgtagctcgtagccttgaaggacaaggggctcaaatgcgagcgctcagtatgttggcctggaatcgtcctgttgtagtcctcgctacaatagaagaggccacgcaatatgtagtgagtcctcaatatgttatatctcaaagtgtgcatcttgaggtttctcaatctatagagcgagatgagctgttagaaaaattagttacaattggatatgaacgtgtagaccaggtagaacaacgtggtcatttttctgtgcgcggagatatttttgatatcttccctgtgaatagtgatgatccaatacgtatggaattctttggcgatgaaatcgatacgatgcgccatttttccgtagatacacaacggtctattgaaacggtagattcttatacggtaacgccattcttcttaactagcgatgacgcagatagtacattgctatcttatgcaaaggatggacttatcatttatgatgaaccggtgcgcattcaagaagcgttgaagaaattcttaaaagaagatgcaacacatcgcaagcaacattgtgaatggtctgaattgcaacgctctgtagatgctaagattgaggtggctttcacattcatgcaacagcgttctatagggctagctggattttacccaattggcattcaaggtaaaacgatgacgagctttgagcgtcaaattcctttgttgatggatgaaatcaagcaatggcaaaagctaggtaatcaagttgtgcttgtcattaataatttgcagcgccgtgaaggcatcgaaaaggctttgcatggtgatggtattccgtataagctttgtgaaagctgggattttgagcctaatacggttcacgttatgcaaggcctcttaacagatggctttgaattaccgcatagccgcttagttgtcgttgtagaaggcaacatttatggtcaacaaaaacggaaacttcgcaataagcccaaaaagggccaagaaattaattatttcacagatctgtcggttggcgattacgttgttcacagcatgcatggtatcggtaaatatgtgggcttaaaaacgattgaaacagaaggtatccatcgagactacattgaaattgcttatgccggaacagataggttgtatttgcctgctagcaatttagatcaattgcaaaagtatatcggcaatgaaggcgatgtacctcgcattcataagatgggtggtagcgattggcgcaaagcagttacaaaggcacagaaatccattgatgatttggcagataaactggttgaactctatgcaaaacgggaaattacagaaggctttgcattcctaccagatcaaccttggcaacaagaatttgaagatgcctttccttatgaggaaacagaggaccaattacaagctacgcgagaaattaaagaatccatggaacgaccaacaccaatggatcgcttgttagcaggggacgttggctttggtaaaacagaggttgctatgcgtgccatctttaaggccgttgtaagcggtaaacaagtggccgtactggtaccaaccactgtattagctcagcaacattaccaaacgtttttaaatcgatttaatccatttggcgttaaggtggatgtactcaatcgattccgttctacagcggagaagaaagaggtcctaaagggtgtcgaaaatggttctatcgatatcttaatcggcacgcattccttgttaaataaaaaggtaaaattcaaagatttaggattcctcgtcgtagatgaagagcaacgctttggtgtagcacaaaaggaaaaatggaaagaatgggctaataatattgacgtccttaccttaagtgcgacacctattccacggacacttcatatgtctcttgtaggtgttcgtgaaatgtcggtcattagtacacctccagagaatcgactaccagtacagacctatgtagtagaatacgatatgaatctcatagctgatgcaattaaacgagaacttgctcgagggggacaggtttacttcgtgtataatcgggtagcatcgattaatcatatgggtgaattattagaacaggcgttgccggatttgcgttatgctattgcacatggacagatgacaggccgtcaaatcgaagaaattatgaccgatttctatgaaggtcattatgatgtattgctcagtacaagcatcattgaaacaggccttgatataccaaatgccaatacgattatcatatacgatgcggatcgtttaggcttatctcaactctatcaaatgcgtggccgtgtaggtcggtctagacgacgcgcctatgcatatttcatgtatcgacctgataagatgctttcagaagcggcagaaaaacgtttgaaagccatcgaagaattcacagaattaggggcgggatttaaactggctatgcgcgatttggaaattcgtggggccggtaatctattaggttcacaacaacatggtaatatcgcatcggtcggctttggcatgtatgtatctatgttagaggaagccattgcgaaagcacaaaataaagaggtcgttaaagaggtagtaccagatcctgctattgaccttgaaatcgatgctttcatagatgatgcctatatcaaggatagtgcgcgcaagatttccgtatatcaacggatgttacaaatcaagaataaagcgcagcttgatgatttgacggatgaacttatcgaccgttttggtacaccaacggatccggtagatcgtttactacgagtcgctcaaattaaggaacaggctcgtttgttgggggttaagagcatcgttcgtcgcgatggtcagctcatcatccattggcaagatgattcaaaaatggccgattgggatatgggtgctgttcgcgaggatttatggaagaaaatgaagttcatggatacaaaaccggcgtcattatatattagtttgaatggattaaagggatctattttaacgattacagaagcggtgatgaaggagttgtcaaagaaatctaaggggggcctatgaaccgatttttaaagggagccatgattttaacaatagctggtgttatcgttaaaattattggtgctttcagtaaggtactcgtcgctcgtattcttggaggcgaggggataggtctctatatgatggcctatccgatataccagattatcgttagtatttcggctgcagggattcctgtggcaatctccattatgattgctgaaaaattggcgaatagagatatgcgtggggtacaacaagtttttaatgtatccttacgggtgcttacactagtaggtattatatttagtgtgggactttatgctagtgcagaatggcttataaaatggaacattataacggattcaagggctttaataccgattcaattattatcgccggctattattgttgtcaccattttaagctgttttagaggctatttccaaggtttccaatatatggttcctaccgggacaagtcaggtttttgaacaaatatttcgcgtagggtccatggtggggcttgcgtactattttatcgactccggattacatctggccgcaggtggcgctacttttgccacatttccgggcgtattagcgggtttaatcgtactcgtgtatttttataggtctcaacgtagtttgcgtcagcagatgctaagtgagcaaaatgaagaggcccctatagaacgtaccagtgctgttattaaacgtttatttgccctagccattcccgtttccatggccaatattatgttgcctatggtatctttaattgatacttttattgttccaaaacgattgatggatattggctactatttacatgaggcgactacacagtttggatatttgacagggatggccacgtcattaattggattacctattattttaacgacggctctcgcagcgagccttgtaccggctgtatccgaagcgcatgcaacggggaataagggtcgtataatcgagcgtgctagcacagcgatgaagattgccaatttatttgctataccggcttgtataggattatgcgtattggcaacacctatttctcagttaatatatgcaacgcccaatgcaggtcccgttattgccgtgattagtcttagtattatctttttaggatggcaacagattacggctggtatattacaaggattagggcgcaccattattcctatgctgtctatttttatagggcttatggtgaaagctatcttagactatcaattgaccggatccattgaactcggtattaatggtgctgcatgggctacgaatttaaactttgccatcgctgccttgattaatctagtattcgtaaaacggtatgtaggtagtgttatccaatgtatgaatctattgaaaatcatcatttccgctatggctatgggtggtgctacacaagttagctttatgttccttgtcgatatggttggtaatggtgttgctgtagctatttctatccttgttgcacttattgtatatatactatctctttggattactaaggccatcgtaatggatgatatgtatcatatgcctgttattggaaaacgattgcgtaaacgccaagtagaggagaatcgaatctatgaagaccaatattgatatacaacctcttgtagaggttgtacaaaaattacgctctcctaatggatgtccttgggataaggtgcaaactcatgaatcattgcgccgttattttattgaagaaacctacgaagtaatggatgccattgataataaagacatggataatctgcgtgaagagctaggtgatgtattactacaaatcgtgtttcatagtagcattgctgaagaaaacggggcttttacattacaagatgtaataaatgatgtaactgagaagatgattcatcgtcatcctaatgtatttccagaagaaaatactgataataaaggaaaaacatacacttgggatgaattaaaagcacaagaaaagggaaatatacgaaaaagtgtattagatggagtatccaagggtttacctgcattggtagctgctcaaaagctacaagataaggccggaaaggtaggttttgactgggatgagctggagccaatttgggcaaaagtgagtgaagaaatcggtgaatttaaggaggctgtggccttaaaagatagagaaaatatggaaaaagaggctggagatgtgcttttttccttgattaatctctttagatggtataaaataagcggtgaaaatgcactgaatcgcacaaacactaagttccgacagcgtttttcacatgtagaagcttgtgttaaccaaagcgatcgctcatgggaagacttttcattagctgagctggatgctttttgggaggaggctaaagtgcaggaaaagtaacctagaggtatgttagtaatctcgggtattgtatttttaaggaggttctgtcatgaataaaacagaattaatcgcaagtgttgcacaaaaaactgaattgactaaaaaagacgctgaaaaagcggtaaaagctgtattcgacacagttgctgaagaattagctgctggtggtaaagttcaagttatcggcttcggtactttcgaagttcgtgaacgcgctgctcgtgaaggccgcaacccacaaaacggtaaaactatcactatcaaagcttccaaatctcctgcattcaaagctggtaaaggtttgaaagaacaagttaacgcagctcctgcaaaaaaacgcaaaaaataatctgaataagatgtaaaagagacccgatagggtctcttttttcgtctatgttattttttcttgtttatgtggtataatcacaaggaaaggatagattatgactacagaacaatcacggaaggtcctcattgtatctgcctctattgggacaggacatatgcaggccgcaagggcgatagaagaatattggaaattaaaagaaccacaggcagagattagccatgtggattttcttgatacggaaaccttgtcagtagaacatcttatcaagggtacatacattaagatgattgacgtatttcctatgttatacgatatgatttatcgtgtatcaaagggagagaaaaaagggactattttacaaaccgttttgtcctatattcttaaaagtcgtatgttgaagctcattcaacaagagaagcctgatgtgattgtattcacgcatccatttccgtgtggggccgcctgtattttgaaacgccaaggccatattgatgtcccgttagtggccatcctaacggatttcagtagtcaccaattctggatttaccctcaagtagacacctattttgtcgctacagaggacatggtaggagaaatgacggccgtcggtattgagcagaataaaatccatgtgtccggtattccggtgcgtagatcattctttaaggatgccatcgatcactatgaaatgaaatcccctgttaaggttctcgttatggggggaggattaggcctaggttcattagagattgcactccaacatttagatgcggttaatggtattgatgaaattactgtcgtagcaggacaaaatacatcgctctatgaatctttagtaaatctaagtgtacgaatgaaaacgaaaaccactgtatacggttatacatctaatatttctgagttaatgcactcagcgacgatgctcgttacaaagcctggtgcattgacctgtatggaggctgttaccattgggcttcctatggttttctttaatgctattcccggtcaagaagaggctaatgcagagctattagaagagcgaggttgtgcgcgttgggctagagatatacataatttagaggacgtagtggctgcgttgttaatcaatccgccacggttacaacaaatgtctgaacaagcacgtgcttggcatgtagatggtgctgctaatatcgtaaacgaactcattcatattttagatacaaaaacagatgcactttctactaagtgcgagttagaaatactataaataaaaaggtcatccacgaaactaatttacctaccatatgtatggattaggtaaccattagcttggggatgacctttttattattcgcgtgcgaaattattgatagttttcaatgttttctgtacgtatcatttgtaatgcgtttaagaaatcttctgttgaagtatgttcctccagtagtgcttgtaattgatgagaatcattaaggcttacactccattggaatgaatcggtatcgtcatatacattgaatacgattggcgtatcgagtgtatctggcatatgaccatcgtcgtcggatacagttgcataagtaccatcgtctagtagttcaacaaaaagtgtatcataaccatcaaagtcgataatttcaaaatctagagcatcataaaaatctaatactgcatctgttgccatgagaacctcctaatagtatgtacttatcatgttggattactgtctagttatctatctgtattctactgatgcggtgtatgactgtcaatgaaaatctgtagtataataaataacataatgataatagaggagtacgggtatgaacgtaatttgtttacagaatatagagaaatcgtatggcacacgattgttatttaccgatgtgtccataacatttacaaatcaaaaacgattgggacttgtgggaatcaatggaactggtaaatcaacctttttaaagattttaacaggtcagatggaatgtgataagggtactattgagcgcaatggcaaggctaccatccattatttagcacaaacgccaagctttgatgaaggtaataccttattggaagccattttagatggtgaccatccgcgattacaaatggtaaaacgatttgacaaggccagtcgcgattaccattatatacaagaacagggcgtatctgatgaacgtattgagcgccattatatgcagtgcttagaagaaatggatacccaagatggatggcaagtagagcaagaggcgcgtatcattttgagtaaattgggctttcacgatgtcaatatgtccgttagcctattatcgggtggtcaaaagcgtcgattagcattagggcaagccttgctatatccatgtgacttactattgctggatgaaccgacaaaccatttagatgaggatagtattgagtggctcgaaacgtatttaagcaatcggcaaggaggtcttttgattagtactcatgatagatatttcttagattctgtatgtaatggtattttggaattatccaatcgtcacatgtatgagtacgaagggaattatgaaaaatttattgaattgaaagcagatcgtgaggcacgccaagctgcaaccgaggagaaacgccgtcaatttttaaagcgggaaatcgaatgggtacgccgtggtgctcaagcccgtagtaccaagcaaaaggcccgtttgcaacggtatgaaacgcttaaaaatatggagaaaactagacgtcctgatcaaatggatccgattgccttaaagactcgattgggcaagactatttttgacattgaacatttatcctttgattttgatggacgccctatggttgatgattttacatatcacgtggtgcgtcatgaccgcattggtatcgtaggtcccaatggggttggtaaatcgacatttatgaaaatcatcgatggcacctatgagccagtatcaggaactattggcaaaggcgagactgttcgcattgcacactttaaacaggaattgcctgaatttgatgaaaatatgcgtgtccttgattatataaaagaggaccattcctatatgtcgcttggtgatggtacaacgttaagtgcaggtcaaattttagaacgctttttattcacccctgaattacatggtgtgcctattcgtaaattatctggtggtgagcgtcgtagattgtaccttttaaaattgcttatgagtgcgcctaatgtacttctcttggatgaaccgactaatgacttagatatccctacactagaggtattagaggattttcttgattccttcagtggcgttattataaccgtgtgccatgatcgttatttcctagaccgcgtggtagataaattatttgtatttacaggcaatggtcgtatcgatatcgttcacggatcttattctgattataaggctgacattggtgaaagtaacaattcaccattctatctacctgaacaacagagtgctagtactcatagaactgaggcagaatctgattctatggatacaattggtgcatcctctagtactgcatctagtcatacagaaagtcctgtaaagaaaggcctcaataaggctgaagaggcagaatatgcatcgattatggaggaactgccaaaactagaacatcttgttaaagggttggatgtcatgattggccaagccggtacagactatgaaaaaatgcaaaccctcatggctgaacgagaagagacacaatctcaaatcgatacattgactgaacgatggatggaattagaagaacgtctataaatctttgttttatgcgattttttaatacctgatatgcataggaattactttcagaatcattgataaaaatcacattttgtagtataatttcatcgattaacgataacaacgttacctaagtaggaggaaacatgagtaagtaccaatttttagatcgtcgtgtgcctattgaagaaggcaatattgccattgtgcaagatttatccaaatgtaaaaactgttctttatgccgtaaagcatgcgctgttgatatgggcgtattcgactattacgatttgacaaccaatggagatcatccaatttgtatccattgcggtcaatgtgcatctatttgtccattcgattccattaatgaacgttctgaaattgatgaagttaaggctgctattgcagatcctaacaaaatcgtcgttttccaaactgcacctgctgtacgtgttggattaggtgaagagttcggccttgatgcgggtacattcgtagaaggtaaaatggtagctgctcttcgtaaattgggtggcgactatattttagatacaaactttggtgctgacatgactatcatggaggaagcatctgaattgttggaacgcgttatcaatagtgatgcggtattgcctcaattcacatcttgttgccctgcttgggttaagtttgctgaaacattctatccagaattcttgccaaacttgtctactgctaagagtccaattgcaatgcaagcgcctacacaaaaaacatattttgctgaaaaaatgggccttgatgcaaaacaaatcgttgctgttgcagtaacaccttgtacagctaagaaattcgaaattcgtcgcgacgaaatgaattcctcttctgaatactgggatgtaccagaaatgcgcgatacagactactgtattactacacgtgaacttgcaaaatggttacgtgcagaagaaatcaactttgatgaattagaagattctgcatttgatccattgatgggtgaagcatccggtggtggtatcatcttcggtaatactggtggcgttatggaagcggctatgcgtgcggcttacaaactagcaactggtgaagatgcacctcaaacattgatcccattcgaagccattcgcggtatggacggtgctcgtgaagcagatgttgtgattggtgataaaacattgcatgtagcggctgttcatggtacaggcaacttgcgtaaattcatcgaacgcatgcgcgcagaaaacatccattacgatttcatcgaagttatggcttgccgcggcggttgtatcggtggtggtggtcaaccacgcgttaaattaccaatggctgataaggctcgtgaagctcgtattgtgtccttgtatactcgtgatgcagaggtacaagtgaaagcagcttgtgataatccagatatccaaaaattatatgctgagttcttcgatggcaaacctatgagccacaaagcacatcacatgttgcatactacatttgtgagccgtgcagaagacttaggtcctaatggtgcatgtacacctgctacatgtccaacgtctgtacctaatttgaaaaaagcagcagaagctgcaaaagcggctgcagaagcaaataaataattaattatttataaaattggataaaaatcttgaaaatccgcataaaatagcatatactaattattgtgagagacaataatataatgattcttagagagaggtatatgttaatgacctggggcggacagagagaaggttctggtcgtagacctcgtatgtacaaacgcgaatgtcgctcgttccgtttgacagacgaggaatatcaaatcctgaaaccattagtagaggctattagaacgcgtacagatgcatctaataagcaacacttagagtacttgaataactaaatattgacatggtgtatgtatataaaatatcttttttgtactcttccaataatagcaactcttatacatgccatgtgaataagcgaaagttagacccttttggggtctaacttttttttgtcttgaatttataatctaagtgcaactaaaaaaagattcatggctttctgataaaatagtgtttgcaaagacatctaaaaatcaggaggagccatgaatcattatactcattttacactaaaagagcgcgaaattctaaaacattttattgatataggaaaaaatcaaacagaaatttcaattttacttgggaaaaataaatcgtctatatcaagagaaatcaaaagaaatagtcaaaatggcgagtacataccttgtgaagcccatgacagatataaaaatagacgctttaattgtaaaccaagaaaaaagctagataatccaagtctatatgaatgtgtaaagaatttatttttgagacatcaatggtctccggaacagatctcctctcgattgaaatttgaaaattcaagcttcactattagttacaatacaatttacagggaaatatataatggtcgttttgatgaaaaagaattatcacatggaaatagaggagttgttcgcaaactacgacatcgtggtaaaagtcgtcatacaaaaaattatgaagaaagacgtggaaaaattcaaattagtaatttaattacagatagaccagctcctgcaaataatcgagaacgattaggtgattgggaggctgatacagttatggggcagactggtaaggcttgcttagtaacattaactgatcgaaaaagtaggtatctgctatgtaaaaaaattgcaaaaaagaatgcatttttagtcaaacaagcgatgattaagcttttaaaaaatcaacctctagaaacaataactccagatagagggaaagagttttctaaacatgcagaaattagtcaggagttgaatttagtagaattttattttccattaccatatcatccttggcaaagaggaacaaacgaaaacaccaatggattgcttagagaatatttcccgaaaactgtggatattaatcaatcagatagctatgttgaagcaaaaatgaaagaaataaatcttagaccgcgcaaatgcttaaattggaaaactccatacgaggtttatcattcagtagagttgcatttgacttgacaattcaaggtaaataaatacataaggtataggcattttaactatacctagttataatatgagtatacaagttgtgagtataggaggtgttagcttgttacaagatttattatcagaggataatgtatcgtttcgttatcctgctgagacatgggaagatgtgattcgtcatggtggtcagctcatggtcgatgctggttttacagatcctacatatacagaggctatgattgacgtagttcgtgacatggggccgtacattgtattggcaccgggtcttgctatgcctcatgcgcgcccagaaatgggggctaagcaagtcggtgcggctttggtaacgttagaaaagcctatcgattttggtagcccagaaaatgatcctgtatcagtagcgatatttttatgtgcgccgaataaggatgaacatattcaattgcttaccgatattgcaaccctatttgaggatgaagaattccttgatgcagcggtaaattttgaaagcattgaagatgtacaatcttttttagcagaacatcttgatgaagcgtaattttggaggtaaactatgatttccattttaacagtatgtggtaatggcatcggttctagtttgatgttaaaaatgaaaattgaagaaatttgtgctgaaaataatatcgaagcacaagtagaatcaatcgattttaatgcggctcaaggtcgcaaggcagatttaattgttactgtaaaggaattggcagaacaatttgaggacaaggatgtagctattgtacgtagttatattaataaaaagaaaattaaagaagatattttggaacgattacaacaaatcgctaagtaattcatagggggagataattctatggaaatgatattagaattcttacgagatgtattgagtcagccagcgttgttgattggtattatgtcctgtgttggtttaatcgctttgaaacgaccatttcataagattatgactggtacattaaaaccgattctcggctatttaatgcttgctgctggtgcaggtgttatcgttagcaatcttgatccacttggaaaaatgattgaacacggatttcatattaccggtgttgtaccaaataatgaagctatcgtagcagtagcacaaaaggtgcttggtgttgaaacgatgtctatccttgttgtaggcttattgatgaacttattaattgctcgtttcaccaaatttaagtatgtattccttactggtcaccacagcttatttatggcttgtttaatgtctgctgtacttggtactgcaggtttatccggtattgaattgatccttgtaggtggcttcttaatgggcgcttggtcagccatttctccagctatcggtcaaagctatacttctaaagttaccgatggcgatgaaatcgcattgggccactttggtagtttaggttattatttatctgcatgggtagcaaaatatgtaggcaaggcagaagaaagtacagaagatattgagattcctgaaaaatggggcttcttgcgtgactccacgttatctactgcattgaccatgattgtattctatttaatcgccgctattgcagctggctctgaattcgtagcaactttatccggttctatgagcccatacctatttgcagttatgagtgctatgaactttgctgtaggtgtagctatcgtatattctggtgttcgtatgattttaggcgatttgattccagcgttccaaggtatcgctacaaaaatcattcctaatgcaattccagcagtagactgtgctgtattctttacttatgcgccaacagccgttgtattaggctttattagctcctttatcggtggtatcatcggtatgcttattctaggtgctgtaggtggcgtacttatcattcctggtcttgtacctcacttcttctgcggtgcaacagcaggtatctatggtaatgctaccggcggtcgtcgcggtgctgcagtaggtgcattccttaacggtttggctattacattcttgccagcactagcattgccagttttaggtcaattaggtttccaaaacacaacattcggcgatgcggactttgccgtaatgggtcttgtacttggtaatgcctttgaatggattggcatggctggtatttatggcgtcgttgttattgcagcccttgttcttattattcctaacttcattaaaacaaaagggaaagttattaattacgtagaagaggagtaatgaaaacagctgagcaacatagtaatgtcgtaattcgatatatattcttaaccattggtgctataagtttttgccttggtacagcaggtatcgtattaccaatattgccaacagtccccttttatatgcttaccttattttgtttagctcgtggatctgaacgctttcatagaatgtttttggagtcccaattatataaaaagacagttggtgcgtatgaacgcgataaagcattgacgttgcgggcaaagttgtccattttagcttctgtaactacaatcatgctaataggtgcctatttttctagaaatattcctattgcccttatcatcatggcagtcgtatggattgctcatgttatagcattattatttgtagttaaaacaaaaaattaataataatatgaaaatcctcccattagagcatgctttaatgggaggattttttaggtccatcaattatatttagaagatgaatgtatatttcgtattttaataaagattacatgaattattactaaaatgaatttgacaattaatctcaaaataattactattaatgtattgtttataatatttatatatatggtgatactatgaatccacatgctcatatgaaaggacaatcaggggtatgtatggctagacataccgtatttgacggtattgatttgctattccttgatgtaaagcgtgaaacgattcaatttttcgcccaatctcatacaaagacctttgcaattaatcattgtgaagagggacgtattgaatgcaaattcgcatctggagaatacttgtatatggggccaggggatatgtcgttagggtggcatatcaggtccgattatcaacatgaaaattacttccctacaaaatcgtttaaagggatagttctattagtagatgtagaacgagctcaacatgtattagatacccttgtagcagatacacagattgatttggctgccatagccaatcgattttgtgaaaatacagactttggtatgatgatggaggaaactgagtcggttcgccaaattttttccagtttatataatgtgccagatcaaattaggtcccattattttaagctcaagattgtagaaatatttttattattatctgtaatctctacagactcctatgaaaaacgagggagttaccgaaagcaacaggtagatattgtaaaagcggtaagtaaatatttgtctaagaattttgtcaaacgcattaccattgatgatttatctcatgactttgatgtcccagcatcaaccttaaagcgttgctttaagggcgtatatggtgtgacgattcatcagttcatcaaagaatgtcgccttaatgaggcaaaacgtttactgcaagaaacggatgaatccatcctacaaattgccaatgccgtaggctatgaaaatggtagtaaatttacaagcacctttaaagattctgtaggaatgacacctagtgactaccgcaaggtataattacatattggttaattatatctaacaaaagtatcaaaatcgtataattttggtcttttcggagtagatatgcataatacactttgctaacatattaaatgtaaatgactttcaatgtcattactgtgttggcaaagtgtattttttatatccccggaatatagtaaacatgctttgtaaaattaaatatatagttgagaaaattaggattgtgaggaggcaacagtgaatcgatgggaacgtacaaaacgctatttagtcctatctagtgcggttgcattatggctaaatgcacctctcgtcgttttggcggataatgcagccgttacgacagatgtagttcatgtacaaggcacatgggcagaggaagaagcaaagttaaatccacagcaagtgcaaatcattaccaaaaaagagattgagaagaagcaggcgaagtccgtcgaagatattatatttacccaaacgggtgtatctagaaccgttgatgccatgggacgtgtaggtgtatctattcgcggtgcagaggctcgtcatacattgattcttgtggatggtcaaccagtattgggggattttgataagtattctggcgcagcggacgaagtacaacggttaggtgccgaaaatgtagaacgtatcgaggttattcaaggtgcggctagtgctaaatatggctctgatgcggtgggtggtgtcgttaacatcattactaagaaggctcttaagaaaccaacattgcaagtaaatgccgaagggatgcgtcgtaagagtgatggcgatttattcccattccaaaacttttacattcgagctgattcggggcagatggggaaattaaaggttggcttatcaggtagtaaacgggatttaatgcctgtccttgcatcggttaaacgccgtgcatcaggtatgggctttgattatgcaaaacataattttaagcctaatgtgcttcgctattatggtgatgcctctgatattggctttgtggcaacgtatgaggctaataaaaataataaatttgaaatgcgtttaaaccgatatacagaagatcttgtacgggatattaagcactctgattccgatttagaaccacaacaacattttaaacgtactgctaatcgtaatacgattaatctttcgtggaatgctaaagcgggtaaaagcgattggacagtagaaactaactattctcgcattaaagaagatgacgtagcgcttatcaattatacgggacgatcatcttatgaaggttctaatgagttacgatatatcgataatatcgaccatcgtcaactagatgttcggctcaatgcaaatacgcagcttaataataaacatcgtcttagttatggtgttagctatgctcgagaagaaggttctggtagccgattaaagagttctccaaatacgagtaccatgtacatcgacccttgggcgtatgataagagcttgcttgtcgataagctagatcgtcttgtgcgtaaaaaaggggataacagtgttaaggtttattcccatattcatgattataaatttataaactccagtagcggtatgccacaatgggatatggattatgaatattatggtgctgaaacggatgcgcaaaaaccaggcattacatacgatgattatgtaaattatggattgtctgaaggggctattagctcttggtctagtacatcccctaataatcaacctatatccgatgactttagaaaccgttataatgcattaaaatcacggttagaagctgaaaatccagacatggctaacacccgttctaatatcgtaggcgactactttaaatatggcgagtccagtgatccagaaatgcgtaaaaaagcgccaaaactgaatggtaaggcattcttagaagagtatcgtaatcgcgaccaacgattgacgactggtcaaggtacgattcgcaagatgaatgcttatatctccgatacttggcaagtgaataagaaccttacctttgttcctatcattcgactagataatagtagtttgtttggttccaatttatccgcttccatggggatgacatacaatgtgaaaggcaatcctcatcgtcgatttaaggccaatgttggcactggttatacagaacctggtatgggcgaattgtggtataactgggaaatgtatgcgtctaacccagtaggtattggcgtagcaaaacttggttggtactgggcggggaatccaaatttaaaacctgaaaaatcgctcaatattgatatgagcttagaaggtgagaataaaaacacttatgctcgtgttggtatattccataaccgcatcaaaaactatatgtcggtttactttacaggagaattccaagattttgcaccatatttgaaaggggatgcaaaataccaacgtgccccagatatgatttatagctttaaaaacatcggtatggctgaaattacaggccttcaagcggaagtacaacaaaaatttggtaaatattggtctggtaaattaggatatacctatttgcatgctattaataagagcgatccaacgatgcctcggcaattattggataaaccagtgcacaaggtagatattggtgtaacctatgacaatccaaaaactggttggaatggctccatttggggtgattactacatcaatatgctggatagtaacaccttgaacaatggtggtaactactggccagatattttatccggtgatgcaggtgtgtacaaaaagcaagtttaccaaaagaaaacatttggcatttggaatttgatggtccaaaaacgatttaacaagaatgccatgatgtactttggtattaataatatctttaatcatcgagatgatgaccgagcaacgcaagaacgagtatatcgtatcggcgttaatcttaagtttggtggcggcgatgctaagactacgccaatcggaaaagatggtaataaagctattgatgcaaatggtagcgcaactaatgtagcagtcggtaatgaagcaggcgtacaaaatatatccgaagttgttaaactaactgactttattcgtgctgattttgatacgactaaggaacgtggcgtcacatttatcggagattatcgtgcacgctggatgtctcacgacggcaccaatcgtccacaatctccattccgctctaattcagccatcggttctgctaaagcgaatatgtacgattctaatcgccatagttttgaacaacgcattcgccttggtcttgatgctcgcatcaacccgttcacaaatctctccgttatcggtagcatgaccggtatgagcggcgttgatacaagttggactaaatcggagtcaaaaggtttcaatcatcaacgtcttgatacggttgatcttacaagacatgtcaagaaatgggatgtttctgtgggtcgtttaaacgaacctatgggggctagtggatactggtttggtcaatcctatgatggggttcgcggtgtatggactggtaatgatacccaagttcgcgttggtgtaggtagctttaaacatagcacgggtattagtgattctgcgtatactcatgtggtacatgaagtgatcactagaccgccaacagcagcagagttgattggtattaaccgtgatgaatatccttacgatatcaataatgctacaaaaacagggtctgatggtgaaagcaagtccagtgatgatgcaccagcaccagatagcccttcaggtatttatgaatctacctataaaggtaaagtagatacgatttacttctatcaacagcttaaggatttacaggatgagtatgaagcgtataaagaatcattgaacctcagctggagtaatccaaatcgcgatcaagagcttgaaaaggctaatgcaaagctcgcagaaacacaacaaaaacaagctcaagtgatgagccgcttacaagatattcttacaaaggcgtaccctacagatatggctgagaagaaattctccctcgatattccatctggtggttatacaatgtatgaaatcactaataagaatacaggggaaaaactctataagaccggggacattatgtataatgtgaactcttctttataccctgaatacttaaaagaaaaggctaaaggtcttatcgtatctactgataataaagaggctttagtaaatcctaaagcctatgttgaaaaacatagtgacgaaatcaatcaatccgtagcagaaattgctaaatataatgctacagataactggagcaactataacaatagtgagcttgatgtggtttgggttaaacagccagatggcacgttcaaacaatcttatgattactatggacaaccagctagtgattatgagttcactggttacttaggtgctaaaacatataaatacgatagtggtagttatgtatttagtgattatgatgctaaagatgcgatttacaaaaagaactttacaatgtcctccaatgattatggtgaaggtagttctgactatggttggggcatgccaaatgcattgttcaactatatgtataatcttgaaaaggttgtacacgacgcagagtcggaaaataaattaccacgtgaagcgattggtaaaatcatcggtaatattattcaaacagaaggcattgttcttgaaaaagatacaattccacctattgaaacagcagcctttgttcaagtgaagaaacaaattggcgaccgtcttggcctacaagcatggtacttacgatcctttaatggtagtaaacgtacattcttaaatgccaatggtcatggtaatgatgaacaaagcttctctaatattgccaatgtatttggcattggtgctaaatatcaaatcggtgaaagtgcagtacttactgtagattatggtcaaaatagatcgaaatttggccgctacatgaatggtaatactgtatatgaccatgaacgaggaaccgcagactttactgtaaaaggtcatcaaatgggcggtacacctcatttctggatggctcgcctcgacattggtcgtgctgatatcgatgttcctaaatcatggaacgcattcatcgattataaatacttcgctcatggctcattcctcggtggtaatgggacaggtgctgtaccggatcgttacctcgatggtattcgtagctttacattcggcgctgggtatgtaccgcgcaagaatttactccttgaagcattctatacattcgatgctaagggcacaaataaacgagatactttatatggtaatgaaagctttaagttaggcgattatgcaagaattcaaggaacctaccggttctaatgtacagtctgtaaacagacagaaaggtttattagtatggaaaatctaaattatgtcattcacttgtttcatagtggcggatatgtaatgtatccattattattcttgtctcttatggtcattgcaatcgctgtagaacgcactttctattatcgtaaatatgcaggaaaaacctatatggtgacgcatgcggttaatgagtatgcaaaattgcaaaaatgggatgaaatagaaaaggtaatcaaagaaaatccatccattgcaagtcgtattgctgaagctggtttgaaaaacagcgctactgaagaaggtatgaaaacggcattctctgatcaaatgggggttgatgcagtaggcttcagaaaatatatggattacttaagtgcaaccgttacaatttccccattgttgggcctacttggtactgtaacaggtatgattggttcctttagtatcctcgatgctggtgcgggtgcatctgctattactggtggtgtaggggaagcccttatcgcaacggcgtctggcctatgtgtagccatcatggcttttattgtgtataccttctttagtcatcgtttggactctattatcaaccaaattgaaaatatgtgtgttaacatcattactgcaaaacgagaagggtggaaataactatgaatttacaaagttttcgtatgaaatccaagcctgaattcatgattatccctatgattgatatcatattcttcctattggtgttcttcatgatgaatagcttacaaacaatagcccaaaaggctttgtctgtacagttgccacaggcaacaaccgcatctgcaccagctcaattaccagtggtgcttacattagatgcagaaggtcacataacaattgataatgtcccaatgagcattgatgcggccgaggcaatggtaaaagaacgaattgcacaaaatccgaatgctagcgttatattacaagcggataaacgctctgctcacggacaagtagtggcaattatggacatgcttaaacaagctggcgttaaacgcttagctattgcagcagaacagaaaggataactatgggattaggcatatcatggaaaaaagcagccataatatccgccgtagttcatctaatcattctctttattgccgttatctttttcgtagttgttccggctattcaagagcaggaaacctatgaagtcgatctcacccaaagtgtgctcgatgatggcggtagtggtcacgctggtggtggcggcggtgataggtcatctctattcccaaaaccattgtctgcagatgaagtggcggcaagaacaaaggctgtagtagcgaatgtagaaccatctacagcgacggatattcctgatgcggtagatgtcccaagtaagggtagtgaaaatacatcaaatgtatctggtgaaagcggtggtgccggtaatggtccaggctctggtggcggcgaaggtggcggccatggtactggtacaggaacgggcgttggtgagggacagggcgaaggtgaaggctctggtaccggcaaaggctccggtggtggacatggtcgagctcatgtcgcttttgataaacaaggcttttataatgctgtaaacaatcaaaaggtgattcctcaacaatacattcgtcaacatagagaagttcatgaaacaatttacgtatttgtacgtattgatacaaatggtaatgctgttgaacaatatgtggaatctggcgatgacccattgttgagagaagaggctatggctgcggtaaatcgtgcattaccatatcaaaatccaacagacgacattcaaccggtaactgttccggtacgattcgacctatccgaaggtacagatgacgatgattaatcatacataatgtaaggagataaatatgggtactattattttatattcttccctcactgggaatacaaaaagcgtagcagaggcgatggcctctgttatgcctgaaggtacaccttgtgtaccggttaaagaggcaccggccaatctaggggattacgatactgtatttgtaggtttctgggtggatcgtggtacagctaataaagaagctgctaagttgattgaaacccttacaaatagacatgtagtattctttgctacactaggtatgtatgccgattctgatcatgctcgtgaaagtattgaaaaggcatctgccttattgcctaataaagaatctcttgtagatggttttgtatgccaaggtaaaatcgaccctaaggttattgagatgatgtacaaaatgttcccaccaggatctgctcatggacaaagccctgaacgtgatgcattgcataaggcggcagaaacgcatcctgatgaacaagattttgcaaatgcgaaagaatttgctaaatctgtgcttgcaaagttgcaaggctaatgagtgaaagggggaacgtatgagtttagcgagttttttcgaatcgattccagaaaaacaacggaatctgcaattaggattggcctgtgataatcctatgagtggcgcctttcctcataagcgcgttgttcacgcaggccttaatgggactttaatttcaccgaaggaatcacaatctgtatgggatgctgtaatgcgtggtactcctaagagggggcaaatgcagtgtgcttatatacatattccattctgcaagacaaaatgtacgtactgtgggttcttccaaaatggtacaagtcaaagtattgaagataactatattgatggcctcattggggaacttaagctggctagtgaatgtccacgcttaaaggatgggcttatccacgctgtatttattggtggtggtacaccgacatctctatctccagcaaattcagagcgcttgttaaaagcgattaaagaatacttaccactagctaatgattatgagcttaccctagaaggtcgcattcatgatttgattcctgaaaatcttgaagtatggatgaataatggagttaaccgtatgtctatcgggatccagtcgtttaatactaaggtgcgccaaatggtaggacgtttggatacaaaagaaactgtacttgaacggttagcggctctaaaggcctatgggcaatgttctgttgttatcgacttaatttacggattgcctggtcaaacaatggaggtttgggaacaagatttagctgatctagtaaaatctggtgtagatggcgctgacctatatcaattaaatgtattcgatggtagtgatctaaaccgcgatattacgagcggtaaggtaccaccagcagccacaacgtctatgcaaggggatatgtttgaatttggacgtacctatttagaggctcgtgcctatcgaagattgagtgccgcacactggagcgctaataatcgtgaacgtagtttatacaatatcttagctaaagcaggtgtaccgatgttcccatttggcagtggcgccggtggcaatgttgatggctgtggtatgatgctgcatcgtgcgcttaaaccatatgaagatatggtaagccgtggcgaaaaaccatttatggcacttatgaagcaaagtgatttacaaccatttgtaaaccaagtagtaagtcaattggaacaaggctacttgaatatcaatacattagtggctatggattctcgtttagatgaattgaattggttgtataaactatgggagaaacgaggcctagttttgtataatggcttattgtataaattgacatcagctggtgaattctggactgtaaatattacgcaaagtacattggaggctatggaatatattataacgggcaaaaactcctttgccttagaatccgtagcggcccaagatacgaagactacatctaaagaaaatcctaatcaagagatacgtggtattggccaaggtaaggctaatatttcggtaccaaccgatgaacagacagaagcgcaacgcaaagaagcactcatgacaaaagcgaaagaagaaatcgctaagagtggtgcctctggtgaatcagcaaatcgcatgattcaagctatggcgaatttgagcgctgatgaaattgaatacatgatggaacgtatgatgtcctaattatcactaacaacctctcatataaataactacaaacattgacaggtacgttttatcttagtattaaaaccctagattacgatctattctttaaactggactattcagtttaacgagaatatatcgtggcctagggtttactttttatgtttcggaatgtattctgtacatatagttatacaaggtattaggaggttagtatgaatgcatttcctaacgaattgatagatatagttggtattggggctagtaccttagatcgattcatcgtggttgatcattttccaacggggcgtgaggtgcaacaggccatctcgtctactacagatggcggcgggccggtagcgactgcactagccacggctggtaaatatggatctcggacggtaatgattgaccgtattggggatgatatggttggacgctatattctagaggactttcataaatataatgtcaatacagagggcatccaagttgatgtggatgctaagagtggaactgcaacgattcttgtgaaacagaagacaggggaacgggctgtattttttgaacgatctactgcaactgagcctgagttcttagaggctcataaacaactcatagaatctgcctatattttgcatatcaatggtagacatcgcaaactcatgcgctctgctatggccgttgcaaaagaggtaggcactattatttctttagatggtggtgctcaacgctacgatgaagatatgaagcctattacagaagccagtcacatcgttatcgtagctcgagactatgctgaaaaatatacaggcacaactaatttagaagatgcttgtcgtatcattcatgaacgaggagccttcatagcaggtgttaccgatggtgctaacggtagttattttgtatggcctgatggaacatcttatcgatgtgaaccattttctcaagctactgtagtagatacaacgggggctggggatagcttccatggtgcttttttgtatatgcttacaaaaacactttgcaaaatagcagatggtactaacacatcaactatgaatgaaacgagccagtccttaaatgctatcgatttactccatagttgtgcgcacgaggacttagaaaaagcggctacttttgcttctgctgtagcagctcttaatacgcaaggaattggcggccgcagtccattgccgagtttagaagatatcaaggcgcttataggataggattatggttatgtggaaaaatacttcaaaaaatcaagttcagcaatatatgcaacataatccttatcgtctattagctcttagctttttggctgttatgactatagggacgatattgctcatgttgcccctatcaaatgctcaaggccatagtacagcgcttgtagatgcagcttttaccgcagtatcttgcgtttctgtaacaggattggcgacagtagatacctattatcattggtccttgtttggcaaaatcgtcatggtaatccttatccaattaggtggtttggggattgtttcctttaccactattatcgctctagtattagggcgacgggtaggtctaaaaaatcgcgtgcttttatctgaggatgtagggcaagatggaatgaaagggcttttacacattacgaaaaagctaactatttataccttttgtgccgaaattattggtggtattctctataccattcagctatatccttatattggtgatgctgcattatatacgggaatcatgcaatccatctcgaccttttgtaatgcagggtttatattctttgataataatctaccttatgccatggtgggcgatgtattatttaatataaatacaatggcccttattgtaataggtggtttcggatatctcgcaacctttgatatttggtcgcatcgcaagctacgacgttttgtagatttaaaactacacacaaaaataatgttagttggcacaacggtgctcatccttttagggactattattttcttgggagttgagtgggcgaatcccaaaacttttggtcctttacctatatggaataaggtcatggctgctctatttcaatcgattacccctcgtacggcaggtcttgcaactgtagattataatgatttacatcccataactctgtttattaccatcatttttatgtttatcggggcaggtcctaactccacaggaggaggtgttaaaattagtactattgctgtcgcttttctagcatcgcgtacattatttaataaccgttctgatacagaggtttttgaacgtcgtatttcgttggttactgtccttaaggcaaatgggataatctttttatccatccttcttgttttgcttgctacttgctatttagcttgggatgagccgtataactttattcgaatactttttgaggtaacctctgcctttgggaccgtaggtctttcgacggggattacacctgatttatctgaaagtagtaaatgggtgttgatgcttgtcatgtttacgggccgtgttggggttatgactgttattggtacttgggcgttaagaacggcaccgactaaaccaattagctatgcagaagagcgtgtattgttataaaaacagattagattgaatataaaagggggcatatatgaaacataaaacgatagcagtaataggtcttggtcaatttggtggcactgttgccaagatgttagcttccatggatcatgaggtattaggtgtagatattgatccagaagttgtacagaaaatttcaccatttataacacatgctatagttgcagatacaaccgatgaagaggcaatcaaagcattggcgctaagccagtttgatatggttattgtggctataggtggaaatcttcaagctaatctaatgacagctatgcttcttaaagagttagacgcacctaaaattgtggccaaggctgaaaataatatacaaggtaaaatgcttcataaaataggtgtagatcaagtgatttaccctgaatatgatatggcattacgtcttgtacaatttttaactagagaccatgtgatggattatttacaactatccaaaaatattagtcttatagaaataaaaatgccttcatttatggttggcacatgtttgaaagattctaatttgcgtgaaaaatataatcttaatgcagtaggcataagacgcggtgaggatttagaagttccaccaaacccaattaccatcctcggtgaagatgataaattattagttattgggaataattctgatttagattcattaacagtgtagtaagtatacgaaacagatataattatatcgaaaaattatgatacaataggaatagaattcagtataggccgtacgtattcgtatggcctttttagatagaaaagaaggttattatgacagaggaacaatatataacggctctcaaaaacaatccccatggcatacgcaatatccctaatcctacagaggaaatgcagttagtctgtgtggaacagaatgggatgctattacagtacattaaaaatcctactgatcgagtgattgaaactgcgttagcacagtcgccacgagccattcaatatgtggacaatccaagtgacgaattattgatttcattagtcaaacaagattgggcggtacttgagtatattcaacatccatcagatgatgtggttcgcattgccttagaccaatcgggctgggccattcgatatattacaaatccatcagaggaattacagttaagggctgtagaaacacaatatgatgcattgcaatatattgccaatccatcagagcgggttcaaatggctgctgtaaaatctaattatttatcattgcgctatatccagaatccgacattggacattttgaaagccgccgtgttacaagatccgcaggctatgcgtcaaattacgaacctagatttagatacagtggtagagctattgaaggtttctacattgatacttgggtatgtaccgaaacaaataggattgactgtcgatatggttcgacaaattataactgaaatgattgcaaatcctgctgtagaagatcgctatgtgcgagaaatcgtaagcaatcctgccattggtggacgccaatcaacatggcccatcgatgtattgtcattagttgatgcatacggatctatagaggcaaagaaaattgctattgatcagtatttactatattaattaagaaggagtcataatgaattttacagatacaatggctagtgtggaattggtactagccgctaatcaagtaccattgctcgtcggtgaaacggggattggtaaaacatcgctagcagcgcgcgtagcagagtctcatgattgggaactcgtcaccattgatggtaatcttttaaaagaaggcgaaataggcggtttgcctacggtggaaacagtatctcataaagatagtaatggggcggttaaagaaataaagaccaccgtgtatgccgttcatcatacattagaacatgtatcaagggctgttaatgcaggtcgacatgtgttgctgtttatcgatgaaatcaatcgggcagagcatgcggtgcaacaagaattgatgaatttgattttgaatcgagaaatcaatggatttgctttgagcgatgatgtgcgcatcattgcggctatgaatccagaggattcctttgactaccaaacgattgatatggatccagcccaacaaaaccgtttcgtatggctttatatggaagcggattatatgcagtggattgactgggctatttctgtaggcattgaagataaggtggtggaatttatctcctcttatccagattatttaaatcaacgtcatgaagatgacatcgatgcgacaccgcgttcctttgaacggatatctcatatttatggtatctataaggaaggtggttatagccgtgaagtattccaaaatgttatccgtggtaatgtgggtaaactcattgcagaggcctttgttaatttcgttgaaactgaacaagagccattgatttcctttgatgatgtgttagaggctgtacataaaccgggtgccattatgtccttgcaagaacgtgttaatggtgaaagtcctactcgcctctatgtttctgcgaaaaatatgttgtatcgtttgaatcgtaatagtaatgccgaagaagttcattactttattgagttcatcacattgtatccaggtgatttgcgcattgccgttatgaaagatttacgcaacgcatatgctcatgtgtatagctatgctattgaggatgagctctttattgaaacgttttttgaagccaatcgttaattgtgaaagtgcatatgacaggtagaaattatgaatcgaaatttagataaagacgatattcgggatgcgtctgacctgctcactcatatcgacggatgggagaagacggggcgttatgatgaagaggctattaaggaactcgatcgctggcatagaaagcgaaatcagattgctcgtgatgcggatgcgttatatgagcaactatacgcgcgttatcaagcgtatgtagatgaacatccagtgcataaacaacaggcagaagatattgctgtagatatggtaaatcacaatatgtcggatagtcatattggcacgataggcaagggattaacggaactgtatgatggtgaaggcacagatctcgatgtgttgacacaacacgtactagccgatggctatgaacaacggctatggcatatcttgcatgatgtaaatagtttattgcttgacgaggatcaattctttggctatttttatctacaaatgacgcatcgtgtacgcttagatatgaccagcgcttttggtgttaacctcaaacacggtggctatgtgctatacgtgaatcctttcattatgttacgacaaccgccggatgttatgaaaaatggtattaagcgagaaatattacatgttatatccgctcatttgatgcgggtcaaagaacttagtcaacggtttaataaaaaagctgttcacatggctatggacatggttgtaaacgattatttagaacatgtagaccgcgatgctataaccgttgccaatgtaaatgcaagatatggtcttttactaaagcgatttcgtacattggagtactacgcaaaggccattgataaagcgatgcaggaaaaaccagatctttttatagctgtcgaggattccagtcaaatcatagccatggagtttaatgctgattcaagccatgatatttgggatgagtccgaagctatcgatacagagacgatggataaaattacggaacgctatatcaacgaagcatcaaaaggggatatggaaggttatgtaaaaagccttatcgatacattccaaaagacgcgccgttccttgccatggtatttttatcttaaaaagttgatgggcaaggtggctagtggacataaaaaaacgacgatgcgtcgcaatcgtcgtcaacctgagcgtctggaattatctggcacattacgtcaacataaggcaaatgtgtgggtagccctcgatatgagcggtagtattacagatgcggaatttaccaatgctttagaacaagtactacaaatcgtacatgcctataatcatcgcattaccattgtagaatgtgataacgaagtacgtcgtacctacacaatggaaactgtgaaagacgtaaaaccacgtctcgatgtgcgtggatcaacagccttttcacctgtattttctctagctaatcaacatcacgtagatttactcgtatactttacggatgggaaaggcgaagaccgccttcgcgaagtgccaaaaggctacaaagtactttgggtccttacgggctctgaacctaaattatccttgtataatccgcacggcatagttcgtgaaatgggctatgtagccgttgacgaaacacaagacattgacgaattcgtgagaatgagcagtcggtcggggttttccatggcaaatcaagagtaatcattgattaccaatcttagagttttttgattacggcagagggggacgagggtgactaaaatcttccaccggctttttcttcgccctaaagggctcaggccaaagtcagattttagtcaccctcgtcccctttctgaacgtagatgctaccaagcttattaagattggtaagtcattgattacatcgggtaaaaagagaacgggccaaagtcagattttagacacccatacctcccttttgaacgtagatgatatttgctccattaagattgttaagcagctgatcacttcgggcataataaagaacgggccaaagtcagattttagtcaccctcgtcccctttctgaacgtagatgctacctagcttattaagattgttaaggcactgattacactggggttctgaaattagaacaggcctgttctaattttaaaatacatatatcaagggcgggaaagactagattttagacgtccctatatcttttttgagtgtaaatactatgtaatttattgagattatgaaagtattcttccaatataaaaggacgcaattgcgtccttttttgcactctattgatttatctgtattagttttataatagataaattaccaaggtggaatgacaaaaatggcccccaaactctgactttggcctgagcccgtagggcgaagaacaagcctgtggaggagttttggggctgtttttgtcacaacgttgtaattagttatttaaaacaatagaagaacctggatcgataataactgcagtttggttgtatttgccttctactaggcttgtgaatacagctggttcgcggtcgataacaggccatgttttgtagtggattgggatggaaatacgagcttttacatagctagctgcaagggctgcatcttcgacgcccattgtgtagttatcgccgatagggagaagtgcatagtcgatatcaccaaagcggtttaatagtttcatgtcgctaaagagggcagtatcgcctgcaaagtatacgatgtcgccaaagaagttgacgatgcaacctgctgcgtgaccacctggtacgccagcgccatggaatgcaggaacgatacgaacggaaccgaattcaaagtcatatttgccgccaaggtgcatcgcgtgtgtacggcaacctgcagcagctgctttgccagcaacttcagctgtagagattacgagcgcatcgttagctttagcgatgaactctgtgtcgccgtagtgatcatcgtgaccgtggctgacgaagatgtattggcatttaatatcttctttttttgcgatgtcccatgtattgcctgttaaaaatgggtcgaaaatcatggatacgtcaccgtttgttaacataaagcaggcatggccgaaataagttaattttgttttcataggaacacttccttcctcatatatactaatttaattatattgtataatagaaatggaaaaagtaaaactattgatgtacatttatacataaaataaggaaatattatggaattaacacattttgatgaacaaggtaatgcgtggatggtggatgtttcggggaaggattatacgcatcgtattgcggtagcagaaggttttatcgctatcaatgatgatatttatgagcgcattcaaggtgggacgatgaagaaaggggatgttttgtctgtcgctcaattggctgccattatgggggctaagcaaacgagtaatcttattcctttatgccaccccttgatgcttacgaaggtagaggttcattgccatcttattgatggtgaaagtccggctttcacaacggatacacataataaagcggttaaaattacggctactgttaaaaccacagggcaaacgggtgtcgaaatggaggcccttacggctgttcaagtgggccttcttacggtatacgatatgtgcaaggccattgataaaggcatgattatggggcctacgtatctcgttgaaaaagatgggggcaagagcggccattttattcgaagtagcagtaaataatcttagtgtatagtgctatttgtgtcccacctaggaaaaatagaattcactacttgaatacgcactttagattaggtagaataatatagatataagaatagagggaataatatggaaattgtattatatgaaccggagattcctggtaataccggtaatattgcacgcctttgtgcggcaaaccatatgaccttgcatctcatcaagccattgggtttttccattgacgataagcacgttaaacgggcgggccttgattattggcatttggtagatgtacaggttcatgaaaatatagaagaactatatgcgaaatatcctgatcgtcgttatttttatgctactacaaaggcaaaacatgtgcattctgatgtgaagtttgaaatcggtgatatgctcgtatttggtcctgaaactagaggtttacctgaaagtttattagaaggtaatgaagaaacgtgcattcgcattcctatggtggaagaggcgcggtctttaaacctttctaattctgtggctattattgcctatgaggctatgcgtcaattggattatccagatttgaaagaagttggcaattggattagccataagtaaaataatgtatgatgtttgtgagacttagctttcacaaagaatagtgtatgcaatagggggaatgaatatgaattacgataaagctcatgatttagcacacgcaatgcgtgaatctgaagagtataaagagttgatgcaagcgcaagaggctgtgaaagctgacgcagaagcaactgcattggtgcgcacatttatggctcaacaaatgcaatgggaatatgctaagttgtccggcgcgcctgaagcagatgatttgcaaaagaaacaagaggaattgatgcctcaaattcaagcaaatactgcagctgctaattatttgcaagcgcaaatgcgttggagccaagtatctaatgatatttacaaaatcattagcgaaccaatcactgaggggatgaaagtgttagatcatggggaaaaacaacaaccacaacattaaggccctacaaacggctttattagaaacattaccaagtacacgtgtacgagaagaggagtacttgcgtcatcatacgacctttaaaatcggcggtcctgctgatttgttcgttgagcctacaacgatggctgaattgagctttgcgcttcgcactattcacgagtttgatgtgcctgttaccattattggttgcggatccaatattcttgtgaaggatggtggcattcgcggtgctgttgtatctgttcgacatatgacacaaattatggactgcaatgataacgtattgtgtatcggttctgggtatatgttgaaagacgcttctgagttcgcctgggaaaatagcttgaccggccttgagtttgctatcggtattcctggcacattagggggtgccgtatttatgaatgccggcgcttatgatggggaaatgagccatgtagttactgcggtgcgagctgtagattttcaaggcaatatcaaagaatacgatgcatcgcatttagattttgggtatcgtcatagtgtattccatgataatcatgaggttattggcgaagtgattatgacgcttaaaccaggcgataaaaatgttatcaaggctagaatggatgagcttacagagaaacgcgagtccaaacagcctttagaatttgctagtgctggatccacctttaaacgcccaccagggtattttgcaggaaccttgattgaacaaacaggccttaagggcttatccgtaggagatgcgcaagtatcccataagcatgcgggctttgttatcaatacaggcagtgctagtgcgaaggatgtactcgatttaattgctgaagtacaacgtcgcgtgtatgaccaacatggtgtacatcttgaaccagaagtacgtatgattggtgaagattaatacaaaaaatactcatacaagatttcttatgaaccgttatccttttttaggtatgatgaattcataagaaatctttttttatagtgttttctttgacatgattgaattagttacgttataattaagtgttgccaattttgggaatatacctatatagcgactttcacaagcgttatatgatatagaatatactaaaggaattaaagggaggatcttatgattcgcgaaaatcttcgtaatgtagcgattatcgcccacgttgaccatggtaaaactactttggtggacgcattattaaaacaaagccatgtgttccgtgaaaatgaaaaggtagcagaacgcgtaatggactccaatgatttggaacgtgaacgtggtattactatcttgtctaaaaacactgcagttatgcatgatggcatcaaaatcaacatcgttgatactccaggtcatgctgacttcggcggtgaagtagaacgtgtacttaacatggttgacggcgtattgcttctcgtagacgcttacgaaggtccaatgcctcaaactaaatatgttttgcgtaaagcattagaacaaaaattgaaaccaatcgttgttatcaacaaaattgaccgtcctgaccaacgtgttaaagaggttgaagatgaagttcttgaattgttcatggaacttgaagctgatgatgaccaactagatttccctgtagtatacgcatctgctcgtgctggtgtggctaaaactaactgggatgacgaagctgtaaatatggaaccattgtttgaaacattgattaaagaaattcctgcaccacaaggtgatttggaaggtcctcttcaattcatggttactacacttgattacgataacttcatcggtaaaatcgcagtaggccgtatcgttcgcggtaaaatgaaaactaaccaacaagtagctatcatgactggtgaaagcactcgtaaagcgaaaatcggtcgtgtatatacatataatggcttgaaccgtgttgaaactgacgaagctgaaatgggcgatatcattgcattcgctggtatcgacgatatcaatatcggcgaaactgtagcagatgctgaaaatcctgaagcattaccatccatctccatcgacgaaccaacattgtccatggtattctccgtaaacaactctccattcgcaggtcgcgaaggtgaattcgttacatcccgtcacttacgtgatcgtttgttccgcgaagttgaaactaacgtttctatgaaggtagaagaaactgattctgcagatgctttcaaagtatctggccgtggcgaattgcatttggctgtattgatcgaaactatgcgtcgtgaaggctatgaattacaagtaggtaaacctcgcgtaattttcaaaactattaacgacaaattgtgcgaaccattagaagcattgactatcgacgtacctcaagaattcatgggtactgtaatggaaaatcttggtcaacgtaaagctgaattgactaacatggttgagttagctggttaccttcgcatggaattcgtaattcctgcacgtggtttgatcggtttccgtgcacaattcttaacagctacaaaaggtaatggtattatgaaccatgtattccatggttatgcaccatacaaaggcgaaattccttcccgtacacgcggtgccttggtagcattcgaaaatggcgaaactacaccatatggcttgaactctgttcaagatcgcggtacattgttcgttggtcctaaccaagacgtttacgcaggccaagttatcggtgaaaatactcgtgaacttgatatggatgttaacccatgtaagaaaaaacacgttactaacatgcgttctagctcctctgatgaagcagttcgcttgactccacctcgcatcttctccttggaacaagctcttgagtggatcaacgatgacgaacttgttgaagtaacacctgaaagcattcgtatgcgtaaaacaatccttgatcgtgctgcacgtgcgaaagctgcaaaaaataaaaaataatatctatacacgatatatgaaaacgacgctcctagtgagtgtcgtttttgtatttttgtaaggtttaggtattcctatttattatatgtacatgaaagttagatgataaatttatcatttatgatagataagcatagtaatgcctatatatataaagtatgcataatagcttgattatacgggtataggtatatacgaaacctccttaaatttgtataataatagcaagtttgttgatataagttattgattatggaggtttttatgaataagaaattattagcatccttatttgctgtaggtttggctgcaggttttgtatgctcttccgttgacgctcatggtgtattctttgctaaccgtaccgatgaaaaagtccttgttcttggtgaaggccctgtagataatgcctatagtgcagatatggtgaaaaacattactggctatgatgtacaaggcaaacaaattccagtacaagttgttaaacatgaaaaaaatatagctattgttccaccagcagatcttggtgttacagtaactaattttgactatggctactggactaaaactaaagatggcaaaatgattcataaaccaattacagaagtaccaggtgctgttaagagtacacatgctatcaaatatgatattcactattggaatgcacaagcaaaacctttcgtagataaaaatgcatttatccaaatcattccatctgttaacccattaacacttagaaaaggcgatacttatgaaattcaagtattgaaagatggtaaaccttatgcaaatgcacctcttattaaagatttagtcaatgatttgactggtgaagctaaagctgatgaaaacggtaaagctacggtagcggttactgctgatggcttaaatgtagtgggcgtagaagtagcattccctacacaaaataaaggggaacaaaataaatactttagtgcattgtcattccttatttctcctgaagaataataattagtattttctagtacttaccgagtgtgtgagttaataaaagacctcctaagttggccttagggggtctttctatgtttttgagtgtatataaaccagtctgttgagagtgtaaattaagactggctaagaaagaagagagaactttatgaaattatatcgtcatgtatcggcagtcatggctgctttagtgttaacaggtttatcttattctgctggggctactgatattaatgtatcgagtgataaagcagaagaattactcggtttatccatggggtcccctacacaaacgcaaccagaggttaagcatattgaagatacattaactattaatgtacatggtaaaagcttgacagatgaagggaaaactaaaaatgtaacaggtatttacaatggatttggatcccagttaacggtagataaggatttagtggttcgtcttaaaaatgatgcgcctgcttctaaacgagaattgggtcattattatatgagtgctgtttatgctggttacggtgggaaggtgccacgtcttagtaaggataatccagaccgagattttggagataccaatattcacgttaaaggtaatgtagatatcgatgctatcggctctggtttacaagtcaatcaacgaggtcatatccttgttgatggaggcggtaagattatcactcatcctgtagaaacatctgatacctattctgtagtagcagaagaaggggatgtatatgttaatgcaggcgctgatggcaaacatccaggtactaaggacctagttgctgttggcaatgtgggccttatcaataaggactatggccgcgatccaaatcataatgttgaaccaactaatatagcactagctttcacaacacctgactctagccttagtggtgctgttttgaatgaatatgctgaaagcaataaaaatccacataattctggcgccgatatttatctacaaaatggggctacttggaataatgaatggattggcatggaacgtcctactcctaaaaaagaacgtccatctggggataatgaggcgtacctatataagggaagtaaagtacgtaatctcgtaggtggagcaaatccaactgcagcaggtatcattcatccaatcgatgcacatccaatcacgattcaaaactatagtggttttgtgaatgctgattacaaagcaggtacaccagctagtgaagaaggtaaggggcaaatcattatccaacatgcggctgacaatagccatgtaacggtacaaggggatagtgctaaaaacttaaccgatgatgctagctatcgtactgaaatgcaatctttggctaataaattgcaatacactggaaatgataagaaactagctaccgcagttcaaatcaatgaaggaattacacgtcctgcagctgttgcagaacttggtacagatgcatttgatgcacaaggtaatctcgttgtaggtaatacggcgactgttaaacataatggtgaatcttcgttggtaagcggtactaaatccgctcttgcatctacggctatggcatggcgtaataatacaaacgatttacaacgccgtttaggcgaccttcgtttagctaatacagatcaaggtgtatgggctaaatacgttggtggtaaatcaaagattacagatggcgctgatgctcgtatgacctataatggtgtacaacttggttacgaccataaggtatcgaatggctggatctttggtggtgctctagattacagtacatctagcaattcctacgacgttggcagtggggacggtaaaatcggtggtattgcgctatatggcacaaaacaacatgatgatggtcgctatctagacatcatcgctcgtggaaaccgtttgtccaataattacaaactttactctgtaggtggacaacgtgtgaacggtgattaccacacatttggtacatccttgagcgccgaatacggtaaacgcattaagaaacaaaatggcttctacatcgaccctagcgtagaattcatcgtaggtcgtttgaatggcgtttcctatgatgctaatattgctggtggtggatccatgcatgtgaaagcagacggtgttaactccgctgtgggtagattaggttttggcattggaaaagaaacagaaaaatctaatatctttgcaaaactcgcattggctcatgaattctctggtaagatgaatactacatattctgcaccaggtaatccaacagtaaaaacggaactcgatttgaaagatacttggctcgatgctgaaataggtggttcctggagtgttcgtcctagtacatacctatatggcacatttacgaaaaactttggtgctactatagataatacatggcgtatcgatgcaggggtacgacataatttctaattgaatatatgaaaaaatgtagtagcctgaaagagagctactacattttttgtttataagataaaaattttttgttttataatatgataattgattatttattaaaaattactaggggtatattttacggcgatgatgtgtaattatattttctttaattctgaaaagaggtttcgggcatcttttccttgcacgtgattagctatatctgattcatattgtgttattgctttatcgatttcgttagagcgtgttagtgattcgtatgcttccatactcataacaacaagttcaccgtatccattttttgtaacgaaaacaggatcattagattccttacacatatccatgatttcatttgtattgcgtaagtctttcataggtattattcttggcataatggcacctcctaataaaacgtattaattatgactatattgtgacataattaagaccgtataacaagtggatttattgatttaacaaattcatttttctatgctaatatataaaaactagagcttatacaattttttaagtaaaaattaggagaacataatatgaaagttttgatcgtaaatggtagtagccatgtgaatggcacaactatgcaagcagttcaagaagtagaaaaggtattccatgatgccaatgtagagacagaggtcattcagcttggcaataaacctattcgtgattgtattcaatgtggctattgttttgaacatggtgaatgtgtatttaaggatgatgatgtaaatgccttcgtagaaaaagcgaaggatgcggacggatttatttttgccacacctgtatattatgcacatccaagtggtcgtattttatcctttttagatcgtgtatttttcagtgcagaaaatgtaacaccaaatccatttgcctttaaaccaggtgcatccattgctgtagctcgtcgtggtggtacaaccgcgtcctttgatgtactcaataaatactttggtatttctcaaatgccaattgcaggctctacgtattggaatattagccacggcctagtagcagaggatgctaagcaagatgaagaaggcatgcaaaccatgcgtaacttggctcgtaatatgatttggatgatgcgtagctttgcggtagctaaggaacaaggtgtaccatatccagataccgatacagagaaaaaagtatctacaaattttgttcgttaataactcattgcttggtgaagtatcaaaggagataaaatggttaatgttttatttatctgccatggcaatatttgtcgttctacgatggcagagttttatatgaagcatatcgttaacgaggcaggtttgactgattctatttatatcgaatctgctgccacatctcgtgaggagataggaaatgatacccactatgggactaaacaaaaattagatgcaatgggtattccttatactcgtcgtaaggctcgccaagtgacgatagatgactatcataattttgattacctcatcatcatggatgaaaataatgcacgaaacttacgtcgtattatcggtgatgatgtggatcataaggtgcataaggctatgacctttgttggtgaaagtcgtgatgtaaaggatccttggtatacggggaactttgacgaaacctatgatgatgtcagtcgtagctgtgatgcactcttacaggtcattaaaaagaatatgtaaaataatacgcctctattattatttcatcgattagctaatgataggggcgtatgttatatgtccttgtgctaatatactttatactatcgaagcatgctgtaatatggtataattctttagtacacatgcgcctatagctcaggggatagagcgccggtctccggaaccgggtgcgcaggttcgaatcctgctaggcgcaccaatagctaacggcttctcgaaatttcgagaagccgtttttatatgttactatctatatttattacactggattcctctggatctaaattccttcatgagtatgtctattgatttatcaataatttcttcgttagatatatataccatttttttgtaatagacagtaccatcaaattctatccaacggcttgtcttaccatttattttgcaaatcttcattctcccggcccaacttcccatgctgcggaattttttccctttagagaaacgcacttcgcgaatatcttttaatttataggttcttcttactaaaccaatgcctatagagacttgatcatctttaaaatagagaagtttataacgttcttcaggcggcatggatttaatcatagataagttataagtagcaaatgtcacggcaatagcaactaatacaaacattaggattagtatataagttcccatactttcaagtcctccttttctttattataataaatataagtggtgtacgaaataatttttatcgttaacattgaagcgatatttgtatgtattaataggagaaaaatgaatggacatacatgaacgtactactaaatggagtaaaggtatatctgaaatgtattctatagtttacacttcatgaatgaaatttcatatcagttatatatttgatatggtataatgttaccaaattattcatgttgttcatgttattttggttttcattatagaattacagatatggagagaggattatatgagttcattaatatttctgctgatattagcattggtaattttctttattaagcaatataatacattgcaaaaattaactgtagagattaaagaagctcgcgctaatattatcgtagcctatgagaaaaaggtagctattatcaatcaatactctggtttagttgatgaatatggcgattatgagaaatctattcaattaaaggtgtctgataatttcttggaaatggcacgtgcaacggctaaggctgttcaaaatattacggcgttagctaatcaattcccagagttaaaagcagatagtcaatatggtaaatttttagaagcgattagtgaaaatgaaactttcatttctaataaacgcgaaatttataatttccaagtaaaagaatacaacagtgctattgcgcaaattcccatggtattcgtagctgctatgttgggctttaaacaagcgccattctttgatcctaagaatgaagaagctcttgcagcattcagcggtgcagatcctgaggctatcaaaaacttagctaaagaaggtactgataaacttagagatacattcgataagaaacctgctgaatttaaacctcaagataaacctgaacaatctgaacaaccaactagtgtagaagaattagaacaacaagttttaaaacaaaatgagcttggtaaatctgtagatacagaagaaactaagcaagatgataaaaaataatttatctaactataagggactataccttatgcaaatatattgcatgtgggtatagtcccttttgatgattattgggaaataatgaaatatattgttttctaatcattaaaatagtacaatatgattagattagattagattagattagattagaaaggaggtttatatgtataaagaatcggaaataatagagttgaaaagagaatatacaacggatattcgaaaggagattattgcctttgctaatactaatggtggtactatttatgttggtattgatgataatggcgatattgtaggtatagatgattgtgatgctcttatgttgaaaataggtaatttagtgcgagattccattaagccagatattactgcatttattcattacgataatttggtagagcatgataaaaatatattaaaaattacagtccaacgtggcacgttaagaccttattatattcatagtaagggattaaaacctagtggtgtatatgtgcgacaaggtttcgcttctgtgccagctagtgatatgttaattaaggatatgattcgcgatactgacggagatagttacgaaagtgctagatccttacaacaaaaattaacatttaaacggttaaaacatgaatttgatagtaaaactctagcctttaatgatctgcaaaaaagaaccttaggaattactgaatttgatgatatttataccaatctggggttgctattgtctgatcaatgtcctcatgagttgaaaattgcagtatttcagggaacagatggatatatttttagagataggcgtgaaatcagaggggccttattagatcaattataagaagcgtacgagtatatagataatcgaaatgcagttaaagccactattgaagggcttcatagaaaggataaacgagattatccacagattgctattcgtgaagcattattaaatatgctagttcatagagattattcgtatatggccagtccaaccataggcatatatgataatcgtattgagtttacatcgcttggcgggttgccacctagaactagtttagacgatattttactagatgggttttcattgtgccggaatcccaaattagctaatgtattttatcggttagaattaattgaagcctatgggacaggcttacaaaaaattatggatgcctataaaaataaaacagttaaacctcaaattattgtgactactaatgcatttaaattaatattaccaaattgcaatattgatgagcctatatctgaacataatgtacctaaaattagctatcagcaagaagaacagatcattaatctagttcgtgattgtggaagcatcaaacggagtgatgttgatacagaattaaaagtagcacaggccacgagcggtagagtgttacgacgattagtggagaaggggcgacttaaacagattggcaagggacgttctatacgatatattttatccgatacaatgtaaatatatagaataggatattcgatactttagataatatatgtaaatgtgactatagtaacacaaattttattgagaataatatacaatgaaaatatagtatccatatacaaaatctgaactgcccatttggaatgatagggccatatggatattgcgttaactatatttacagtcacatatacagtattatagtagaggatataatatgaataatacaatacaagaagtatccgttgatctccatgattggcgcgatgaacaagcggcctggaataatcgatctaaatttttcgtagaactacataatcgagcagatcgtaaggcacaggtaactgactttctctcatttttaaaggacgaacatctattaccttcagctggtggtaccgctctcgacattggttgtggtgttggtgattatgcacttggattagctagagaaggttacaaaactacgggaattgatttgtccgatggcatgattcatggtgcaaaacaactggcagataaagaaggccttgatgtgagcctatatattgcaccatggtctgaagaaactaggcagaaattaggctgggataaatcctttgatttggcgtatagtattttttgtcctatcatgtttgatgtagagaatatacgggccatgcatgatgcaagccatgatacatgtctatggattgcgtttagtgaacgtatggatgaaacggtagatatgttgtcagaacatttcttcggacgagattcatttccgtgggctggtaagatgaaagcatgtttagatgccattcatgagataggtcataatgtgaaagttacgtataaaactgtacccgaaacagaggttatgagccttgataaagcggtagattatttcacgatgcgtctccacaataatgagtggggcaccatggaagatatgaagcgagaaattagacaactcattgaaccgcgtgctattgatggtaaaattcataataagacagtggatacggttgcatgggtatcttggtcggttaaataggaggcattatgacagtagaagaaaagcgtcaattagaactcaaaacgatgcgtcaaatcattggcatctattgtcatgataaacatcatacgccaaagggccaactatgcgaagattgtgaagaggtatggcagtatgcacagcatcgcatcgatgtatgcccacacatggagcataagacgttttgtagcgtatgtaaaacacattgttatgcgccgacgtaccgaggaaaaatccgtgaaatcatgcgctacggtggcccgcggatgttactacactctccaattcaggttgttcgtcatatgtatttagagtggaaggatagaaaaaggagccatatatctcatgaaaactgatatgattgtaagaacgggaatatttgtagcgttgacggttttactatcttatatatttgctattcacactacctttatacatatcacttttggatttctatcaaccgctatatttgccattctttatgggccgatggcagctggtataatggctgctattgcctgctttataggcatggctctatttggacaaggcgtattctttcccggctttatcgtatctgaatttcttgtaggctatgtgtatggacattttttacatggtcgtaatgttacatttaaacgattacttttaccagaagcgattgtgacagtatgcatacatttgctattgaatacactgtggctgacaatattttataataaagctgtatccgctatatttgttggacgtcttattaaaaatattatttgtttccccttagagattgcattgattttaattgtgtataaggcaatcagtaaatttatagtacccaaaaagctataaccctataaccttttattatactaaaatgcacccctaacattagatggtatgttagaggtgcatttttattggttatatagttttatgcaagcgctttgtcgaatacagccttgatgtatgccttagtttggtcatagctttcaccaggttgtgcttcgtattgtttatcagtaccgaaccaaaggttagggtagtattcatatggatgcgttttgaataattcatgagcatcttgatcctcaacccagtcgattttgatatttttatatgcaggattttctgcttgtaattcttcgattgcacggaatgcgttatggcaataagggcaaccgtttaagtggaaacctaaaatttctttcatagtattcattcctttcagaacatacgactaaatttagtgatttattgagttatttcatactcacatcaactaagatgtgttatattaaaaagtatatcataaataacagtaatattcaattttttagatataatctactagcatttgtaggttggtatataggaggatggctatgatttcaggtgccgcatacgtggtgaaagcattgcaagaggagaatgttgatattttattcaactatcctggcgcagcaaccatcgatataatggatgaattatataaacaagatcaggtgaaagtaattttacctcgccatgagcaagcattagcacatgctgctgatggttatgcacgcagcactggtaaggttggcgtttgcatggttacttctggcccaggtgcgacaaatcttgttaccggtattgctacagcctactcagatagtgtacctatggtgtgtattacaggccaagtagatttagcgttaatggggaatgatgcgttccaagaagtagatacggttggtatcgttcgtaatgtttgtaaatatgctgttactgttcgtgatcgtaaagatttggggcgtattttgaaagaagcattctacattgctcgtacaggccgaccaggtcctgttgtcgtagatgttcctaagaatatacaaaaagcgatgggatctgatgtataccctaatgaagtaaatattcgtggctataaaccaaatacaacagtacacattggtcaggtaaaaaaagcatgctctgttattgcaaaagctaagtgccctttattcttattaggtggcggtattagcatcagtggtgccaatgaattgatgacacagctggtagataagacgggtatccctgtagtgactacattgatggggaaaggtgctattagttcgcgccatccattgtacctaggcaatgtaggcattcacggtggttatgcaccgaatgtggccattaccgattgtgatgtgatgatctccattggtactcgtttcaatgaccgtattaccggcaaattgagtacatttgcacaaaactgcaaaattgtacatattgacgtagatgctgcatccatttctaaaaatattaaggtagatattccaatcgtggcggatgcaaaactagcgattgaagctctattagaatatattgaacctcacgacttaggcgattggccagctcaattgcaacagttaaaagaagagcgtcctgttacgcaagctggtgaagaaggtcttacgccacaaaatattatcgactacattaataatcattatgaccgtccagtggtgacaaccgatgtaggtcaaaaccaattgtggactacgcaattcctcgaaattgaaggcaatcatcaattgttgacatccggcggtttaggtacgatgggttatggattccctgcggctattggtgctcaatttggcaatcctacaaaacgcgtattcgctatttgtggggatgggggcgtgcaaatgaatattcaagaatttgcaacagctatgcattaccatttgcctgtgaccttggttgtcatcaacaatggctatcttggcaatgtacgtcagtggcaacaattattctacgataaacgctatgcatgtactaatttattgatggatgaaagtgctattgtcactcgtgatatgatcgataacgatgaatttgaatatgtaccaaactttgtgaaattagcagaagcctatggtgcacaaggtatacgtgttacaaaagttgaagaactagaagcggcctttacaaaagcggatgctttcaaaaacggaccaacacttattgaatgtatcgttccaaccgagttaaatgtattgccaatggtaccagcaggtaaatcgttgagtgacatgttattaaaggataaaaaataggaggggctatggaattacatttagaaaaacgctgcatttcagcatatgtagaaaaccaaatcggcgtattggccaaaatttcaggcctcttcgctggtaaaaactataaccttgatacgttgacagtaggtgaaacagaagaccctaccatgtcacgtatgaccattgaactcacctgcgatgatttgacatacgaacaaatcattaagcaacttaaccgcagtgttgaggttattaaggttatcgattttacggatatgccgattacaaaaaaagaattactattcatcaagattaatagctgtaaagaatcggacaaacaagaaatattccgcattgcagaaacctttgaccttaaggttatcgactacaatcgaaaatccgtacttgtacaatgcgtaaagaccgtgtctaagaataatgatatgattgccttgtttaaagatatgttcgttaatcgcatcgaagtcgttcgtggtggtagtgtcgctatagaggcattggcgactccggatcgctagtgacatataaacctagagtattcaggttgagtagcccatacttgctcgctccaccggccgggtctgacttcgcccttcgggcttcgcagggccaaagtcgctcgcgagcacggactactcaacactctcttcctttcggtttattactgtcactaagcgagccgaagtctatggacaggagagataggggatacggatatatggtataataaaatatcgaatgtattaaatatagagaccttgctttaatttagacaaggtcttttttatcaggaggaaatatgagtttacttgatgatattttgaaacataataaggaatatgtagaggatcaaaatacaggatatgttgatgtagatacaaaatgcagtaagatgccgagtcgtcagatggcgattgttacatgtatggatacgcgccttgtgaatttcttagaggattccatggatattggtcgaggtgaggctaagattgttaagactgcaggtaactgtattacagggccttttgatggtgttgttcgtagtttgttggtctgcatttatgagctcggggttaatgaaatctttatcatcggtcatcatgaatgcggtatggctaaaacaacagctaaaaacttaacagaaaaaatgttagctcgtggtattgcaccagaagcgattcatatggtgaaaaaggaaatggaacactgggcggatgggtttacacatcctgctgaaaatgtagaggaaacagtggacgaattgcgtatgaatccgttgattccaaaagatgtgccaattcatggacttattttccatcctagaactggtgaaattgaggtcatcgttaatggctatacacaaatgaaacaatattacgaaaaataaatggagctgtagtagtatgcgttacatcaacgcatgctattacagctttttttatacttagaaattcatataatttatagcttatagttctatgattaaaattaatgcatagcataacaaataaaaatacaaaatatatgtataaaacttgaataatataagtgatagtattataatacgtacataggttataaaaatacacattaaatgtataaaatatacatactgtgtataaaggagataacgtcatgaatacattacaagatttaataaaaaaatatgcagcacaatataaagaacaagttatagcatggcgtcgacatattcatagtcatccagaattatctggtcaagaaaaagaaacatctttattcattcaaaagactcttggagaacttgggattccatttgtcaatgatgtttcagattatgcagttatcggtgaaatacagggcgctcacacaggccctgttattgcattacgggcagatattgatgcgttgccaattcacgaagaaacaggactaccatttgcatcacaaaacgaaggtgttatgcatgcttgtggtcatgatgggcatatatccattttgcttggcacagcggccgtattgcaatccataaaagatcaattgcatggtaccgttaaactcgtattccaaccttccgaggaagaggctttattccctggtgcacaaggcattgtggacagcggcatcctcgacgatgtagatgaaatctttggccttcacgtatggcctcaattgcctgtgggcaccgtaggtcttaagaaaggtcatctcatggcggcatcagaccatttcctcgttcacattcatggtaaatctacgcatggtgcagaacctcacaatggtatcgatgccatcatggcggctgcgaactggattgttaatgtagaatccatggtggcccgtgagacaaatccaatggaaaacctcgtatgcaccatcggtgttatcaatggtggtgaccgctataatgtgggctgcggcgatgtatacctcgaaggtacatgccgtacctacgaaccagcgaaacgtgactatattgaacgtcgtttaggtgaaagtttacaagctttggatatgatgtacaagacaaagagtaccttagattataaacgtggtcatggagcgacaacgaatgacccagatgccatcgactatgctacatccattgtagaaaaataccttggcaaggacgccgtagtacatccagaacatccgtctatggcggcagaagatttttccgcatacttacataaaatcaagggcgctttcctttggttaggaactggttttgaaggcaatccagcacttcataatgcaggatttaccattgatgaaaaaattttagaatccggtattaccatgatggcagcactggctgcagaatatttacaaccgaaagagtagctttcacaaataacaaaaataaaattgtataaatatataccgtatagattgaaggagttatcatgaaaagtttacataataaatcatttaagacaatgctagattacacaccagaagaaattaaatattacttagatctagctgctaaattaaaggcagataaaaaagcgggcacagaaatcaaaacgatggaaggcaaaaattttgtactcatctttgaaaaggattctacgagaacacggtgtgcctttgaagtaggggcagcagaccaaggggcacatacgacataccttggacctacaggttctcaaatgaataaaaaagaatccttaaaggatacggctcgtgttcttggttccatgtatgatgccattgaattccgtggctttgaccaagaagacgtggacacattggaacaatattctggtgtgcctgtatggaatggcttaacagatatggaccatcctacacaaacattggctaatttccttacattgcaagaaaatatcgataaaccattgaacgaaatttcctatgcttatgtaggtcatggtcaatccaatatgtgtaatgctttgatgagcggtgccgtaaaaatgggcatggatttccgtcttatcgggcctaaacaattctggccagctggtccgttctacgaagaatgcttgaaggtagcaaaggaaacaggcgctacgattacgtgcacagataatgtggcagaaggcgttaaaggtcttgatgtgatttacacaggcgtatgggtaacgatgggtgatacctacgatatgtgggaagaacggattaacctctttaaaccattccaaattaatgcggacatgatggccttaactggcaatccaaatacaaaattctgtcactgcttgcctgcattccacaatacagaaacacaagttggcaaagatatctttgaacggttcggcatgaatggtatcgaagtcacagaggatgtatttgaaggtccaaactccttggcattccaagaagcagaaaatcgcttgcacaccattaaggcggttatggttgctacatttggcgattatccaatgaaataatagttagaatacagatgacaggagaggtcatctagcacgtatagtaaagaaggttatcatatgaatccatataaggtatttatcgtaggtcacgaaggaacgacgggccttagaattcacgaacggctgtccggtcggaaggatattacattattatccatttccgatgaggaccgtaaaaatattgatgttattgcgagcattgcaaaggacgcggatatcgtgttcttgtgtttgcctgatgcggcctccaaagaggtggtggctgctattggcgattatccttgcaagattatcgacacatccacagcgtttagaacggctgatgattgggcctatggctttcccgaacttggtgaaagctataaaaacgatattaaaacgaaacaacatatcgcaaatcctggctgtcatgcaagcggcatgattgcttgcattgcccctcttgtgaaagcaggcattgccccagcagattatcctttcaccattacatccctcactggttatagtggtggcggtaagaaaatgatcgttcaatacgaatcggagccaaaggattatttcctttacgcaccacgtcaatatggccttagtcaacagcataaacatttgccagaagtaacccatgtatgtggccttacagaagcacccatattcatgcccatcgtagacgattactacagtggtatggaggtcagtgttggcctacatacacgtctattagcaaaacctgttaccgtagaagatgtgcatgctgcactcgtagatttctacaaggatagcactatcgtcaaggtagcaccacttaacttagaagaagacaataaacaattgttaaatgctaataaactaagcaatacggatggcatggtcatatctgttactggcaataatgaccgcatggtcgttcacgctatttttgataatttaggtaagggcgcttctggtgcagccgtacaatgtatgaacatcgcacttggattgccagaagaaacggggctttcactatgaacagtgtaacaaatgcaatgcgggcgcacatattaacagcggccgttccatatatcaaacaatatacagataaatacgtagtcgtaaaatacggcggcaatgctatgacggatccggaacttaaaaaatccgttatgaatgatttgctactacttcaattagtgggggtgaaagtagtcctcgttcacggcggtggcccagatattaatagtaccttggaggctatgaatattgaatcgaaatttagtaatggtttgcgcgttaccgacaaagaaacgatgaatgtagtacaaatggtgctagccggcaaggttaataaaggcctcgtagcggacctcatcggctttggtggccgtgctatcggcctttgtggcgtggatggtgaactcattcaagtacacaagaaaaatgaagaacttggctatgtgggggaagttgatacaatcgatccaaaggttatcgacgatgtcatcagtaagggatatattccggttatttcttccgttggttgtgacgcagaaggcaatgtatataatgtcaatgccgatactgcggctgcaaagattgcaggtgctctcaatgcggaaaccatggtggccatgacgaatatcgatggcgtactacgggatgtaaacgatcctaattcccttatttctaagattacccttgctgaagcggaacagttgaaaaaagagggcgtcatcgctggtggcatgataccaaaggtagattgttgcttagaggccatcaatgcaggggctcaaaaggttttcatcatcaatggtgaaattccacatgccatcctcatcgaactattaaccgatgaaggtcttggcacaatgtttgtaaagtaatatagtagatataacgatggtaacatcatttgccatcgttacattgcgtatagatagacggcggctgggccgtacgtttggaggatatgatgagtaagacacaagattttgaacaacaagataaagagtatatagccaatacgtatggccggtttaacgtttgctttgaaaaaggcaaaggttctttgttatgggatgtagaaggcaaagaatatattgaccttggctctggtatcggtgttaccgcctttggtgtagacgatgatgaatggtctaaggcagtgattgcacaaactcatgcattaaaccatatttcaaatttatattattccgtaccacaaattaaattggctgaattattatgtaaacggactggcatgaaaaaggtgttcttctgtaactctggtgccgaatctaatgaatgtgctatcaaggcagctcgtaagtatagccatgacaaatacggcgatggtcgtaatgtcatcgttacgctcgttaatagcttccatggccgtacagtaacaaccttgtccgctacaggtcaagatgtgttccatcaacatttcttcccattcacagaagggttcgttcatacccctgctaatgatattgatgcggctttgaaagtccttgctaatccagcagtttgcgccatcatgatggagccaattcaaggtgaaggcggcgttatgcctctcgataaggaattcgttcaagcggttacaaaatacgcgcatgaacacgatcaactcgtgcttatcgacgaagtgcaaactggtaatggtcggactggtagcctgtatgcatatgaacaatttggcatcgaaccagatatcgtatctacggctaagggcttagctggtggcttgcctatgggcgctactttattcaatgaaaaaacgcaattcgtattaaccgcaggtgcgcatgccactacatttggtggtaacccaatctgtgccgctgcaggctgtaccatcattgaacggttaacaccagaatttttggctactgtgaaagctaaaggtgattatgtaaaacacgccttagaagggaaaccgggcgttgttggcgttagtggtatgggcctcatgattggtatcgaaacaactgtagatcctaaagacgtcattgctaaatgtctagaaaaaggcgtagtatgtttatctgctaaaaacaaggttcgtttattgccagcccttaatattcctcaagaacaactagaaaaagcaattaccatcttggcggatgtaattggtgaattggctagcaaatagtcttagattgatagattcattcgttttggatgaacaattgataaatatatagataaaatccgatgaatatgtagactttatattctattcgtgataacctagaataaatagtctatattggaggagtaaatatgaatacagaatccttacgtaatgatgtattggttcctgctgttgctaaaacattagacattgcagcaaaagcaaaaccaacaaaagatgagctctgcacaactgcaaaaattacagcagctgtagcggtagcaactgctgttgtatccttggcggtacaagcagtattgcgcaatcgataagagaagcataaagaaaacgacatggcgttgcctgtcgttttcttttacatttaccctgttattcctataaatatggggatttccagtatattttgttaatctgtgctgaaagctaaggaggcgatatcatgcatagtcgcgatttaattgaacaatataaaacctatgtacaagattggcgtaggtactttcataaacatccagaactcagtaatgaagagttcgaaaccacaaaaacactagccaaagaactagagtccatgggcgtagaggttcatgtagatacagaacgtgaaacaggacttataggcattattcatggtgctaagcctggtaaagcgattgcccttcgtgcagatatcgatgccttgcctgtacaggaacataatacatttgattttaaatccgatgtagatggcaagatgcatgcctgtggtcatgacggccatatggcgatattactcggtgcagctaagatgcttactgctatgaaagaccgtatcgaaggtgacgtataccttgccttccaaccggccgaagaaaccggtgcaggcgctcctgatttcatgaagttcgataattggtttgaaaaaattgatgccatctttggcggtcatgtatggattgacttaccggctggtcttatttccgttgaagaagggccacgcatggcggctagcagtaaaattacaatccgcgtaaaaggcaaacaaggtcatggggcacaaccacatcaagctattgatgcggttgtcgtagccagtgccatcgttatgaatctgcaaacagtagtgtctcgtaatgtgagtgccttagactctcttgtacttaccattggtaatattcactctggttcagaatggaacgttatcccaggcgaagcacaaatgggtggtactatccgtttctttgatccaacgcaggaagattattatgtagaatctatacgccgtgttgtagaacatacagcattagcttatggtgctacggctgaattgatttatgaaaagaaagtgccgccaactattaatgacgcagcagccagtgaactggctgaacgtgttgttatcgatacactaggtaaggaaaaactgtctaaaatgcgcaaggtgatgccaggcgaagactttgcttggtacttgcaagaaaaaccaggctgctttgcctttattggtattcaaaatccagaggtaggcgccacctttgatcaccataacaatcgattcaccatggacgatagcgtattatctgctgcatcggcggtgtatgcggaatatgccattgagtggttgaaagagcataaataatatatatagccttattagtatcttcggatattaataaggctttttctgtatttttcgtttttatcaagataatgataaatagaagtattaatatattctgattattatgcatctttaccattctatttgttataattatgaatataaatatatatttatttatatatgaatttatacaaatacaaggagtgttattatgcctagaaatattaatactgttggcggtgggtcacagactaattctaatggtttaaagtttgagcaatctactttattagatgatgtattacgagagaaaggttatatcattaaagattgttatgtgtattttggagaaaataaacctataggaatgtctgtgcataagaagaaattatatagtgagtttttagaaaaacataatcttgattatcgtcaatttaattcaaaaggttgggaaccagatgattgttatattagctttaaaaataagactgcttatattattgaaaagaagtttcagaaaagccctggatttgtagatgagaaattggccacatgtcattttaaattattagagtatcaaaaattattttcagctcttgcatataaaactacatatatctttgtacttagtgattggtttaaacgtcctgagtatagagatgttttggcttatataaacttgatgggttgttactatttttttaatgagattccattagattttttgggattataaggaggttttattttggaacgaattgaaattacaaaagcattttctaatagtggtagtagaaatgatgtcaggatgagagttgtcaatgaatttgctaaagaattaccaggatatggaaataaagataaggcatctagatatatttattatgttgagacattagagaatggagatagaatatatcttcaacgaccagcaaatttacataatggatttgattttcttgtttgtgtagaaaatattaattatgctgagggcacaggaaaacgaagacgtaattatcccaaacatacggatattgaaacagatttggtaaataagaaaaatgagaatctagaattatatcgtaaactttatgatttgatagacgatgtttataattgtaaggatatttcatcagaggaaatatcaaagcttacttttactacgggatattctgctgaacatattttaaaagtattgaaatggttatttattgaacaggatattagatactggaattattctggtagagcaaagactcgggggattattcctacaaaagactagaaaagattgtgatacctgagaatagttaattataggaaaatctttaaaggagaaaataatacttttgtagaatgtaatataaaggaattactatataaatttattaaattcaattgctatccttctagatctagaataaaatataaacatagatttgaaaggagcaataatatgagtgttatatctgctaaagatgcagcaaaaaaatgggggatttctcaacggagagtagctgctttatgttctgatgggcgcatccccaatgcacagcgtgttggtaatatgtgggttataccaagtgaggcagagaagccgatagatggtagacatttgcgttacacagcagaagaattattaccgattaaaccatttttgaaatgggctggtggaaagggtcaattactttcacaaatacaagaattatacccatttggagatacgaaaattaaacgttatgcagaaccatttatcggtggtggcgcagtattatttgatattcttagcaaatatgaactagatgaggtctatattagtgatattaatgctgagcttattaatacctatagagctattcgtgatgatgtagatgggctgattaattttctaaagccgatggaagaaaagtttatccctatagagattgaagaacgtaaagaatatttctataaacaacgggataggtttaatgagttaaagagcaaagagaataataatgttgattttgaaaaagctgcattaatgatttttcttaacaagacctgctttaatgggttgtaccgagtgaacaaaaagggcttatttaatgttccaatgggtggttataaaaagcctacaatttgtgatgaaaagaatcttcgtgctgtttctgaacgcctacaaaatgtaaatattgttcatggagattataaacagtcagagagttttattgatagcaatacgtttgtttattttgatcctccttatcgaccaataacagagtcagctagttttacggcatatacagaatatgattttaatgataaagaacagattgagttagctgagtttgttaataaaattaatgataaaggggcaaaaattgttgttagtaattcagatccgaaaaatacagatgaaaatgatgatttttttgatgaaatttattcatctcactcgattaaacgtgttgatgcatcacgtatgattaatagtaatggggcaaagagaggtaaaataaaggaactattgatttctaatttttaattgggagaattctatatggtaaaacgagattttattgaatggttatctggttttagacctagtattgctgattatggattttatataaacttcgataaggtttatcgtaatgttgatgatataaaaattgagttgaatatattaaattcgttaattggttctcataatatagaagaagagtttagatgtaaattatcaagatatccagaagtattacaatgtattcctatattattagctgtacgtgctagtgaaatatattgccacgatgaacgtggtggtattttatttaacttcaatcataagaagttctcattatctactgaagatgatttagataagtatgtatattttatgaaagaaacaggtctgtttgatttgcttagtaaacatataataaacaatttggtagattatgtaatgggtgttgaaaccggacttgactctaatggccgtaaaaatcgtggtggacatttaatggaaaaccttgttgaaaaatttattattaaagctggttttattaaaggggtcaactattttaaagaaatgtatatacatgagattacagaaaaatggggaatagatttatttgcaatctcaaatcaaggtacaactgaaaaacgttttgatttcgttgtaaaaacagataacatgatatatgttatcgaaactaatttctatagcggagggggtagtaaattaaatgaaactgctcgtagttataagacccttgcattagaatctaacactattgatgaaattacatttgtttggtttactgatggtaaaggctggaatagtgcaaaaaataatttaaaagaaacctttgatgttatggaacatatttataatattaaggatttggagaataatattattagtgaggtctttaaataatggccaagaatatcaagaaaataaaaaaatgggagccagaagattttgaattagaaatgacaactcattggtctttccctaaacgtggtgattgggcaactcatgatgctaaatggcgcggtaattggtctccttatattcctagaaatttgttgcttcgttattcacaagaaggtgatttaatactcgatcaatttgctggcggtggaaccactttagttgaagcaaaattacttaaccgtgatatcatcggtattgatataaatgaagttgcactagaacgatgtaaagaaaaaattgattttgattatgaatcagctaaaggacgagtcgaactacataaaggtgatgctcgtaatttagattttatatctgatgacagcattgatttcgtttgtacacatcctccctatgctaatattataaaatatagtgaaggtatagaaggtgatttatcacagctaaaagttcctgaatttcttgaagaaatgaaattagtcgcatctgaatcgtaccgtgttttaaaaaaaggtagattttgtgcgatattgatgggggatacacgtcaaaagggacatatggttccaatgtcgtttgatgttatgcgtatttttgaagaagctggatttaaattgaaagagcttattattaaagaacagcataattgtagagctactgggtattggaaaactaatagtattaagtataattttttattaattgcgcatgagtatttatttgtatttaagaaatgattgaaaaataaaattttattattgaatactagatgagtattctctggcaccaatcatttttgtgtttggtgccattcttttgaagtaaaaaaatacttacacgaaattaattaatgggaaaatatcataatttatttgaatttcaaagttagaggtatttatgaatatacttatatgtctcatcattattgccattaccggtatattactgatgaaacgctatcaaccgcagccaattttgataggtatgggcatcctcatgatgtatatcgcctatgaaggtaactggattaatgccatattggatgaatctcagtctacaggcgttttggtgtttgatgcgatggatattgtgcgaatcacgacatcagagaatgtagtaagcttaggactcatgattatgacctgtgctggttatgcaaaatacatggaatacattggggccgggacgaggctagctcatacatttataaaacccttgtatcgtcttaataggccatacatagtgctagcccttatgtttctactcaatatggggttatccatatgtgtaccgaatccgttgagccttgctttgcttatgatggtcaccatctatcctgttctgttgcgtcttggggtgagtcctgtcggtgctgctgcagttattgctacaggccatttaatggatgtagggccgggtgcggtatcgacattgcttatagctaagacacttaatataccggtcccaaactatttcgtaggttatcagttacgcctctatttcttggtggctgttgtgacggcagtagcacactttttatggcaacgatatcgcgatcgattagatggtcctatggatgtaggtgactgtgaaagtatttctgaggcgccaattgggcctaagccatacatgatattccctttgttaccactatgtttcatcttgggctttagccaatatggcttgcctggcgtaaagatgaatgtaacccttgccatgatgcttgcctttggtattgccttattggcagaactcattcgtcatcgtaatttaaggatcgtccttaaaagtacaactgtattttttgaaggtatgggaaatcagttttcctatgcggtaaccctcattataggtggacaagtctttgcacaaggcttagtgagtttaggacttattgattcgttagttagtgcacttcaaactttatctctaaattcagagggacttacctctgttatgggtggaggcatgctaggccttagcatggtaactggcagtaatgtagcacctttatttacattagtgccactcgtgcctaatattgtatctaatctcggactagatccgattacgaccatgttaggcatgcaaaatggggctagtctaggtttgttcttgagccctatcagccctgttatggtcggtgtagcaggggtagcgcatattaaatctgtagatttacttaaacgaacctctgtgcctgtgtttgtagcactaattacgagttgtttggggatatggatgctctattaatattataaagtttataactaataagacgccctgttatcgcaatagataatggggcgtcttgttgtttataataaaatatgggttataggacaaaaagtgtgtgtgactactcccaataagttggaaaatctgtagacatatgtagctcattccaaacaggagcatcaccccattgagggattgaacgatctatttggcaataactagataaccgtttgtagatagcagtaatcgattcatctgtaggcatacaatttaatatatctgaaatagaaagcggtcttggtgagtgcatatagcaccaccaatagaccgcttttagtcttctttcaagtgaaaggcccctatgagcccgtaacatacttcttagttgagcatttactccaccttcaatacgattatttgttgtaggtattgtaatatcaatacattccaaaaatgtaaataaagtttgttgcctaatcagacgccataatgatgattcagctttaagcaaacgctcatgtgtagagcgtttgtttccgaattcatcaatcgtcatttctcgtaaaaaatcagaatatgtcattcgccacgccgaaagtttattaatccatataaaagcttgatccattgttttcacattaaataaatctttagcaagagtataaaggtcctttcctgctaacgttttaggtctacttgtcgtatatcgtctaacctgacaaaaaatgtgaaacaggcatctttggtgactgctatgaggccaaactttacgtaatgctttaggcaaaccattagcaccatcagacacaacgactttaggttcggcaatccgttccattaaacactgccaagctctagcatgctcataacgacagacataccatcctagaacatgagtatcattgcaacaaatcaaaacacataaatttctagctaagtaaattccatcaagatataccacatcatgtacttcttccacttttggtggcaatggccatatggaccaaaatttagcagttttacgcctaaatgtacgacctttaccaggcatatcagcttgaatatcggtgctgaataaccaattcaagaataggtttaactctttacttaaattattaattttaacggtaaatgccaccttacaatatttgcaaaaccaacgctgagaaccagattttaaaacaccatgtttaatacatgtttcattacaatcaggacattttatttgtcgcataaactcttcctccatatttgtttatatataggaagatataacctcattttagtcagtaattacaagggttaactgaagttttcacacacactttttgtcctataagcctaaaataatatagatttttaccatagattgtatgttcctgttagtcttaatgggaatttatacgttattagattagtggtagaagaggataaaaataatataggtttgcaacctaaattaacagaattatatgatatttatatagacaaagaaggattactaccgcccccttccgctaatgggaagtcaaatggaagtagtaatccttctattattacagtacgtgatatgcttgaaaatgtcaagcaggcagacaacccagatgtatatgtgtttgagagtagtgtaattctgtaaatctctaaaactaccgcaatgatgatataagattgtacaaaagtagcattactatacataatatagggcacctagcatatgccatctgtgtctatacgttagtaatgctacttttgttatgttgctagatttattctgttaaatattttattactttaatttcgttagatatgcatttagcatgtctaatcgctcagcaaataatgttttcatcatagtaagacgatcttccgtaatatttgaattttttgcatatatggaatccatcaattccattgctgttttagacaatgactgcggaattggtagtggtgttgttacatattttatttgcttatcatgtttcgatttaaatggtaatgacgggtatgtatggaatggtctatgtggattaatcgtcatttcgttgtaccataaggtattaccgttatcgaagataggtgccatgccaaggaattcaagtgttgtagaattccgtaaaaatccaaagttaccataatgacggtcgtcatttagtgttagatagtctaaagcaagcgttgcatctaaatgggctttcacatttggaattgaaaactgtgcacactgatctaagaacgcttggtatttattatcgcgtcttttaagtggcgctgctatgtgccaggcagggatgtattcaatgtctccactcgtaaatagtgggcaagatgacacaatttcaccagatgcgattgtttctaattcatatggtacatggtgaaagtttagttctttgcataattttgacacaaatacttcattaaatggttgttgattgaggaagtttccagcttttaataggcgaataccttttttttgttgcacccacatctgacgaagagaaccgtttacagatgaattcggtgtaattaaatcgatatcgatatcatcagaatcagataagaataatggcgtgtcaattataggatggtcataaaaattgatagtatcccaatctaaattagagtgtattggtttcatccaatagtggtcagatagattaagttgatatgattttaatgaaaattctaatgcatctgatgcgtgataggcctctagtagattttctaaattaggtctagagcttggtatagcatgataccttaaaaaatcattaagtgcgatttcctggttgtccatgaccatcatattcaatggtttgtggtctggatttatgatttcagtaaccttggttactgttaacgtatcatctaatattgctgttaacacaggaatatttttatgcattaggatatacgtacacatagcatcacctcctttattgtcaaattttataattacatacattataatgtaaaatatagctataggtatatattgtacatagtaatctaatatttcttaataaaatgactgttagtaaaacaaaacgcccccttcatggcaactatctaaggttgccaatgaagagggcgttttgcattgtagtaagaaagttagtaaacatttagacggaatctaaatgtatgtatataaggccatacagcttacgataagaggggggaagtagcatcctatgggagtagtattgcataaaaaggggaaatatattaggatgcgtctctcatagatatgcaagggatatacaggggagatatctatggttgtacaactatatggccgtatataacggtatgtaatataaattagaatttatgagtaaatccagcgtttacgccccagtcagcttggtaatcaccagatagaccggtagtaacgtctgcatatacgctgttgttcgtattgaaaccataacggccaccgaatgcgagttcagtccaagtgcctttgaggtcttgttctgtcaattttacggcattaccgctagcataggtagttttcacattgcctgtgaaagcatgacctgcagcaaagcgtgtatataggttaccattgccaaattgtttgcctacttcgaggcctagtttgccagatgtgctatttacaccagcttggttaacggatacattgtctgctgtaaagccacgaccaccgaagtgtgtatagtttaattgtgcttgtggttctacatagaaaccattagcagattttatagttttgccgtagcgaacgccgatgctatacgcattagattttacatcgccagatttagcttggccgagttcattacgcgctgtaaattcattagagatacgacctacttgagattctacatgtacgtattgatccttaccaaggtctttcaatccataagcgccaacagcataggattttaccttgctagaaccattgaatacataatcttcagaaccgcgtaggtaagaaacttgaccgcctacggtccagtcacggctagttttagtatcataaccgccttggatgcttgtgtaatcagtagctgtattgataccgtcattagcataattatatcgaccgccaccaatacgagcccaaatacctgttgggaaaccttgttgtaattggctcgtacgattcatatcgctcgtcattgtacgccatgcgttgatattaccaactacagcagaacgaatgccgcgcatttgtggtgtatcataagcgccaggcgttactacaggacttggtgttacaggagtaggtgctggagtaacaggcgtaaccggagttacaggagtaggagccggagtaacaggtgtcacaggggtaacgggagttacaggtgttacaggtgttacaggtgtcacagggctaggcgctggagttaccggagtaacaggagaaggtgttggcgtaactggagtaacagggctaggtgccggagtaacaggagttactggtgttggagctggcgtaggcgttggagtaggagccgaataggaaccttgaccattaccgttttgccatgtaatagcaccttcttttgggtctgtagttaacgctttttggaagcttgacacgatgccattagaagcgatggatacagtaccagaaaggttcctttcaccattcatataattttcgtaatagaatttatgcgccaagttatctagaatcttgtttacattgctttcagaggacgtatcgagatgatcgcctgttacatagccatgtacaccagaccctgttgtagcggattttacgatgaagttaccgccttcgatgtcagatgcatcaaggcctgttttttgagcggctggtttagcgaagttcaaaccagtaccagcgctcatgtcgtaaatgacattgatgtggccgtccaaattattaacgtggatgtcgctacgagaatcttgggaaatacggctgaatccttcacgtgtacgagtgcctttgagtgtattgatactgctgcgcgcttcgttgcctttaatttggaatgcctccaagccacccatgttatcgtggctccacatgccaccatcaaaggtcatgttgatttcgccacccttatcctctaatgtgttcacagccttgcctgtaaattggttagggctattgtgcgcacggccgaggccaatattaatcacggatggttgctgttgttggtatggaggcatcgttttatcagatacaagtatattaccttgcatattaaatactttatgttttacagtacctgaatcatcgataccaagattaattttactgttataggcaaatgctagtggatagggtgcgtcccatggggccgtattcacgttcataaccccgccatcgacttgaatggaactgttatctagcatgcctgtaatgaaagctggttggcgatggcgcttaggtaattggttttgatctggcgtatccaaggaggcaatagtcacttgaccaccgtttgatgcaatgacacctgttgccgtcgtattgccagtgctttcaaatttactttcagaacctactgcaaatacattgccattagaaccaaggcctgctgccgcccacgtgctagggagggccactgtagatgataacatagtcatcattacagcggacaataacatcttatttctcgctctcattctcttacacctcaactatattacttaatttgtaatttatttttatattgtgaaagactcttcataaatgaatatatatctatcggttgatttaatactctcttatataatgaaagatagatatatactcgctttataaagactttgtgtcagacacatttaaaatatatttaaaataatataatatttttcgtgaattgtaaatgaattttcacgattttattttaaaaatatttaaattgttaatagatgagttacatataagggacagtgaatacgatgtatagtattctttacaaatctagtgagcatgggtattattgtatgtatagcacgatttctagtaacaggctagttgtagcatagaaaggagccttcatgaaagtcacttgttcctggcccacaacgccactgtatcaggcgtatcatgattatgaatgggggcgtcctattcatgatgaccaacatcaatttgaacatttatgtttggagagcctacaatgcggtctgagttggctcacgattttaaataaacgagacgttatacgtcagtgctttgaacattttaatgttgatacggtggctcaatatacggaaacagatatagagcgcattatgagtacagagggaatgttaaaatcccgcaagaagattgaggccatcatcaataatgcacaggcgttccaacgcattcaagatgaatttggatccttttgcgaatatatatgggctttcaccaatcataagactcttatttatgaaggccattctgagggaagggtgcctgctaaaaatgaattatctacgcgcattagcaaagaccttaagaagcgaggtttcaaatttgtaggacctgtgaccatctattcccatttacaagctagtggtctcatcaacgatcacggtaaggattgcccttgttttaatgaaatcaatgaggccaatcctgtggtttatatgacaatagatgattaatataaatagaaccgtatctactgaaacatagatacggtttttttgtgatattttatattgattgttatcgatatagttgatatactactttcataataactttcatacgtaagggaaaggataagaagatgattggtttaggtacggttatcaacatggggctcattatcggtggtagtattattgggctcacgtgcggccgatttatgaaggacaatttaaaacaaacgcttatgatagtatgtggtatcatcgtgctgttactagggatgagcggggccatgcaatttatgctggttatcgttaatggttccttgcaaactactggacctttgttgatgattatcagcatggtagttggtgctgtgattggtgaaatcattgatttagaccgatggattacggtctttggtgactgggtgaaagataaaaccggtaataccggggaccctaagtttacgcaagcgtttatcactgcatcacttacgtttacggttggtgcgatgggcgtgctcggttcaattcaagatggattgacaggagattaccaaaccttgctactcaaaggaattcttgatggtgttatcgttatggttatgacctcatccatggggaagggcgcattgttttccttcattcctgtaggtatcacgcagtggttgatcacggccttagcgcatgttgcggcgccacttatgacacagcaggctgtcgacaatttatcctatgtaggatccatcttaattttctgtgtaggcattaatatgatttggcctaataagattcgtttagctaatttattacctgctatttttatcgctatgggccttacgtttttaatttaaatttaaattttaagaaccctctttacattatgtgtaaagagggttagtatattctcaatataattttcttgtagttaaaatggtttcccctagaaacgcatgttatcgcggcctagcggatacaaaagggcctttcttcgccgaacggttctagaaaccagaaaggacatgatgagcgaacaagtttctgtttcaaaatctaatattcgtggtgcatttggtgcattttttattcctggtatgtacactgccttatgggctgggtttgtaccatatttaaaagcgaaacttagcatcggtgaggatgtattaggttccatgattttgttgctcggtgtaggttcttgtttatccatggctatagctggtaaacttgtagaaagctttggctgtaagcgagtagttttattggctagttttatcggcatgttgtctctggctattgttactatgtgttctacaattgtgacaaccacaatagcattatttttctttggcattggcgtaggccttagtggtgcttctgccaacttacaagctattttaacggaaaaggtaagtaaaaagcatttaatgggtgcttatcacggtgggtggagcttaggtggctttgcaggtgccggtgtattgcttgttctcttaaaaatcttatctttacctgttaatgaaagtatttggggccttctcatcatactctttattgcgatgattgcgattagtcaatttatgttaacctttggtcgtgatccaaatgcaaaggttatgaagaagtctaaaagtccgttatcattccatccaattgctattatctttggtctcttatcctttgtatcctatttggtagaaggtgcggtaggggactggagtgcactttacttatttgaagataaaggtatagttattcaagaagctgtcatgggcgttatgctgtttaatgggactatgtgtattggtcgccttcttggtaatacaattggtaaacatgtaacatctaaacaagttgttgtaggtggttatctactaggtgctattgcaatggcactcatcgtattcctacctggccatgcgtctatgtatacgtacttattattaggtatctcattagccatggttgtgccaaatctattctctgcgatgggggaacaaaatgtaattcctatgacacaagcagtggctacatctaccatgctcggttatatggggattttgatgggacctgcattgattggattcattgctcatggtacgagtcttaccattgcattcatcgtcttgactgtattgcttgttatcagtgccggcattggtaaatatgcatattatttaatgaataaaaattgtggcatagaagaatagtttcttcgtttaaatgctgcaaataaaaagaagaggggctacgattcgtatgaatcgtagcccctcttagtatgttagtaaccgattagcggtcgccgttaaagatggagtttttaacaagaacgtagtctactttgcggatagcttgtagtgttgtgccaccagcgtaggagatagcggattgtaaatcttgttccatttcgattaatgtatcgaagatagagcctttggaaggaatgaagatttttttgccttctacgtttttacgttcccctttttggaactcagaagcggaaccgaagtattcttttacagcttggccgtcaacaattttttcttcccctggagattcttggtgaccagcaaatagggaaccaatcataaccatagtagcgccaaagcgaatggatttagcgatgtcgccgtgatcgcgaatgccgccgtcagcgatgataggttttgtagctgcttttgcacaccaacgtacagctgccaattgccaaccgccagtaccaaagccagtttttaattttgtgatacaaaccttaccaggaccgatacctacttttgtagcatcagcaccagcattttcaagttcacgaactgcttcaggagtacctacgttaccagcaataacaaatgttgttggtaaattctttttaatgtattgaatcatgtcgataacagcattagagtgaccatgtgcgatatcgattgtgatataatcaggaataagattagcttttgctaattcatcaactaatgcgaattcttcttcctttacgccgatggaaatagaagaatataagtttttttcttgcatgcgttttacaaagtcaagacggcgttcaggttggaaacgatgcatgatatagaaatagcctttttctgctagtttttcagctaactcttcatcaatgatagtttgcatgtttgcaggaactacaggcaatttaaatgtacgattacctagtttaacatgagtatcacattcgctgcggctgtttacgatacatttattaggaatcagttgtacgtcttcataatcgaagatgttagttgtattaatcatagtttctatatctcctttgaggtataataaattgaacctgtaccattatactgaatttgttttcaattttcaatacattccgaatattaaaaacactcatatagttattatacaattttataggtagcttgtctgtacattttctctatgttcagcccattatatacacattatattaataggaggttattttaatggagcattccaagacacgcatgatagcagaagctggtgtagctattgctattgcacaagtattatcttttattacactttttcatatgccacaaggcggttccattaaggccgcatccatggtacctctcatgatttttgcatatcgctggggtggtgcacgcggtattttggctggcgttgtatatggcatacttcatttcttgctcggttttaaatcatctatccattatctaagcatcatcctagactatcttgttgcttacggtgttattggtgtgtgcgggtatttcaaggataatatgacaggtcttgttagcggatctattgttgctattgcgcttcgttggtttgcgtccgtaacaagtggtgccgttgtgtttgctagctatgcgccgcaaggtcaaaatccatggatctactctatgatttataatgcatcttatatggtgccggatggaattcttaatattgttgtgttgttgtttatttaccaaggggtaaaaagagggttgaaacgcggtgcttaatttaggcgtaattattttggctggtggcctaagttcacgcatgggatatcctaaggctttattgccttggacgaatggtgaaagcctcatttctcatgcgttgcgcaatgcattagaacatgatgctaatgacattctcatttctatcggtgacgatgaaagtctaggccaagccattcaggctaatattatcgacacattgtcgaataaagaaaaagaaaaagtttctatcgttcgggattctgttcctcggagtggtccattaggcggattatatagcacattggccgtaggcaagagtcatgcttatgcggtgttagctgtagatatgccgtttatggattttaatttatattatgattggctctaccaagtagagggcgatgactggcgtgttattgtgcctgttagtgaaagtggacgctatgagcctatggcggggatatataagccatccattgctccattattgcaaaccactttagcaggagaggatgtatctttgcagcatgcattagatattgtaggacctgtggtaaccattgatgcaggtgattacggtcatcatttacgcaatgtgaatcatatagaggattataagtgggcccgcgcagaggctgttaatgcgaatcgtcatgtgccacttatcagcgtagttgctgaaaaacgtaagactggtaaaactacggtggtaacgcgactaattaaggaattagaacaaattggtttctctgtaggcgttgtaaaaagcgataaacatggctttcacatggattatgaaggcactgatacggatcttgctatgaaagcaggcgccacggccgtagccattgcaggccccacggaaacggccatacgcattcgcaccgaaaaacaatctaatctgtatgatttggtacagcaattacctgtagatattgctatactagaaacgagatctcaaggtatatttccgattgtcgaggtaaccagagaggggtatacagaatcactgatatccagtgatatagaacgcgtagagaccatagaggttactgaattagatcaatgcataccaactttggtatgtcgaatacaaagtatgatgaggaatttagatgatagccgttactgttgatgaagcgcttcatttgtggaatgaggctttacgagaacaacatcatagcatcgaatccattgctgttagcgacgcaaaaggatgtgtgttggccgaagatgttttggcacctaccgatgtgcccgcttttcataaatccgcaatggatgggtatgccttagcatatgatcctaattgtgatacctatatcgtcgatggtatcatcggcgctggtgttgtatgggataagcctgtaacgactggtcatgccgtacgtatcatgacaggtgctcctgtacccagtacttgtgatacagttatcatgcaagaacaggtgaaaggtactggtgaagtaggggctacaattactttacaaggtacgcaacaaaagggtagccatattatccctcgtggtgaagaatgttccgcagggaccgttgtcataccaaagggcacagaaataacctctacggtgcagacaattttgatcggccttggttgcatcgatgtgtctgtgtatgcgatgccacgtatactggttcttacatcaggccatgaagttattgagccgggcgaacccttaactgcaggaaaaatttacaattcaaatcgcatgatgatttgtagtttacttgctgatttaggttttcgacgcgttacccattatcatgtgagcgatgcaccggatagactagacgcagaaattgaacgcgtccttgaactcagtgaacaagcagatatcatcatcagctcaggcggagtatctgtaggtatgtttgatacaatgccccttatatatgaaaagttaggagctaaaaccttatacggtcgtattcaaatgcgtcctggtgcagcctcctatggggccgttacgcctaaaggacaacttatctttggtttatcaggcaatcccggtgcagcctttaatggttggcacctattagtggttcctaccttgcgtagatataaaggtattaaaaattggtccaccccagtacttaattgtgtaatggattgtgatctatctaaacgtaatgcctttgatcgctacgtgcaaggcaaggtcatatttggtgatggacaacctcgttttgtggcaaatcgtcactttaacagtagcagcatgcttggattatataccgttaatgccttagcctgcattcctaaaggcgtacatgaggtacatgaaggagatatatttaaggtatatttgctaggcctcttaccaacaatataataaattgcaaggggctcatgtatgagtccctttttaaattagtacaggcctgtactaatttgtggaaccatatgtataggctcgttacaaatagaacaggcgtgtactaattctaggatcatatgtataggttagttgcaaatagaacaggcctgtactaattttggaaccatatgtataggtctgctgcaaatagaacaggcctgtactaatttgtggaacagtatgtatcggaatagatattaaaagatattattgaccacagttaaataaatatatgataatgaaaacatctcataagttagaagagatgctttttgcatatggagcggttaagatgctatggattattttgattatacctataagcacaattatattgagtttagcagtagtatatataaggttggtacttatatttacaattggcacgggggaacagagatttttattctcttaaagggtcgtgttgagatgagttgtaatgataaggtttttacgatggaacctcttgatgttgttattatttctcctcaagtgggtcattcaacactcgctcttgaagaggatgtggttgcctttgttattcaagtaggtaatgaattttatcaacagtatgattcggattttggcatgtatgagtttgttattcgttccgatgcgagcacacgtcgtaatgaattttttacgacattacgtcatcatgcggccatgacgatgttattaatgaataaaggtgaaaacccaattcatcgtatgtggatagagcatcattacttgtctttagcgggggatgtatttagagaatttgatccagtcaaaaaaatccatgaaaatgcaagacctggtgatattaaaccggctacctttgataaaatgattgagtatatcgacgaacattaccaacaaaagttagaactagaagatattgcgagaataggtggctataatgtggcctatacatcacaattctttaaacggcaaatgggcatttcttttgtggactatgtattgcggttgagactgcgagatgctacgacacaattaactagtacggatgaggctgttgcaaggattgcaagtagttgtggatttgcagatatcaaggcctttaatgtagctttcaaaaagcattttcatatgacgccaacagaatatcgtaagcaagtgaaagaaattggacgtaaaacaatggtacaagattctaaggaaattatttcggttgaaaatcaagatgtactagacctattacaatccttcttgtcttatgaagatgatgctagagcaaaggcggagttagagtacatgagccacaagctagaatcattgaaagcgaagcttgccgatgttgttagcgaattataattgctatctatagtatggtgtggtaatgatggaacttttgttgttcatgcaaaatattttttgtagcatatagaaaaattagacctaggtgattttctatatatttaaaaatcatatatttcttagaagagcattactattgataagtagtgctctttttataggaaaatctatagattttagattgatcaaaatgagaaaatagtgatgattccatatgttttttatgattttacctaaaaaattaccttttaatatggatagttatatcgaccaaaacgagtagaatatgattcatcagataacaaacacgtattgagttactaattttggaggatataatgactcgtattaaattcatggaaaatgtaggtaaagttgcaacagttacagcagtagcaatgtatgtatcttatttcccacaaattatgaacaacctagctcatccaggcacaggcgattggattcaaccattagtagcagctatcaactgcacattatgggtagcatatggcttgtttaaagaacatagagatattccagttgcattggccaatgcaccaggcatcttcttcggtttagcagcagctattacagctcttatgtaattatctacataagcgtttcacatcgagttctctttcgtgggactttatgtgacttaatcaataaataatcttaagatgctgttgaccatttttaattatatatatcataataaatgcatcccttggatttattagggatgcatttttatgttagaagatgaggtaattatggattacttttactatacatataaacataatcatatagatttcagtagccatatatacaaggttagtacctatcattacaattggcatggagaaacggaaattcttattttgctaaagggccgtatcgagatgagttgtaatagtgaggttttcacaatggaacctctcgactctatcattatttctcctcaagtggggcacgctacgttggcattagagcaggatacgacggcattggttattcatgtaggtaaggatttctttcaacaatttgatccgaactttggaatgtatcaatttgtgatacgctctgataagcctaatcggcataatccgttctttacctctttacgacatcacgcagctatgatgatgttgattaagtctaatggtgaaagccccattaatcagatgtggttagaacatcactatttagcattagccagtgaggtatatgatgaaattgatgcggttaagtctattcatgtacattctaagcctgttgatatgacggtggctacctttgataagatgattgcctatatagataaaaattatcagcaaaagattgaattagaagatattgcccaaattggtggctataatgtgaactatacatcgcagttctttaaacgccaattaggcgtttcctttttagagtatctcttgcggatgaggctaagggaggctacagttcgtttagctaattctgatgatggggttgctcatattgcaagtagttgtggctttgcagatattaaagcctttaatgttgcctttaaaaagcactttcatacgacaccatcagaatatcgtaagcaagcaaaagagttagggcgtaagaccaaattacatgattggaaagagattatatctacacaagaggaagatattgtagaactactacaatcttgtttgccttatgaacatgattctagttataagttaaagctagaggaagcgaatcaaaaattacaagttgttagagaacagcttgaatctgttgttaaaaaattacaatcctaaccttaattagtacagccattgtaaattgttataattttatggttttgcgttttaaatttagggagatatacaatcattaggtataggtaattttgtatatactaaaaatcccagttcctaaatataaaaagagcactgcttttcaataagtagtgctctttttcgtgtttataggtaggtaaaattatatattttatatgcgttaaaatttacttatataggtgattcattatgattttatagggacttcactctcaaaaatcaacttgtatattggatagttatatcctgaaaaaagagtacaatgaaatcatcgaaaggagctaaggttccgatacaaaataaatgctaagttttaaataatgaagtcctgttggaggtttacgatgagtacgaaagaacaacaagtacaagagatgacaaatgtcattgctaagttcattgcttatatggcaaagaaattacctgatgatgtggaagctaaaattaaagaattggcagccgatgaaaagaatccattagctaaaacaatttatgaaacgatgcataaaaatatggaccttgcgtatgaattgaatcgtccttcttgccaagatacaggagtattgcaattctgggtgaaggttggttctaattatccattaattggtgaacttgaagaaatcttgcgcaatgccacatatcaagctacgcaagatgcgccacttcgtcataactgtgtagaaacatttgatgaattcaatactggtaaaaatattggtcgcactgcaccttacattacatgggacatcgtacctggtcgtgatgatgtagaaattttcccatatatggctggtggcggttgctccttgccaggatctggtaaaacattgatgccaggcgaaggttatgaaggggtagctaaattcgtattggacttgatgacaagttatggtttgaatgcatgtcctccattattggttggtgtaggtattgctacatccatcgatacagcagcaactatgtctaaaaaagcgttgatgcgccctgtatcctccaaagcagataatgaaaaagcagcatatatggagcaattacttgaagacggtattaatgcattgcaccttggacctcaaggtatgggtggtgacaaatccgtaatgggcgtaaatatcgaacatggttctcgtcatccatctgtaatttccgtagctgtaaacgttggttgttggaaccatcgtcgcggtcatgtagtatttgataaagacggtaagtacgaaattttatctcacaaaggagtgacattctaatggctaaacatattttgactacaccaattcaagcatctgatcttaaaggaattaaagcaggggatattatttacttaaatggtcatatcacaacatgccgtgatgttgctcatcgtcgtctagtcgaatatggacgggagttaccagtagatgttcgcaacggtgctatcctacatgcaggtccaatcgtacgcgatcatggtgacgataaatttgaaatgatttccgtaggtcctactacatctatgcgtatggaaaaattcgagtacgaatttgtaaaacaaactggtgtacgccttatcgttggtaagggtggcatgggtcctgaaacaactcgtgcatgtaaagattttggtgcattgcactgtgtattcccagcaggtaatgccgtacttgctgctacagaagtagaagaaatcgaatctgcgaactggcgtgaactaggcatgcctgaaactttgtggacttgtcgtgtaaaagaatttggtccgctcatcgtatccatcgatgcggaaggtaataactactttgaaaataaaaaagtagaatacaatgcgaaaaaagatgaagtgttagaagagatttataaacacgtaagcttcattaaataatctcattgtgagttttaactacataagaggattatacggttttggtacaatcctcttttttgtacccttttttagggatattacacgtattgggaggtatgtatggatacgagtgtaatgataactcttggcttcttggtatttgccatcgtcatgtttgcatgggagaaaattccattatctattactgctatggttgtagcagtaggtttgcacttaagtggagtcttatccgctaaagaagcattcgctggttttgtagatccaaatgtcttactatttatgggcatgtttgttattggtgaagccttctttgcaactggtgtagcagtgggggtaggtaatgtagttcataagtttgccaaaaccgaaacgtctttgctcgttgcaattatgatgattacaggtatattatctggcttcttatctaatactggtaccgctgctgtactgattcctgtaattattggtatttgtaaaaaaagtggttttaaacaaactaaattattaatgcctcttgtatttgccgcagctatgggtggtaatatttcacttatcggcgctcctggcaatatgattgcgcaagcgggcttacaacaagcgggcctaggctcttttggtttctttgattatggtctagtaggtttgccaattctaattgttggtactattttctatgctacaattggtaaacgtttcttaccagatgctccaagtcatcagccagatggtgcctttgaaagcaatgaagattatagccatgtaccgtcttggaaaaaatggacagctgcaatcgtattgattttgaccgttggtgctatgatctttgaaaaacaattaggtgtaaaactttatgtgagtgcctgggtaggtgctcttgtattagtagctacaaatgttattagtgaaacagcagctgtaaaatctatcgatatgaaaacaatcatgctcttcgctggctctatggcccttggggacgcaatggttaaaacaggtactggttctgtaattgcagatattatcgtaaatagccttggtgctagtccatctccaattgttgttctagtagtaatctttgtgcttggtgtgttcatgacgaacttcatgtctaatactgctacctgtgcattattggtaccaatcggtcttagtttagcatctcaattgggattcgatccaaaagcagtgcttgcagctatcgtaatagctagctccttagcgtatgctaccccaattggtatgcctgcgaatactatggtatacaacatagctggttatagcttcatggactatgtgaaagctggtttaccactcattgtcgtgtctagtattgtagcattagtattattgccaatcctattcccgttctaatatgtacaaagtaattttatatagtaagtgatattaaaccgtcaccgttggtggcggttttattttgttgaactccttagtctatgtgtgccttagcctattgattagaaaaagcaatatacatataagtaagaaatgattagacataatccatactttcacatataatagaaaaagtaacgagtgtacaaatatacattcacagtagacaaaacaggtggatatgaggaggaattatgcttaccgatattgaaatagctcaacaaaataagatggaaaaaattcaggttattgctgataaatgtggtcttacacctgatgatatagagcaatatggtcattataaggcaaaaatttcttttgatgccattaagcgtttagaaaataaaaaagacgggaaattagttctcgttacggctattacaccaacgccagcaggggaagggaaatctacaactaccatcggtttggtgcaagcattaaataaaattggtaagaaggctatcgccgcacttcgcgagccatcattgggacctgtgtttggtatcaaaggtggcgctgctggcggtggctatgcacaagttgtaccaatggatgatattaatcttcattttaccggtgatatgcacgccattacagcggcaaataatttgttgtccgctatgattgataatcacatccaccaaggtaatgagctccaaatcgatttgcgtcaaatttcttggacacgtgttctcgatatgaatgatcgtgcattgcgcaatgtaactgtcgcactggggggcaaggtatgtggtttccctcgagaagatcattttatgattaccgttgcctctgaaatcatggctattttatgtttagctaaggatttagaagatttaaaagcgcgttttggtcgcatcgtcatcggcccaaatcttaaaggtgaaccggtgtatgtacatcaactcggatgtgaaggtgcgatggcacttcttatgaaagatgctattaaaccaaatcttgtacaaacattggaacatacacctgccattgttcatggcggtccatttgccaatattgcacatggttgtaactccgtggtggctacaaaattaggcctaaaactcggtgatattgtagtaacagaagctggctttggcgctgatctaggggcagaaaagttcctcgacattaaatgccgttatggcgatatcttcccaaatgctgttgtcatcgtcgctacattgcgcgctcttaaaatgcatggtggcgtgtcaaaacaagagttgaatacagaaaacgtagaggctgtaacaaagggcttcagcaatttgcgtaaagctattgaaaatatgcgcttcttcggtgtacctgttatggttgccatcaataaatttgttactgatacggatgcagaaattgcggagttaactcgtttgtgcaatgactatggcgtgcctgtagagctcaatgaatgttgggaaaaaggtggcgaaggcggtatcgatatggctaaacgcgttgtggaactcgtggaaggcaccgaaccaagacctaaattcgtatacgaattaacagatagtattgaagataaaattggtaaaatcgttcgcactatttacggtggtgatggcgttacatttggggcaaaggcgaaaaaacaaatcgctcaattaaaagaatggggccttgataatctacctgtttgtatggcaaaaacgcaatattccttgtccgataacccagctctattaggggcaccaacaggctttacaatcaatgtaacggatattcgcgttgctaatggtgcaggattcctcgtatgccgcacaggtgatgttatggttatgccaggtttacctaaacgtcctgctgcacttaacatggatattgattcagacggcactattaaaggcttattctaataatatggtattgtaatcgacatagtatttttattgacatagtatacagagggggcgatggccccttttgttattgaggagtatatatggatttattgacgagttctgtaaaagattttgtagcggcaaccgcttcaaaggagccaactccaggtggcggtgctattgcagcattgacggccgccacaggtgcagcgttagctgaaatggtagcgaatttaacctttgataaaaaagggtacgaagatgtgcaagaggagatgcatcttttacaacaaaaagcagagtttattcgagagaaagcgctttcactagcacaagcagatgctaatgtatttaatttgtttatggatgccttagcattgccaaaacatacggatgaagaaaaactagcgcgtactgctgcgattcaacaggcttataaggatgcggctaatgtacctttagaaataggcatgattagttatgaaatatttgatcttgcctatgttgcggctacgaagggcaaccaaaatctcattaccgatggtattattgcagctattaatgcaagagctgcggtaaaggcagcctttttaaatgtgcgtatcaatatatctggcattaaggatgaaagctatgtagctgatttgaaagcgcaaatgaatcaaatagaatctgagctagacgaaaaggaagcctccgttttagccttgtacaaataaatggacgataacatacttttacattaagaatgttcgggaaaaaataaaatagaaagccttagaaaataaaatttctaaggtttttctttttctattgttaaaatccgaataataacgtaaaatataagtgtaatgtttgtagtttagaaaacaggagaccattatgtcagaacaaaacaatactgttgactctatgttgccaatacctaagctgtttgcctacggtttacaacacgtattagcaatgtatgctggtgctgtagcggtaccaatcattattgcgcaagctatgcatttgcctgtagaggatttaatccgacttattacagcggacttatttacttgcggtattgccacacttatccaaacattagggtttggtaatattggtggtcgaatcccgatgattcaaggcgtaacctttgcctctgttggtccgatggccatgatcggtgctcaacatggcatgaccgctatttacggtgccatcatcatagccggtatttttacattcttagtggcaccgttttttagtcgtttgattcgtttgtttccaccggttgtaacaggtaccattattacaatcattggtattaacctcatgccagttgccgtcaactggatggggggcggtgtaggtaatccgcagtttggtagtcttactaacataggactcgggttccttacattcttaatcgttatttttacttataaatttgccaaaggttttcttggtaatctttccgttttaattggtcttattggtggtacggctattgcctttgccatgggagtagctaattttgctgaggtaggcaaagctcattgggtagctatgattgaacctttctactttggtatgcctacatttgattgggcatccgtactttccatggtagtcgttatgctcgttgttatggttgaaacaactggcgatagtattgctatcggtgagattgtagataaaaaaatcgatcgtaaggaattggcatccattatccgtgccgatggtctttccactgttattggtggtgttcttaatagcttcccatatacagcatttgctcaaaacgttggtcttatcgctgtaacacgcgttaaaagtcgttttgtagtagctgcatctggtgtaatcttaattctattaggtttattccctaaattggcggctgttgtagcaagcattccaaatgcagtgctcggcggtgctggtattgctatgtttggtatgattattgctagcggtatccgttcgcttggtaaagttaattttgagggtaatcaaaacttgatgctcgttgctattagtattggcgtatccatgattcctattgcggcaccaacattctatgcacatttccctgcatgggctcaaattttattaaaatctggtattacctttggtagtatcatggccatcctccttaacttattgctcaatggcgtgaataagggcgatgaatttaaagaaatgggccgtcgttaatcggctttcaccattattaatattaagaactctactcatcatgggtagggttctttttttgaaagtaataatcttgaaatagtgactaaactcacagggggtacacctatatactatgttataataaattgataaatttagatgatttgttcccataagaagggaaggagtttatggctgaaggtaagattattgccatctcgattagcgagaaaaaagggcaaaagaaacataatattgaatctgctaatctcatcgtagattacggcatggaaggcgatgcacatgcaggtaattggcatcgtcaaattagtttgctcggcattaaaagtattgagcatatgcgcgataaaggggctgatgtaaagcctggagattttgctgagaatatcaccgttgaaggcattgtgttgtacgagttgccggtaggaactaaactgcaattaggccatgaggtattgcttgaggtaacacaaatcggtaaagagtgccatcacggctgtgaaattatgaaacaagttggatcatgtattatgcctacgcaaggaatttttggtaaagttctaaaaaatggtacaattaatataggtgatgaagtatcgattattaaataatgttgtaaatgaggtgtactatgaaggatgcatggggccgaacaattgaatatgtacgtctgtcgttgacggatgcgtgcaatttttgctgcccttattgccgaccagcagagattacaccacaaagccaacatcaactactatctgtggatgaatggatgactattttaggtgcatttcatcaagtaggggtgaaagctgtacgccttactggtggtgagccgttattatatcctcatattgaagagttattagcacgtatcaagcagaccggatggtttgaagatatttccatgactactaatggtagtttattggcacctagagctgctaaattaaaagaacttggcttaaatcgcgtaaatattagccttgattccctcgatagcgatgcctttgctctatgtgtgggcaaagctaaccagctagattccgttctaaatggtattcaaagtgctattgatgctggttttacttctgttaaaatcaatactgttctttcacgtcactggactgatgatgaagttcgtgatttgctaacgtatgtagagacttggccggtgatttggcgttttatcgagtatatgccatttcaaggcgatgcgtttcatgggccgacttttgatgaatggaaggctcaattagaacgtgtcagcggtggtatccttaccgaaaatcacgatgtatatggctttggacctgctacgtattatagtttgccgagtggcaagaaaatcgggtttattttctctatgtcccatagttattgtgatacatgtaatcgtgttcgtcttacttcagatggtcaaatgcgactctgtcttctacgtgatgatgaggccgatttagtgtctcttgtacgtcgaggcctaagtgaaactgaactcgccaatcatattgaatgggcactacaacgtaaacaagaacgtcatgatggtgttactatggatcaaccagaacgccctatgtggcgcattggagggtagtatggggttctttgattttctgaaaccgagaaataaagagtttgtcgaatcctgttggcctggtggtaaaatgctacaagtccacatggaatacgatacacaaaaacttatttttacctatataggccgttatggattacaatttagcgtgcctaagactgatgtaacagacattattgtgaaagaagtaagtcgtacccatagcgtcattcaaatttatcatggcgatgtatgtgtgggaactacggatatcattcctacagaggcttgtgaaacgataaagaattggatgctagaattctaatatcctatacatatagatatggtataaatcaaattgatatattttatgggaatgtaataaatattctttacattcctataaaataagcatataataattcatgtcatggaccactagctcagctggcagagcacctgactcttaatcagggtgtccagggttcgaacccctggtggtccaccaaaataaacccgcactacggtgcgggtttttcttattgtctgtccaagaaaatgggtgcagatcaatttgtaagcataagctatcttctttttgcaattctaattgctcttgcttgtgagtttttaccccaaaataagtttgagctaatgcgattacctctttacgcggatcaccattcatagcgattaagtaacaagcgtatctagagagtactatatcttgtatactacgttgtaagttagccccaacatctaccaatttgttgacgtcaacaaattcggattgaaccacatgaccactggcttcacaagcattttttgccttttcaataattttataaaaatttcgccattcggagtattcaagtatctcttgtaaatccctagcataccaatactcattaccttcgtcatcaagttgttttatcgaatcaaaaggcgatgtatatgaactgaatatatacttactcaaattggcgtagaattcgaagttgtaccaaaacatgaaatgggtgcgaagcatggagaaacaattccaagcgaaaacagaattcgtattagagaggatgtatatgaacgagcttgcaatggttatggtcgagacagattaactatggcacatgaattaggacatctattattacatcgcgtagagttgattactttggcgagagaagatggtgacataccaccatataaggatcctgagtggtaagcgaatgcatttgtgggtgaattactagcgccatatgaatatattaaggacatgagcataatagacatagcaagtcattatggaatcacagaaaaatcagcatcaatacaaagaagaagaaagtaaggaggtattgatatgatggcaataaaaaaacagccacctagtggttgaaacaaggggctgtagccaaagtgtataagttgcagcttatatactttgaatctgaacgtaaatggtcagactaattaattaagttagtgatgtatatatgctgactatatgtattcattaacttgatatggggacttctacatttagagatgtggaagtcctcttttggttaaaaagatttatttgatttatgtcagataaaatatatagtatagttaaggcagacataaggaaggaggtgatgccattgaagaagttatggaagataacaaaaaagtggctaccaacaataaccgcgtttatccaacttgcaatcgcaataatacagttattaaatcagtaaccacaggggctcgtaagagccccaatcttcctaactattataacaatggcgagcatatgatttcaagattaactttaataattagtattattgcctttgtgttatccgtttataatttattagtaatattaggagttctataatgaaattagatgatgtaatgaccacacaagaggcggcagaacgctggaatgttactgctgattctcttaaacaaaactgtaggggtcgtgtaaagaatggatttttagaaggagaatttagaaaatcagggaaaatgtggcttgtcactagacaaggtatggaacgtctatatggtaaagaaataaagtctttataaatttattctgataaatattgcatagacaataaattagtaatcacttatgattggtatataatactatttctcattaggaggtccccaatggcagtagatgtatccagaacacaagatgtatataaagatgcgggtcaaagtgtcaatttcacaacattattattaaatcgtaaagatcgcgatgcagaattagaagtcatccaagatatggctgatcgtattcaagccattaaacgttctgttagtattcgtgctaatggcgaaggcttgggtatcgcttttggctttagccgtaaagcatgggattatttattccctaatgcacctgtaccaaaagagttagaagacttccaaggtattaaaggtgataaacaagacgtgccagctgtagcggctgatttgttcttacatgttcgttccaataatgaatctgttacatatactgtagtggatcaaatcatggaattcttgcgtcctattacatctgtagttgatgaaactcatggtttccattatgaacaaggtcgtgctattatcgatttcgttgatggtacggaaaatcctgtaggccaagaagcagtagagtggggcgttatcggtgatgaagaccatgaattcactaatggttcttatgcatttgcacaaaaatatgaacacgaccttgatgcttggcgtgcacttcctacagaaatgcaagaaaaattcattggccgtcgtaaattcagcgatattgaattagaagatgatgaaaaagatccagcagctcacaatgtagtagctcaagataatcgcgatgacgaagaacataaaatcgttcgtatgaatgtaccatttgcacaacctggccaaggtgtgcgtggcacatatttcattggttatgctcgttactgggatgtaacgaaaacaatgcttacgaatatgttcacacaaaacgataaattgctcgattactctaaacctattacgggtatgttgttctttattccatcccttgatacattggatgctattgcagaaggcgaattataatcgttgtaattttacgatataattaatgataaaataatatgcaataaaatctatagaaagcaccccgtttggggtgcttttatgctataattaaagaatattatgattccatagaatttagtttgtagaggttgcccatgaattatacaagtacacgtggcactgttgccgtaaatgaaacatatgcgttattacacggtttggcagagaatggcggtttatatgtgcctgccttgtttccaacgaattgtttaaagtatgacgacatcaaagataaaacgtatcaagaggtggcggctgttgtattggcgaaattattcccttgcttctccgaagctcatcttaaggaaatgattaactccgcttacagcgatgtaaactttagcactcgcgatattgcacctctacattctttacttgaaaaagtatccgtattggaattattccacggccgtacacaagcgtttaaagatatggcgctttcactattcccatatttattggtagccgcaaaagaagcggaaggggaagataaagaggttcttatcctaacagctacatctggtgatacaggcaaggctgcccttgaagggtttaaagatgtacctggtacacatattcaagtattctatccaactgatggcgttagccctatgcaagcagaacaaatgcaaaagcaagaaggcgctaatgttaatgtaacggctattcatggcaactttgatgatgctcaacaattcttgaaacgtttattcgtcgatgcagatacagcaaaagaagtggccgaaaaaggcgtcatgttctctagtgcgaactccatcaatatcggtcgtttagcaccgcaagtggtatactatgtgaatgcttatgctgagcttgttgcacaaggtgctatccatgaagatgaagcatttaatgtagtggttccaacaggtaactttggtaacatcttggctgcttactatgctaaaaagatggggattcctatcggtaaattgatctgtgcatccaatcaaaataatgtacttacggatttctttaaaacgggtacatatgatatgaatcgtccgttctatacgacgatttctccatccatggatatacttgaatcctctaactttgaacgtttcttgtactatatttccggtgaggatagtgaaagaacagctcaatggatgaaggatttgaaatctacaggcaaattatctgtcaatgaagaagaatttaaacgtgttcaagctaatttcagcggtgcctatgtaaatgatgaagaaacaaaggccgttattgagcaagtgtataactcctatggatatttaatggatcctcataccgctgttgcgatgggcgcatatatgaaagaattagaagcacatccagaggatggtgctcgtcatacgatcatcgcatctactgcacatccatttaaattcccaacacctatttgtgaggctcttgatattaaggttggttctaccccttatgaaagcttagataatatctctgctgtaaccggtgtagcattccctaaacaattggctgcgttaaaaactaaatcgttgcgctttacaaaagccatcgacaaagaaaatatgaaacaagaaattctagattttgttgatacattctctaaataatgattgccgcctctctttgtaggggcggtttcttattgtattggttatcgatatattgtatcgacgagataggaggatatatggcaaaaaaagggttaatctatgcgcttctttcggcacttttgctgagtactatgaatttgttcgttaagatgctaggatcgaatattccatctggagagattgcattctttcgcggattatttggcaccgttgcagttcttatcgttatgtatataaagggcatccgcttttccacggaggaccggggcttgcttgttatgcgaggtctctatggcggttttggcatggtgtgtaactttatagccttggtacatatgaagatgtctgatgctaccatattgtttcaaacatcggggattttcgtgtttatctttagcgcctttttccttaaggaacgcgttccaaagggtgctggtaaatggcttattctaatcttcatagccgtgatggtgatggttaatccgtttagctatggtggatttacctggtatgcactagtcgctgtattgggtgctgctttatcggccgcagcttatacgacgattcgctctattagtaagcatggtaagcatagtaattttgaaattatggcgtatttcttgattacaggtatgattgccggtcttgtgacgaccgatggatttgtaatgccagaaggtcaagaatggctcattattactgctattggcggtataaccgtagtggctcaattcttcttgacgggggcttttgttacaacaaatgctgttgtagctcaattcttgcaatatgtaggcgtctttattagctccttctatggttttttattctttggtgaaagcttatccatcgaaacggtaggcgctggtatcgccatgtttgtggcgtccgttatgttggcacgcttaaaagagcaaaatgggcctatacgtgaaggcaaggtcatagaggaaaaaacaaaataaatgtcgaatactatataagtagtattggtgcataatcaagatgcgaccatcaattagggatatcattgtatggttgcatctttttgtatattgtaggagtgtgatggctatgtttatggagtggattaaaattgagaattaccgtaatctcgtagatattgaactacactttcacaatgatattaattacttcgtaggcgaaaatgcagtggggaaatccaattttcttgacctcttagagcaaatgatgaatgcccgaggttttcaagaaagtgactttgctgatgtacatagaccgatacgcattgagtgtaaaatgtctttttctgagctcactacatcatttcaggatatgcttggtccagaagatggtatgtatctacgccttgaacaagtggttcaagaggtatatccacgactctataaggtggatggagagaaactgacaccggtaccattgtctatgttgcgccatacaatctatatgtgtcatcgcgatacatcagaggcggaactttattccattcctacatcggtgtatatggaactggggaaacagcttgttacctatctgcctaagactggattgacatcagatgatgccatcacattagatagctttatcaatgtaagaatggggcttgattccgaatgtgttcttaatattcagcgtcttgtagaactattaacatcctctacagaggcaaacttaattcgtaagtattccatagataatgtacggcttatcatggcggtagcgctaaagattttggctcaaatttacatgaaggtgcacagtgcatcctccaatttagaatcattgctcgtgtatgacagtgaaggccgtcgatttttacctgtctttatcagcgtagatgagccggaattgcatttgagtccttatttgcaacgggctgtgctcagctattatcgtcaaattgcaaccaatgaaaatgctgaatttttagcattaattaaacagctatttcaaattgatggcctattaggtcaattatttgtggtaactcatagtaccgatgcattggtagacgattatcgtcatattatacgcatgtatcgtgatgaaacgggtctcgttcgcgcagcatgcggggtgacatttaaatttgctcgcgaagtagaaaagcatttgatcatgcattttcctgaagcgaaggaagccctctatgcacggtgtatcatcttggtagaaggggaaactgagtatggtagttttgcaggtatggccaaaaaattaaatgtagattttgattattttggtatatgtcttatcaatgcacgtggggaatcttctattagtaaacttcataaattatttaaaagctttgccattccaacggtagcactctatgaccgagatgtaatggataagcatagcaagtctcatgttaatgtgttttacacgaatgaaatctgttttgaaatggatgtagtgtcccatttaattcaacatcatcatcgggatatattggatgccattattcaagatcttatcgacacagggcgtggtatggtaacaaaggatatggcccgccgcggttttgctaagttggggcttgatgatcatcaagtggtacaacgatgtttgaaaaatatcaaggcaaaggatatagatacattattgacgtactatttctcttggttttatagcaataaaggtgtgattgtagggcgcagaattgcctattatatacctgatcatatgattccgccagcctttattgcggttattgaacgggctaaagtcttatctctagaatcatctattatgaaaatagaatgataagtatattaaaaactttcaataaactatatcgaaaaatcttgacatagatgcagttttcttttatgattaatgaggttaatttttccgaacggttttaagtgtgagtaggagttaaacatgaaggaatttatcaaagagtttaaagagttcgctttcaaagggaacatgatggacctcgctgtaggtatgattattggtgcagctttcacagcattagtgaattctgtagttagcaatttgttcatgccattaatcagcgtgttcactggtggtattgattttagcaatctatatttgccattaagtgaagcgtctaaagaagcatttgtaaatggtgctgatattgcaacagctcgctctgctggtgctgtattgccttacggtacattcattactgaccttattcaattcttaatcttagcattcgttgtattcttaatgattcgcgcgttgacgaagctaatgcaaagtgctaagaaagaagctgaagaagcaccagcgactacaaaagaatgtccattctgtaaaacagaaatcaatattgatgcggttaaatgtcctaactgtacatctgatttaaaataatcaacacactaagaaagagttctagaagcataatgcttttagaactcttttttgttgtaacttagccctgagttttggtaaatttccaattataggatacaatatagatacatatagttttcgttgtaaatgatatgttgttacagcattttagaatatatagaagggatgaaatgattatggaacgtaaaccattagtagtggtacctggcttagtgcgacgtgatgctattgcctatttacaagaacatgttgacgtacgtcagtggacagaaaaaactaaaatgcctagagaggttttaaaagaatggttacgcgatgctgatggtttgtggtctattaattccatatcggttgatgcggaccttgtgaaagatgcgcctaatttaaaggtcattgcacaagcctcagtaggctatgacaatgtaaagattgatgaacttacggcggcgggcattccttatggcaatacgccaggtgttctcaacgaaaccgtagcagaactcgctttcacattgattgctacggcgagtcgtcgcattattgaaaatgcaatttttgtaaaaaatggccgttgggctgagcgtccttctaatattaagggctttgatttgagtcgccgcacattgggtatcattggtatgggcgccatcggtgtttccatttctcgacgtgctcgcgcctttggtatgaccgttgtatatcataatcgacatcaacgtaatgacgataaattgtatagaacaacatatatggaattagatgagctactcgctacgagtgatgtggtatgtatcatggcgccacttacggatgaaacgtatcatatgtgcgatgccgagttctttaagaaaatgaaaaagaccgcattgttcgtcaatgtaggtcgcggtgccatcgttgatacagatgcactcatcgatgctcttaaaactggtgaaatcgattatgctgcacttgatgtaactgatccagaaccactaccagcagatcatccattattgtccattgataactgtttaattgttcctcatattggttcgtatacagatcgcacgcgatatgatatgtccatgttgacagcgaataatatcattgctggtgttcataaaaaacctctacaaacatgtgttaacgaagaggtgaattataaaatgtgcggtcctatataaaatatggtaaaataaaagaatatttatcgtatggaggttgtaacgttggaacataaagatactgaacaaactgtagctcctgaagaagttgtatccattaactttatcgaagctgaaataaataaagataatgaagagggcgtatacggtggccgtgtacatacgcgattcccaccagaaccaaatgggtatttacatatcggtcatgctaagtccatttgccttaactttggcttaggcgaagaatacaagggcttaacaaatttacgctttgatgacacaaatccagaaaaggaagatgtggaatatgtaaattccattaaagaagacgtggaatggcttggattccattgggatggcgacgtacgctatgcatctgattactttggcaaaatgtatgattatgccaaaaagcttatctccttgggtaaggcttatgtagatgatcaaacagcagaagaaatccgtcaaacgcgtggtgatttctctacaccaggtacaaatagcccatatcgcgatcgctctgtagaagaaaatttaaaactctttgaagaaatgaaagaggggaaatacaaggatggcgaaaaggtattacgcgctaaaattgatatggcggatcctaatatcgtcatgcgcgatcctgtattatatcgtattgtaaatgcagcgcatcaccgtactggcactgaatggagcatttatccaatgtacgactttgcacatcctatcgaggatgctattgaacgcattacccattccgtatgtacactggaatttgaagtgcatcgtccattgtataattgggttctcgaagattgggaagacactgaaaaacctcgccaaatcgagttcgctcgtttaaatgtaacaaaaatggttatgtctaaacgcaaattacgtgctcttgtagaggctggcctcgtatccggttgggatgatcctcgtatgcctaccatctctggcttgcgccgtcgtggctatacaccagaagccatccgtgatttctgcgaccgcattggtgtagctaaggcggatagcaccgtagatattgcattactcgaattctgtattcgtgaagatttgaaattaaaagctctacgtccaatggttgtcatcgaccctgttaaggttattatcgataattatccagaaggtcaaacagaaccttgtgtggttgaaaataatccagaaaatgaagaactcggtactcgtgaagttatgtttggtcgcgaaatttatattgagcgcgccgactttatggaagaaccggttaagaaattcttccgcttggctccgggaaaagaagtacgcttaaaaggcgcttatttcattacttgtcaatctgttgtaaaggatgaaaacggtaccattaccgaaatccattgtacctatgaccctgaaacgaagagcggcagtggttgcacacgtaaggtaaagggtacattgcattgggttgaggcttctacggctgtagatattgaaactcgtttatatgactatttgcttaaagaagaatccgatggtaaagacttcttagctgattttaatcatgaatcgttacaagttatgcacagtaaaggtgaagcaagccttgctaatactgttcctggcgatagattccaattcttgcgtcaaggttatttcgtaactgataaggatagcactgccaatcatattgtggtaaaccgcatcgtaggtttacgtgatacatgggcaaaacaacaaaagaaatagttgtgattataccgcccctttaaggggcggttttgtttaggagaaaactatgaaatcaatgatagctttagctctcgctggtgttgtagcgatgagcacacctgtacttgttgatgcggctaatattaatgctagtaaatatgccgctgcatatggaacgtataatggtatgaaacttaacgaaggtgttacgatttatgccaatgcgccaaaggcgttgttcgccggcgcaggtaaaaccgatgtaaaaacggctcttatgcaagctggtgccagccgtgctgaggtatatacgcttaacgtaaaacgagaaaatgaaatgaattacgctgtatttgcgaatgtggttgtaggtggtaaacataatcttgttaacaccaagcatgtgagcactgatgccagtgatgtcggtaatttggtggcgtctatcaatggaggtaaagctgctgagctaggccaataccaagtggtgacacctttggctaagcataataaaacatatgtaggtgcactaaaatatacaagtaaagataataataattcttataatgagattcttcatattgctgtttctgaaagtaaatacgagggacctggtgtacgatttatcgctatagatgaagagagtgatgctaaggtatttcctcgcgtgagcaacttgctaacgggtaaataataaataattattgaaataaattatcaattatcttgacaatatttctcatcgagagtactatgtgtatatagtaatcagtctcaagtaatgaggcggattctatatagatatgcaacaggcaggtacgactatgatggattcaattgacaatatcattggatttcattgtgcaccggcaattcgaggcattaaggtctcgaatttggtttctattccacgggacatgaatgaacaaatccaattcgttttgactgaatataataaagagtttaatgaaaagggtttattcttctttgaattatgtcgctgtaaagcacgtagactactattggtgttccgtgaaacacaattacgagactatgtacggcaacctgcggtgatgacatttttgaaagcctacggttatcaagatagtatgagcattatggagatgcttgaacatttgcgatatcgtatggaatcaagcgttgatttccctcatgaaattggtgtattccttggatatccattaatggatgtgaagtattttatttctcgtcgcggtaatggatactctatgtgtggtgaatggaaggtttaccacgatgtagtagatgcacaacgctctttcctatgttacaaagcatgtcgtgaattttgtcaaactcaattgatgttgggaaaaacatttagttcattggtcgcaagaacggcctaggaggtacaagatgattggtgtaattttttggtccggtacaggcaatacagaaagaatggcttatgaagtagctgaaggtatcaaagctgcaggtcaagacgtagaagtaaaatccgtttctgaagtatctgttgatgaagcagcagcttacgataaattggctcttggttgcgctgacatgggtgctgaacaattagaagaaggcgaattcgaaccattctacactgaattagaaggtaaattgagtggtaaaaaagtagcaatctttggctcctatggttggggtggcacttggttagaagactggggcactcgcattaaagatgctggcggcgaattagtagctgacggtgtggcaatcttgggtgaaccagatgatgacggcaatgcacaatgccaagaattgggtaaaacattagctaacgcataacaacttcatattatataaagactatagcgatagatgtgacatcgctatagtcttttttgtatctatttatggaaaggtgtactgctttggtatataattaaataatgttattgcaaaggagacgcattatgaaggacgagcgatttatagttacctaccgaattgaagccgacacatatgaagacgcaaagtctattgcttgggctgttcaagtagaacaaacgattgaatttccttatgaatttgtaactgatccatatattaaaaatacaattaccggtcgattggaatctctcgaaccgatggcgccagattccgcatatgcaactgtgggagtgatgcctaatgtagtgattgatgcttctcggtattatctagctcgcatttcatatcatgtagatactaccgcattagaagcaacgcaatttttaaatgttgtatttggtaactcatcgttacaacctcatatttgggtggtagacatagaactatgtcctacattatttgacgtattcaaaggtccacgatttggattgcatggtattcgtagattggttgaaacgcctacaagaccgatgattcaagctgtaattaaacctatgggaacgcctaatgaagaactagctcgcatgtgtgcagcgtatacgcgtggtggtgtcgatgttatcaaggatgatcatggcattacgaaccaatccttttcgcagtttaaggatcgtgtaagacgatgtgctgctgcggtgcgtgagatgaatgaagcgcatggaaaacacgcattatatgcagctaatgtgtctggtgatggcacagacgtattagaacgtgcttatttcgctaaagaggcgggtgctacggcccttatggtagccacaggtttagtgggctctggttggttacataaattggctaccgatgaaaaattgcgcttgccgattattcaccatcctgcctattctggtggctttgtgagccctggtgtatccggcattgccgactatttacagttgggattcttgcctcgcctatttggcgctgatatgatggtttttgtatcctatggagggcgctttacttttacccaagagcaatgtaagcgtatttccgcgtatattaaacatcctgtaggattggtgaaagcaggctgtccggctcctggtggtggcgtgactgatgcgcgccttacagaattagtcgagttgtacggaaatgatacgatgttcctcgttggaggcgatatgttccgtcgtggaccagatcttgagtcgaatatggcgtattttgttaatcgattagaagaactgtcacaattgaaacaataatagttgtgaaagttggactttcactaacgcaatcgtacggtgattgaaagactttcaccaatagaaataattaattatatggagtagtttaatgagtgaaacctcacctttagaggtccatgttcttgctagcggtagcaagggtaattgtacagttataaaaaaaggaaattctgttatattacatgatgtgggtattagttgccggcgcatcgttaatgggctgaaagaattacatatcgatatgagccaggttgagggaatatttattagccacgagcataccgaccatattgcggggctacaacaactattaaagcgttttgatattcctgtatatactaagcaaggcacgtggcgtgaaatccaagataagttaatcgttccaaaacatcaactggtggaattaactaaggggagtttggagcttggaaatcttacggtggaaccctttagtgttagtcatgatgcggcagatcctataggtatcaatgtatattctggcaaggacaaggttacagttgtcaccgatacgggagtgattacggatactatattgcatcgattagatgacagcacattgctagtcttggaggctaactatgatcctcagatgttgcgcttcggcccgtatcaaccatttttaaagcaacgcgtagccagtgatgaaggtcatttgagcaatgaaatggcggcacaggccttacttatgatgaaacgacctgattttatgcaggtcattttggcacatcgctctgaaaataataataaccctgtcctcgtaacgcagacgattggtcaaatgctcgtcgatgggggcgtaaaaattggaccggaaatgaaattacagcatggccaacctaacgaaatagtatccatgcagtctgttcataaaaactagaggtacatcttgtatgaagtttcatgtaatctgtattggtaaattaaaagaggcttaccttcgtgaaggtgtggccgaatttgtaaaacgtatgcgcccctatggaggcgttacaattactgaattgaatgaaagtaaaataggggataagcccagtgatgcggaccgtaaacaagtagtcgtagaagagggacagcggttgttaaaggccgttcctaaatcggcatacactgtattgctagatgtatatggcaaaacgttgtcttctgaagatttggcctccatggtatctaaattagaggtagacggcatcagcgatatggcctttattataggcggtgcctttggcgttagtgacgaattgcgccgttctgtaaaatttaagttatcctttagccctatgacctttactcatcaaatggttcgattgttgttagtagaacagatttaccgcagtgctaagataaatcgcaatgaaccataccattggtgatatacttgactaaatattatttatatacaatttttgaaaaaggagttttcaactctaaggtcgaatagtataataaagagtaaagttatatgaaggaggaattccctatgaaaatccaagacgtaatgaataaatatcctgttacagttggtaaagatgctcccatttctgatgtagcagacttattagttaaatataatttaacagctgtctctgttgttgatgaagaaaataaattgttaggtattatttcagaaggtgacttgttatacaaaaaggttcgccctcatgtacctcattatgtaaatgttttgggcgctagtatctattacaatggtattggcgaatataatgcacaattcaaaaaattgttagcatcccacgtatatgaattgatgactagcgatgttattactacaacaccagataaagatgtagaagaaatcgtatccgttatgcttgatcaacatttgaaaaacgtccctgttgtagataaagagtaccgtttgattggcattttatctcgtcgtgatatcattaaattgattgcaaaagataactaattatttacatatatgcaatactaaacagccactccctatgagtggctgtttccttataatgctaagaattgcattgaattttcatttatgatattataaggagtgcataatatactacagaaatttgggcgtttgcccttcaaggaggacatattttaatgaaagcaactgtaaatcctgttgatcaacacgtagtaactttaactatcgaagtacctgcagcagaagtagacaaaggtatcaaacaagcggtaaaacgcattgcaaaccaagtgaacattcctggcttccgtaaaggccacgcacctcgtcgtgtattggaaatgaactttggtaaagaagctatcttggaagaagcatttgacgtattggctagccaaaactatagtgctgctcttcgtgaaaacgatatcgttcctgtatctgatccagaaacagaacgcgtacaattcgaagaaggtaaagatttaatcttcaaagtaacagtaacaaaacgcccagaagttaaacttggcgattacaaaggcttagaagctacaaaacaagacgctactgtaactgatgaacaaatcgaagaacaattgaacaatatccgtgaacaacaagctaaaatggttgttgctgaagaaggcgctacaattcaaaaagacgacttcgcagtaatcgatttcgctggttctgttgacggtaaaccatttgatggtggcgaaggtaaatcctacccattacaaattggttccggtagcttcatcccaggtttcgaagatcaattgatcggcgcaaaagctggtgatgatgtaactgtaaaagtaacattcccagaagactactttgtagctgaattagctggtaaagaagcagaattcaaaactcatatccatgatattaaacgtaaagaattgcctgaattgaacgatgaattcgcaaaagaagcaagctcttacgaaacaattgaagaattgaaaaacgatcttcgcgctaaaatggaagaagaagcatcccgtcgtgccatcgacacttacaatgctgatttgatccaagcagctgttaaaaatgcaactgtagatattccagaagtgatgatcaatgatcgcgtagaacaaatgattcaagaattggctatgaacatggaaggccgtggcttgaaacttgatgactacttgaaattctccaataaaactatcgaagatttacgcactgaatacaaagattccgcagctgaaaatgtacgcgctgatttagtattggacgctattgcaactgctgaaggtatcgaagtaactccagatgatatgaatcgcgaaatcttcattatggctcaaaactttggagcagatcctaaagaagtttgggatattattgcaaaagaaggtcgtgtagctatgttagcaggctctgtagctcgcaaaaaagcagctcgattcatcatcgataatgcaaaaggtgcagaagcagcagaataatgcttgctcactaggtacatgaaaaggtgattatatgtatgtaccaatcgtagttgaacaaggcgaacgtggtgaacgttcgtatgatatttactctcgcttattaaaggatcgcattatctttttaggtggacctattgatgataatgttgcaaatgcggtgattgcccaaatgcttttcctagaagcagaggatccagataaagatattcatctatatattaatagcccaggtggtgttgtaactgctggtatggctatctatgacacgatgcaatatattaaaccagatgtgtctaccatttgcgtaggctctgctgcaagtatgggggctgtattattgacagccggtgcaaagggaaaacgctttgcattgcctcatgcgcgcgttatgattcaccaaccattgggtggtgtacaaggtcaagcatctgaaatcgaaatccatgcccgtgaaattcttcgtatgcgtgaagagttaaatggtatcctagcagctcgcagtggccaagatattgaagtggtagcacgtgatactgatcgtgataacttcatgagtgcccaagatgccgttgaatacggtttgattgacgaggtgttaactcgcgatactctagaaagcaagtaatggaggcgctcattggcaaaagataaagatactatgcgttgtagcttttgcggacgcacaagtgatgaagtaagaaaactagtggccggtcctaatgtgtacatctgtgatgaatgcgtagaagtttgtgaacgcatcattgaagatgaacttggtgacatcggtacagaagactttaaattaaaagaattgccaacgccaaaagaaattaaagctcatcttgatcaatatgtcattggtcaagatgatgctaaagtttcccttgcggtggcagtatataatcactacaaacgtctacaaacagataatatggtagatgatgtagaactacaaaagtccaatgttctatttattggacctacaggtagtggtaaaacattattggctcaaacattggcaaaaatgttagaggttccatttgcaattgcagatgcaacaagcttaaccgaggctggttatgtaggggaagatgtagaaaatattctattaaaactcattcaagccgccgattatgatattgaacgggctgaacgcggtattatttacatcgatgaaatcgataagattgcccgtaagtctgaaaatccttccattacacgtgacgtgtcaggggaaggtgtgcaacaagcacttttaaaaatcttagaaggtaccgttgcttcggtgccacctcaaggtggtcgtaagcatcctaatcaagaaatgttacaaatcgatactactaatattctctttatttgtggtggtgcatttgatggcatggataaggttattacaaaacgtaccgctaagaaaacattaggttttggtgctgatgtacaacgtgctgaagaacgcgatgtatctgcgattctcaaagaggttgtacctgaagatttattgaaatttggtttgattcctgaatttattggtcgtttgcctgttatggtaacattagacctattagatcgggatgcattggtccaaattcttacaaaaccgaaaaatgcattgactaagcaatatgaaaaaattctatcccttgatggtgtagaattaacatttgaagatgatgcattagaagaaatcgctgatgaagcattacagcgtaaaactggtgctcgtggtttgcgtgccattattgagaaggtaatgaagtatgttatgtatgaagttccatctatggatgatgtggcaaaatgcatagttaccagagaagccgtaaagggcacaggtgaacctatactcaaaaatgaggcagacaaagacatccagctgaaatcgtaattcgaagaaactcatttctgtgtaggaatgagtttcttttcataatataaatccttggaggacatatgaatttactcgaagtaggtattcctaccgttccccttagagggatggttgtatatccgaatatcgtgattcacctcgatatcggtcgagacaaatccatcaaagcggtagaagccgcaatgaacgaagatcgcattatggcagtggtatcccaaaaggatgattctgtagatgcacctaccgttcatgatttagcccaaatgggtacacttgtaaaaattaaacaaatgttgcgcttaccaggtggtattgttcgtgttctcgttgaaggtattactcgtattcgtgttatgaacattacgagcatggatccttattatgtaggggactatgaacgtgtagcatccattttcgaagatgatgtagaacttgaggcgtatcgtcgtttagtacagtctaaattcaatgaatgggctgatgaagctaaaacgattactgaagaaggcgttgcacgcgttatggaattgcgtgacccttgtgaactagccgatcaagtagcatttatgctgcctgttaataatgcaaaacgacaagagttactagaagaattatctgttgcaagacgattgaacatgattgtaggcattcttaatatggaattacaaatttctgatttggaaaattccatcaacaatcaagttcgtcaagctatggaaaaaacacaaaaagaatatttcttgcgtgaaaaaattcgcgtcattcatgatgaattgggtgataaaggcgaccctgaggaagaagcagatgaattaagagaacaattaaaagctcttaatttgagcgaagaggttcataatcgtatcgataaagaaatttctcgctatagccgcatgccacaaatgatgccagaagcgaccattcttagaaattatcttgactgggtgctaagtttaccatggaacgatgttaccgatgatcgtctagatatcaatgaagcaaaagatattttagaggcggatcattatggcttagaaaaggttaagaaacgtatcttagaattcttggcagttcgcaaattgacaggtaagaatagcggttccatcctttgcttagtaggacctcctggtgttggtaaaacatcgttagcttcatccattgctaaagcgatgaatcgtaaattcgtacgcgcatccttaggcggcgttcgcgatgaagctgaaattcgtggccatcgtcgtacctatattggcgcattgccaggtcgtatgattcagggcattaaaaatgcaggtacacgtaatcctgtattcttgcttgatgaaatcgataaattggcatccgattataaaggtgatccatcttctgcattattagaagtattggatccggaacaaaatagtacatttagcgatcattttattgaaattccatttgatttctccgatgtattctggattactacggcgaatgtggcctctaatattccaggcccattattagaccgtatggaaattattgagctttcaagctacatggaagatgaaaaattagaaatcgctaagcgctatttagcacctaaacaaatcgaaaagaacggtttaaaagataataagattaaactatctgatgcagtgttaaagaaaattgtatccgaatatactcgtgaagctggcgttcgtaccttggaaaaaactatcgctaaagtatgccgaaaaatggcttaccaagtggtagaacaagatattgaaactccgaaggtttccgtcaagaatttacacgaatacttaggcgcgcctatctttatcgatcaagagcgtgaaaagaaacctcaagtgggctatgttaacggacttgcttggacctctgtaggtggtgtagtattaccttgtgaagcgacaacaatggcaggaactggcaaattagcactaaccggtagccttggtaaagtaatgcaagaatccggtcatgctgctatgagctatattcgtcataatgcaaaatccttgaaaatcgatgaagaattctataaaaagttagacattcacgttcatcttccagaaggggcaacaccaaaggatggtccttctgcagggattacgatgacattagcaatggtatctgccttgacgggacgtaaggtgcgcgctgatctcgctatgactggtgaaatcacattgcgtggccgcgtattaccaattggcggtcttaaagagaaattgttggcagcattgttatacggtgtgaaagaggttttaattccaaaaggtaatgaaaaggatattcctgaattaccagatagtgtaaaagaaggtcttatcatcacacctgttaagacaatggatgaagttttagcaaaggcacttgtataatgcaaaagaagaaaaaatccacaaaacatatggggccaaaaccacaatatacaagaaaagaaattaaggggcctcgcattatagcagcaaaatataatacatcctgtgtaaaagcagatcaatatcctgaaggggatacggtagaagtagcctttttaggacgctctaatgtgggcaaatcctcattgattaattccttatgtaattatcgtggccttgctcttgtgagtggacagccagggaaaacaaagacgataaactattttgatattgaatcaaaagaggatattagtgaaactgaagaacgtcggtatcactggttcttagttgatttgcctggatatggttttgcaaaaactaataaagataatcgcaatatgtggtcatcatttatatctgattatatattgcattctgaacgattaatgttattatgcttgcttatcgatgggcgtcatccagagatgcctatcgacaaagtggcgtttgattggctcgttgaggccggtgtgcctcttcaaatcgtggtgacgaaggtagataagctcaatgctaaagagaaatccgtaaatttagcaaaaattaaagctatgtatccaactgattctccaccgattatgtatagctcattgaaacatacgggccgtgagttattgcagcaacgaattaatcaagtactagtaggggaggaagcatgagtaattcaaaccagttagagatgatggaacgcatcgctcttgatttagagggtgttgaacgtgctcttgcgtcatcctttaacacagggtctgaagattttaatacactgattagacctttatccgaggccggcggtaaacgtttgcgcgcgcaattatgcttgcttattgccaatgcgggtacatcggtagaggaagaacgtattaagattgcagaagctgtagaaatgttacacctagcgacgttgattcatgatgatgtcttagatcaagcggaaatacgtcgcggtgaagagacaattcataagcacaaaggcaataaggttgccattttaagtggtgattatttatttgctaaggcattccgtatcgtatccgaaatgccacatatggaatatttaaagatcttttctcatatcatcacctgtcttgtggaaggtgaatttatgcaaatggaagatgtgtatcgcattgaccaaggcatagatcgatatatgacaaagacgcaaaagaaaacagccgactttatggagggctgcatggaactagggggtctgttaggtggctggtctagtgatgaaattatgtacctaaaacgatatggtcatgcgttggggatggcgttccagattaccgatgatattatggattatcgcgaaacctcagacacgacaggcaaacctgtggggaatgaccttcgagagggcttgttaacctatccattgcttagtatcgttaatgaaagcaatcagaatcagttgttgcaagatattaagaaccttaatcatggcggtaatgaacaagagattatcgattatgttattgctcagggtggtatagataatacattacgggtcgcacaacaatattgtgatgatgcgttatctgcattacaatctatacgtgattttgatggcaaagagtttttagtattagctgttcaaaacttagcagatagaaaggtataatatggaggccttcgaacctaaagatttcgaatatcccataaagaaaccttcatttgatagcgtagttcgacaaaagcgtcggaaacaagcacaaaaagcagaacaagagcaatatgccgtggtaaatactgaaccggaagagggtgctccagagccgttatatacggagatggaacaaaagatgatggacgaagctgccaatttatcgttggtaggtcatctatcagaacttcgtagacgtattataattatggttgttgctattatcataggaacgggcattgcctattattatgtagacgtattattagatattttattggcccctgcaggcaaattgtattacatgcgacctacggaagccttctttacatatatgaaggtatccatcgtaggcggcataattttggcatcgcctatcatactgcatcaaatatggctctttgtgaaaccagcattgacagttcgcgagaaacatctatcaaactggattttaccagtagcctttttgttgtttgtaacaggtattttcttttcctatatcttagtattgcctgctgcggttaagttctttatgggctttgccaccgatgaattgcaaccgatgttttccattggtcaatatatggactttgtattggcctttgtactaccgttcggctttatattcgaactgccattggtcattatcattatgggatattttaatttaattacatcccaattcttaaaaaagaaacgcaaaatatttattttgctttcctttattataggtgcagtaatttcacctacaccggatatgttctcacaaaccatgattgcattgccgatgatattattatatgaaactagcctctttgtgttagctaaagtgatgaaacgataagtacttactttcaggaggaacgatgaaaacctacgaaaatttaaccacctacaatcctggtgaaatcgaaagtaaatggtattcctattgggaaaaccaaggttactttcacgaagaagtagacactgacaaggaaccatttagcattgtattaccacctccaaatgtaacaggtatgttgcatatggggcatgcgctagataatacattacaagatatcttgattcgttttaaacgtatgcaaggttacaatgtgttatggatgcctggtacagaccatgctggtattgctacacaaatcaaggtagaagaaatgctcgctaaagaagagggcaaatctcgctatgatttaggtcgtgaaaaattcgtagaacgcgtttggaaatggaagaaagaatatggcgataccattgttaaacaaattcgcagcttaggtgcatcctgtgactggagccgtgaacgttttacattggatgaaggatactatcatgcagtacgtgaagtatttgtaagcctttatgaaaaaggtttgatctatcgtggtgaacgcatcatcaactggtgccctcgttgtgcaacagcgttgtctgatgtagaggtggaacacgaagatgaacacggtcatttatggcatattaaatatcctgtaaaaggtgaagaaggtcgctttgttatcgttgcgacaacacgtcctgaaacaatgttcggcgacgtagcggtagcagtaaatcctgaagacgaccgttataaagatttaattggtaaaacattaattttgccatttgttaatcgtgaaattcctgttattgctgatgactatgtagatgcaagctttggtacaggttgtgtaaaaattacgccagcccatgaccctaacgactttgaaatgggtcaacgtcacaacttagaatccatcgttgttatgaataatgatgcgacaatgaacgaaggtgctggcaaatttaacggcatgacacgcgaagaagcgcgtaaacaagtggtagctgagcttgatgaattaggattgctagaaaaaatcgaagatcatgaccatgcggttggccattgttcccgttgtaaaacgattattgaaccaatggtttctaaacaatggttcgtagatatgaaacctcttgcagagccagcattgaaggttgtaaaagatggtgaagttcaattcgttcctgaacgttttacaaaaacatatgtaaattggctcgaaaacatccgcgactggacgatttctcgtcaattatggtggggtcatcgtattccagcgtggtattgtgatgactgtggtgaaacgattgttagccgtgaagacattacagaatgccctcattgtcatggacatgtaacacaagatccagatgtgcttgatacatggtttagttctggtttatggccatttgctaccatgggttggcctaaagatacagcagagcttaaacaatggtatccaacaagtgtactcgtaactggttatgatattatcttcttctgggttgctcgtatgattttcatggctcttgagtttgaacatgaaattccattcaaacatgtatttattcatggtcttgtacgtgatagccaaggccgcaagatgagtaaatccttaggcaatggtattaatccattagatgtaatcggcgaatatggtgctgatgcattgcgctttacacttgtaacaggtaatacaccgggcaatgatatgcgtttctacatggaacgtgtggaagcaaaccgcaactttgcaaataaaatttggaatgcttctaaattcgttctcatgaatttgacgaattatgatgaaagtttcgttcctactgaggctgatttaacattggctgataaatggattgtcgaaaaatacaatgaaaccgtagcaagtattactgcaaatcttgataaatttgagcttggtgaagcggctagctccgtatatgatttcatttggaatacatattgcgactggtacattgaacttgcaaaaccacgtttgtatagcgatgctaatgaacgcgatcgtcgcactgtacaatatttgcttgtaacaatcttgcgtcatatgcttgaattgttgcatccatttatgccattcgttacagaacatatttggcaacacttgcctcatgaaggtgaaagcattgtgattgctaaatggccagaagcattagctttcacaaatcttacagaggctgcacgtcaaatggaaatcatgatggatgctattaaaggtattcgtaacatgcgcgccgaaatgaatgtacctttgggcaaaaaagccgaagttatcgtagcaccgactgatgcgtctattgctgaggccgttgcagagcatagcgattatttcgtaacacttgcatgggctgaaaaggtaactattctaggtgctgatgatccaaaacctgaaaatgcaaccgtaactgttgtaaatggtatggaagtatatcttctcttgaaggatcttatcgatgcagataaagaaaaagaacgtatcgaaaaagaaaaaggtcaaatgcaaaaagaaattgcacgattagaaggtaaattgagcaatcaaggtttccttgcaaaagcaccagaagcagttgtagcaaaagaaaaagaaaaactagaagaatataaacaaaaacaacaagcgttgttagaacgtgaagaattcttaaaaaccttataggaggtttatatgacatacgaagaagccttaacgtatttagaagatacctcatcctttggcataaaaccggggttagagcgtattcgtgcattattgcaagcgttggggaatcctgaacgagattataaaatcattcatgttacgggtacaaatggtaaaggttctgtaacaacctatatttcgtatgctctatttaccagtggattacgggtggggcgatttacatcgcctcaccttgaatcttatacggagcgtatagaaattaatgatgttcaaattagcaaagacgcttttggcaatttgatcgattgtgttcgacaaggcgtagataagattattgctgatggggtagagccacctacgcaatttgaaattctaacggccgcagcattcctattctttaaagaacaaggtgtagactatgctgttgtagaagctggcttgggtggattactggattcaacgaatgttgtgacaccagtggtttccgttattactaatgttacccttgatcatcaagcgtattgtggcaatacggttgaagagattgccaagcataaggcgggcattataaaagaaggtgttcctgttgtaacggcggctcaagaaggaccattaaaggtcattgaagagacagctgaagaaaaacatgcaccattatatgtgtttaacaaaaagtttggtatcgatagccgtagtgtagtgcctggtgggcaattgattacggtcagtgctattggcgcaccgcctgctatgttatttacaacgatggctgggattcatcaatctgtcaatttggcttgtgcattacaagctgtacgcctagttatggaacatgatgatgctattagtgaagaaacaatgcgcgaaggctttgcccgtgccacttgggctggtcgttttgagattaaaaaaacgttggatcgaacatttatatttgatggtgcccacaatgcagccggcgcagaatctttcggtatgacttaccatgaattatttggagatacgccaaaaacaatggtgatggctattttgtcagataaggatgaaatgggtattattcatgaagttgtaaaaccaaaagatacagtcattgcagtggctgcaccaacaccacgtacagaggtgccagagaaattggtagaaaccgttcggcaatgtgtgaaaggggtagtggcacagacagaagattctgtgagcagtgctcttgatttagcattacaatcgacacaagatggagatatcattgttgtgtgtggatcgttatatattcttggcgaagctcgcggttggttacagaaccgtatgagccactaggtaatcgttatggaacactcattatttccaacggaaacaaagttgaagttttatattgaacgactcatttatggtgtggctattgccatgcctctacaaccgatggtaggggatgtgctcttgtggttggccgttgggcttgccattgtcgatttaatacgaagtcgtagtcttagctttcctacgggatggctatcgtggactgttatgtttttcgtcctttggacgggcgtatcagctgccctttccgataatgcgcaatgggctttgacaagttggttttatcagattgtggccggtggcggtatttattatttagtacgtacctatattagtacgccaaaacagtggcgttattttcttcaatgtacattgggaacggcgattctcgtttgttgcataggtgcttatgaatatatttttattcctaatcatcatataaaggaatgggttgatgccatccaatttccaaaattaatgcgacgcatgtcgtcaacattgacgaatcccaatctgttgggcgcttacttgttgatgattctaagcgttagtattagctatttattggtttactggaagggcttatccgataaaatcttatcggaggaatataagaaacaaatctacatgatgattcccatagcattaatactttttgttaccatgctattaacgtattcacgtggcatatggatcagttttggtgccatgattatttactggggaatttttgtagaacgtcgtttattattatccttgttagccatccccattattctatatttttatgatggagaaattgctactcgtctttggtctatattccaaggtcatgatacatcggctgatttacgatgggccttgtgggatagcacgatgtacattgttcgtgaaaatcctgtgtgggggattgggtggaatacattttacttagtatatccagaatataattattatattcaaggtcctaatgtattgatgtatcacgctcataatttataccttaatatgttggctgaaataggcataccaggacttatctcctttataactgtattaataggtcatgtggttacctctatacgtctaaaaggtgatgtgttccgtaaggctgcctccatcggtgtcggtgctttagcagttggtgttcttgtgagcggtttgtccgattttgaattatatagtcaccaagtaacgattacattctggttattgctgggatgggtaggtgcttttgtgaaagttcaacaaaatcagactaaaatcaatcataattaaaacgcatcgaaaaaaatcgaaattgttgtattatgtataataagaattagaataagagtgaattgaagagaatctatatattgtatagaaattcttcgattcactcttttttaactatatatatgaaattataaaaatatatctataattcctgagtgttataacgatgtgaatttaatttatctaaaaaatggaaaatccatgacttttagtcataatggcccataaatatgtgacaaaaaatacattttatgcatataagttgacaatgcgattgtaaaagcatacgatgaagttggtttaaggaacggtttagaccaagagattgatcaactgtcgtttaacaaggtgattttaaggagatggtacgatgatagacatcaaagatcgcgttaaaaatgcgaccctccaaggcaaaattgtcacagcttatgaagcagctcaaatgattaaccacaatgataaagttggtatttccggctttactccatctggttatgcaaaagctgtaccattggctttggctgaacgaatggaaaaagaaccattcaaaattgatttatggacaggtgcttctgtaggtgatgaagctgacggtgcattaacacgtgcacatggtattaaccgtcgtttcccttatcaaacaaatggggatacacgcaaagctttaaatagcggcgacatcaaatacgttgatatgcacttaagtacaatggcgcaaaatgtacgctatggtttctttggtgatttagacgtagctatcgtagaagtttgtcaaatcaatgaagatggctctttagtacctacaacatctgttggtaactctccaacatttgttagccaagctaaaaaagttatcgtagaagtaaacgtatctcaaccattatctttggttggtatgcatgatatctacgaaccacttgatccaccatatcgcaaaccaattccattggaacatgctggtgatcgtattggtactgatgcaattccttgtgacccagacaaaatcattgcagtagttccttgtgatgttcctgatactacaagacctttggcacctatcgatgatgatgcaaaagcaatgagtcaacaccttatcaaattctttgaacaagaaatcggtgaaggtcgtttacctgaaaatttgcttccattgcaatctggcgtaggttctgtagcaaatgcagtaatcagcggattggctcaaggcccattcaaagatttgtccatttatacagaagtaatccaagatggtatgtttgacttaatcgatgcaggtaaagtaactgtatgttccggtactgcattaagtccttctccagatgggttgaaacgtttctataataacatcgatgaatatcgtaaaaagattattcttcggccacaagaaatttctaacaaccctggtattgctcgccgtattggtgtcattgccatgaataccgctatcgaatttgatatttttggcaatgtaaactctactcatattatgggtagcaaaatgatgaacggtattggcggatctggtgactttgcacgtagtgcatatctcactattttctgtactaattccgttgcaaaaggtggcgacatcagttctatcgttccatatgtatctcatgtggatcacccagaacatgacactatgattttctgtacagaacaaggtgttgctgactgccgtggtttgagcccagtggaaagagctcgtttgatcattgaaaaatgtgctcacccagactacaaaccaatgttaactgaatacctcgaaaaagcactcgctgcaactaaaaatgcccatacaccaatgttgctcgacgaagctctttcttggcataaacgcttcacagaaactggaagcatgaaaaaataacctgtttttttaggaggatgatgaaaacatggcttacgaaaaccttaaagcccaaattgctgagtacaataaactttgtgacgaaaagtgtgtaaaaactccagaacgtcaaaacttgaaatacaaccgcgtgtatacaccagttgatattgaaggctttgattatgaacgtgatttgggtatgcctggtgaatatccatatactcgtggcgtacaacctacaatgtaccgtggtcgtttctggactatgcgtatgtatgctggtttcgcgacagctgaagaatctaacaaacgttaccgttaccttatcgaatccggtgcaactggtctttcctgtgcattcgacttacctacacaaatcggttatgactctgatgacgttatggctgaaggcgaagttggtaaagtaggtgtagcgattgactccttggcagatatggaaatcttgttcaacggcatcgaccttggcaaagtatccacttccatgacaatcaacgctccagcatccgttttgttggcaatgtatatcgcagtagctgaaaaacaaggcgtaccttccacagaattgaaaggtacaattcaaaatgatattttgaaagaatacgcagctcgtggtacttacattttccctccaaaaccatctatgcgtttgatcactaatatctttgaatattgctctcaatacgttccaaaatggaatacaatttccatttccggttaccatatccgtgaagcaggttccacagcagcacaagaaatcgcatttacaattgctgatggtatcgcatacgtagaagcagctttgaaagctggtcttgatgttgatacattcgctggtcgtctttccttcttctggaatgctcataacaatgtacttgaagaagttgctaaattccgcgcatcccgtcgtttatgggcaactatcatgaaagaacgttttggtgctaaaaaaccaaaatccatgatgcttcgtgtacatactcaaacagctggttccatgttgactgcacaacaagttgataacaacatcgttcgtgttgctcttcaaactgcagctgctgtaatgggcggtactcaatccttacatacaaactcccgtgacgaagcattggctcttcctacagaagcatctgtacaagtagctcttcgtacacaacaaatcgtggcttacgaatctggtttagcagacgtagttgacccattgggcggttcctactatgtagaagctatgactaacgctatctatgacgaagctatggcttacatcaagaaaattgatgaaatgggcggcgctgtagtagcaatcgaaaaaggctatatccaaaaagaaatccaagaatccgcttacaaatggcaaatggaagttgaatctggcttgcgcacaatcgttggcgtaaacaaattccaagttgaagaagaagctccaaaagacttgcttcgcgtagacgcttccgtaggtgtaaaccaagctaagaaaactcaagcagttcgcgctaaccgcgatcaagcagcagttgacaaagctttagctgatttgaaagctggcgcagctgacgaaaacgttaacttgatgccattaattcttgcagcagttaaaacatatgctactttgggtgaaatttgtaatgtattgcgcgaagtattcggtgaataccaagctcattccacattataatatcggctaatttcggaggtaattatcatggcagaaaaacgtattagagtaatcgtagcaaaaccaggtcttgatggtcatgaccgtggtgcaaaagttgtagcacgcgcacttcgcgatgctggtttcgaagtaatctacacaggtcttcgtcaaactccagaacaaatcgtagaagcagcactttctgaagacgttaatgtagttgcattatcccttctttccggtgctcacaacacattgttccctaaaattgttgaacttttgaaagaaaaaggcatgggcgatgtattagtaatcggcggtggcgttattcctgatgctgatatccctggcttgaaaaaagctggcgtagcagctgtattcacacctggtactccaactggtgatatcgttaacttcatcaaggaaaacgtaaaataattaactgggcaagagaggggctcaactggaatggttggctcccctctattcccatattctaagataggtggtgaggcgaatggatttagttaaaggcctctttgaaggctcaagactagccttagcacggtccatcactgctgtagaaaacgagtatgaaaatgccatcgatattatgaaggcaatttaccctaaaacgggtaatgcacgtattctcggtataactggtgcccctggtgctggtaaaagtactttgacagataaggttgttaaacattatctagatcaaggtaaaaaaatcggcatcgttgccatcgacccaactagcccattctctggtggtgctatcttgggggaccgtattagaatgaatgatttaacattaaatgaaaatgtattcattcgaagcatggggacacgtggtagtcttggtggtttatccaaaaagactgcagacgttgtaaaattaatggatgcctttggcatggacttgattatcattgaaacagtaggtgtaggtcaatccgaagtagatatcgtaaaaaatgcagatactacattggttgttcttgttcctggtctcggtgatgatatccaagctattaaagcgggtattcttgaaatcggcgatgtatttgctatcaataaagctgatcgagatggttgcgatcgtttgaatgttgaaattgaaatgatgcttgacctagattctcgtgaagtaaaatggcgcccaccaattaagcgcacaattgctagtaaagaccaaggcgtagatgaacttatcgaagccttagatgaacattttgagtatcttgaagattccggtgaattggaatctcgtcgggcagaacgtactcgcgatgaaatcatcgcaatgattaatgaacaaattggtcgttatgtagctgataaaatcattacaagcgacgaatttaatagccaagtggcagctgtcaatgaacgcgaaagcgatccatacacagttgttaacggcgtaatgacaaacgtgctaaagtagacggcgactacatagcattagagatttagccttataaaggagataatcgaaatggcttttaaagtattacaagtggatcacatcggtattggtgttaatgatttagcagcaactaaagaattttacaaaaatgctttgggaattcaacatcttcctgaagatgaagtagtagaagaacaaaaagtaaaagtatccttcttcccatgcggcgatgctgaattagaattcttggaaactactactccagacggccctatcggtaaattcatcgaaaaaaatggcggtcgtgatggtatccaacacgttgctttgcgtgtagataatattgaaaatgctattgctgatcttatggcgaaaggtattcgtatgattgacgaaaaacctcgttatggtgctggcggttcctctattgcattcgttcatcctaaagctacaggtggcgtattacttgaactttgccaacgaatgaaataaaatattattgtaacaagtttttatggaggtgctgacatgcaaacagtgcaagaaaaaattgagttgttgcacgaaaaactagcaaaagttaaagctggtggcggtgaaaaacgcgttgagaaacaacattctcaaggtaaaatgactgctcgtgaacgtttggctaaattattcgatgacaactcttttgttgaacttgatcaattcgttaaacatcgttgtgttaacttcggtcaagacaaaaaagaattaccaggcgaaggtgtagtaactggttatggtactatcgatggtcgtttggtatatgcattcgcacaagacttcactgtagaaggtggttctcttggtgaaatgcacgctgctaaaatcgttaaagtacaacgtttagcaatgaaaatgggtgctcctatcgttggtatcaatgattccggcggggctcgtattcaagaagctgtagatgctcttgctggttacggtaaaattttctttgaaaatacaaatgcatctggcgttattccacaaatttccgtaatcatgggaccatgtgcaggcggtgctgtatattctccagcattgactgacttcatctacatggttaaaaacacatctcaaatgttcatcactggtcctgcagttattaaatctgtaactggtgaagaagtaacagctgaagatcttggtggtgcaatggctcacaactctgtgtctggtgttgctcactttgcagctgaaaatgaagatgattgcatcgctcaaatccgctacttgttaggtttcttaccttctaacaacatggaagatgctccattggtagatacaggtgatgacccaactcgtgaagatgaaggcttaaacagcttgttacctgataacagcaacatgccttacgacatgaaagatgttatcgcagctactgtagataatggcgaatactatgaagtacaaccattctatgctacaaacatcattacatgcttcgcacgttttgatggacaatctgttggtatcattgctaaccaacctaaagtaatggctggttgcttggacatcaacgcatctgacaaatcttcccgttttatccgtttctgtgatgctttcaatattccaatcgttaacttcgttgacgttcctggtttcttgcctggcacaaatcaagaatggggcggtatcattcgtcatggtgctaaaatgttgtatgcttactctgaagcaacagtaccaaaaattactgttatcactcgtaaagcatatggtggttcttacctcgctatgtgttcccaagatttgggcgctgatcaagtatacgcttggcctacatccgaaatcgctgtaatgggtcctgctggtgcagctaacattatcttcaaaaaagatgaagataaagacgctaaaacagctaagtacgtagaagaattcgcaactccttacaaagctgcagaacgtggcttcgtagatgttgtaatcgaaccaaaacaaactcgtccagctgttatcaacgcgttggctatgcttgcaagtaaacgtgaaaaccgtgctccaaagaaacatggtaatattccattataattcgattcggtaatcatatcatcgaatttgggagatacctttctttatttattttttagaaaggggaatgattatggaaggacaagcagttactaccaatccctggttaatcatggccattaatatgacagttgtatttgttgtgttgattcttttaggcgttttgatgacaatcgttcatttaattgaccctacgaaaaagaaaaaagaagcaccggtaagtgctcctgttgcagctcctgcagctactccagtggctacaccaagtgcatctgctcaaaatgaggatgaagtagtagcagctatcgtgggtgccattgtggcgatggggtactcatctgaacaaattgcatctattcgacctacagcaactagtgctaaatggcgcttggaaggtcgtttaagcggtagaaattaatatttttttaggaggcatttgtcatgagcaatgctacaaaagctaacggtaaggcaccatctcaagatgttgttgcagttatcgttggcgcattagcggcaatgggttattccgctgatcaaatcgcgcatatccgtccaattgtaagctacaattggaaaatggaaggtcgcttacgcggtaatcgataagattaacgtttttaggtaatcgataggattatcagaactatatgtgtaaatgaaatttaagtattgtgtagatatacacattttggaggaatttaagatgaaaaaattcaacgttacagtaaatggcacagcatatgatgtagaagttaatgaagtaaaagctgcagctcctgcagcagctcctaaagcagctccagcagcagctcctaaagcagctcctgcaccagcaccagctccagctgcagcagcagctccagttccagcaggtgctgaaactgtaaaagctccaatgcctggtaaaatcctatctgtagcagtatccgctggtcaagcagttaaaaaaggcgaaactttgttgattcttgaagctatgaaaatgcaaaacgaaatcgcagctcctcatgatgctgtagttgcagaagttcgcgtagctgctaaccaaactgtatccactggcgatgatatggttgttcttggctaataccaagtgttgtcttatggcgcggctgcgccgcgtcatataacaatttaatatttgtgaaaggggaacgcatatggaggcttttgctgttgcgattcaatccgttataaatgatagcgggttcctcgcatttacaacatacaatgctattatgattcttgtaggtttgatcctattgtatttagcatttgctagagagtttgaaccattattgttgggtccgattgcgtttggttgtgtacttgctaatatccctcgtaacggctttgaagaaggcgttatggcgcttattagtgctggtatctctcaagaaatcttcccacctctaattttccttggtgtaggtgcaatgactgactttggtccgcttattgctaaccctaaaacattgttgttaggtgctgctgcacaaatcggcgtattcgttgcgttaggtggcgctatgatgctcggctttacagctcaagaagctgcagctattggcatcatcggtggtgcagacggtcctacatctatctacttagctactaaattagctcctcatttattaggtgctatcgcggttgccgcatattcttatatgtccttggtaccgttgattcaaccacctgtaatgaaattattcactacgcaaaaagaacgtgaaattgtaatggaacaattgcgtgaagttacacgttttgaaaaaatcgtattcccaatcgttgcaacaatcttcatttctttattgcttccttccattacatcccttttaggtatgttgatgttaggtaacttgttccgtgaatctggtgtaactgaacgtttgtccgatacatctcaaaatgcgttgatcaatactgttactatcttcttagcaactggtactggtttaacaatgagtgcggaacacttcttaagtttgcaaactctccttatcatctgcttaggtttggttgcattcatcggtggtacagctggtggcgtattatttggtaaattaatgagcttagtcgatggtggtaaaacaaatccacttattggttctgctggtgtatctgcagttcctatggcagctcgtgtatcccaagtagtaggtgctaaagctaacccagcaaacttcttgctcatgcatgccatgggtcctaacgtagctggcgttattggtacagcagtagcagcaggtacaatgcttgctatgttgtctagccactaatagtttaataattattcaccaaggtgtgcctatataggtacacctattggtgaataaaaaatcccttatatcgtatgtaaacatacagaaaaggggtatattagcaataaatgctttgtcagatcggtcattatgtgatgagcaagaatttcactaaataaccttctagtgctttcaaaatagtagaggtggtcatcttgttatcaattgaattaaaaatactgatttgtttcgtatgggcatttattgtttttttagttactgcactgattattggtgttgaacgtaaatcactttggttccaaagaagaactaaatattcttggtttaatcgccgaggatttctaggagaagcattactttttggatatcccaaaacgagagaagggtatggggttactttcttgatggcttgtgctatcagcatcgtaggctatattctatacctcatataactacaatcagtgcatttctctgaagggagatgatgatgtatgggtgctgcagaacaaaccttaatcgtccttgcagtcatggctgttttattcgttacggaaattattcctttagctattacttctttaggcggtgccattacactaggccttatggggattattactcctaaggttgtattctctggtttatctgatagtacagttgtgttgtttgcaggcatgttcgttgtaggtgctgcgttgttctacacaggtttagcccaaaagattggtgaaaccgtagtttctcatgcaggcactagtgaaaacggtttaatgcttgctatcatgcttgttacagctactatgtccgcattcttatctaacactggtacaacagctgctttattacctgtagttgttggtatctgtgctgttgctaagattcctgcatctcgccaattgatgccattagcatttgctgctggtatcggtggtatcattacaatggttggtacaccaccaaatatcattgtaagtggtacattatctaaatttggtattgaaccatttggtttcttcgaatttgcatggattggtattcctttgactatcgctactatcgttttcatgatgcttattggtaaacatttgttacctaaacatgaaattgcagatgctggtgaagttgaacaagaagtggcagcagaagatatttccaatgatccaaagaaacaattattctctggtattattcttttaggcgtaatcatcgctatgattttaggtcaaccattaaaagataactttggtattaacttaccattgagcatggttgctgttattggcgcaatgctttgtgtattaacaggttgtttaaacgaaaaacaagcgtatacgtctatcgactgggtaacaattttcttatttgcaggtatgatgccagttgccactgcactagatcaatctggtgcaggtaaaatgattgctaatgcagtaattggtgttatgggggataacccaagtccttactttgcaacaggcgtattattcgcattgtcttgtattatgactcaatttatgtctaatactgcatcttgtgcattgttggctcctatcggtatctctattgctcaaggtatgggcgctgaccctcatgctgtattgatggctatcggcgttgctgcatcttgtgcatttggtacacctgtaggtacacctccaaatacattagtacttggccctggtcaatacaaatttactgattatgtaaaagccggcgttccattgattttagtttgcttcgtagtaagcttaattattatcccaatggtatggccattcttccctggtaaataatagggaataggttactctactatacaagcacacacgaggtcgaatcgtaagattcggcctcgttttttatgattttagcctatatgattttaatatagattacatataagtgtaatcaaaagcaatatgaattaaactaatttgcatgattatttttacacaattgactacatcgaaaaaaatatgatatagtatattgtgtaagatataataatgtaatgttgaataaggaggtcatctatgacaaaagaaagatttaacatgttagttggttctattggtgcatttattggtgtatttgtatttttagcctatatcccacaaataattgctaatcttcatggtcaacctagtcaaccatggcaaccattatttgcagcagtatcctgtttgatctgggtattatatggttggacaaaatcacctaaacgtgattatattttaatcgtaccaaaccttgcaggcgttattttaggtacactaacattcttaacatctttctaagtgctataagaaaaaaatagtattattgttatatagtgaataatagtaaagatattactttactttataaatataaatgaggtcgaatcgtatgattcggccttttttagagtgaagtttatatgttagattaaaatatagataagcgttaaatctgttgtaataaaaaaatagtttttatgataataaatattgataattgaattcctagtataatagtacgtattttgataaaaatgataatttgtgcattctcaattattgaaagatatatttaaatatttaaatgaaaagaaatatcaaaattatgataaacatagactttatatgataaaaaggaacaattattatgcaaaataatatacaaaactttatcattttcgtttgactttcaattattattgtgtgataatgagaacagaagttaaggcaagtgcctttttaaatgataataataagttttcttttataatgttcctatggaggtttatcatgagagttattgctgatggttgcattaaatgtggttcttgcgcatctgtttgcccagttgctgctatttctgaaggcgaaactaaatacgaaatcaacgatacttgcatcgactgcggttcttgcgaatccgtttgcccagtatctgtaatttccgctgagtaatcacaaataaaatacgcccctcattgaggggctttttattttgcctaaaatcatgtaacttagtataataggactattaagatatatattattaaaagggagtatcacttgttttatttaattgcaatcatttggcttgtattggatcaagcttctaaatattatgtgatgaaccattttgctcttggtgaatcactaccggttattcacaatgtattccatcttacgtatattattaatcgcggtgcagcctttggcatgttgacaaatcagcggtggttctttttagccgttgcttttgtattaattattgtatatggcttctatcgtaaacgtgttaataatggtccactttcattacgagtaggaactgcattgttgattgcgggagccataggtaatggcatagatcgatatgtactacatggggtagtagacttttttgattttagaatttggcctatttttaatattgcagatattggtatatgtgtaggcgttgtatgtgtcatatattatttactaacatctgaacatgaggagaaatagatgaacgaatataaagtatctttggaacaagagggaaaacgtcttgatgtatttctgacggatgtgatggaaggatctcgtagttatatccagagccttatcaaatctggtcatgttttggtaaacggcaaggttggtaaggctaacttacgacttaatgcagatagcactatttctgtagatattccagaaccagaatcggtagaaattttaccagaggatattcctgttgaatatctttatgaagatcatgatattattatcgtcaacaagcctcgtggcatggttgtacatccagcaattggtaattactcaggaacgctagtgaatgctttgctttaccattgtaaggacttatctggtattaatggtgaaattcgccctggcatcgtacatcgtttagataaggatacatctggtgtcatgatggctgctaaaaatgatgcagctcatattggtttagctgaacaggtgaaagcacacagtgctaaacgaacatatttagctctcgttcaaggcaatatcgtggaggaaaaggggattattaaggctcctatcggtagacatcctaaagaccgcatgaaaatggctgtagtgtttgaaaacagcaaggaagcagtgactcattttaaagtgttagaacgttatggatatcatacattagtggaatgtgtgttagagacggggcgtactcatcaaattcgcgttcactttgctcatattggacatccagttgttaacgatcctttttatggatatcgccgcatggacttccctatagatggacaagcacttcattctcatacattggatgtggtgcatccaattacaggtgaacctatgcattttgaagcacctgtaccggaggactttcaaaattgtatcgccttcgctaaggaatatagagaacgtagataagggataagactatggaaacaaaacgtattttaatggatggagacgccattagacgtgccattagacgtattagtcatgaaatattagaacgtaataaggggctttcaaatgcagttattgttggtattgaacgacgtggcgttatgctagctaaacgactgcaaagtgaaattgaagctattgaaggccttcatattgagtgtgaacctttaaatgtagctatgtatcgcgatgatcgggatacgcgacctaaggaaggggaaccttgctctattgatactacagaaaaaaccattatcttagtagatgatgttttgtataccggtcgtactattcgtgctgctttaaatgcattgatgacatctggtcgtcctaaatctattcaactagcagtattggtagatcgaggccatcgagaattgcctatacgcgctgattatgtggggaaaaatatccctacgtctcatttggaaaaggtacgcgtacaggttcaagaattagatggctctgatggcgtaactatcgaacaataataggtagatataacaaatcgacatatgaaaagactcgacgtatatggtcgagtctttttggtaggggaataatatgataaggctatattgtcataaactatatttcaatatattgtggggaatagcgaaaatcttcatgacctgtgcgcgccataggggatttaaaactataagcctgtaaatcagtagccttcgtatcgatttccatcattcggcgaccaaaatcggaaactatggttgatgctttagcccatttttgaataagtggaatgctcgatgtattgtgctttaaccacgtgcgaccgcgctgattaaatgctaataatcgcgcgtattgaggacctagtatatgagcttcttgtaatattggcttagtgatttgtagcgcagtataggctgccatgcgacgtagtcttgcataggtatagcgttttgtctttatctcttccagtgcgtgcgtccagcttacttgctgcatagccttgtgccaacgatgttcaatgccttccgtaaaatctccatatgtttctaattctgcagctgaaagtaagcgattgaggccatgcagaatatcattgtatctttcgtagtccacatagacatcatgtactatgaccttgtgcatatcatctatgatagcatgtggtacataggcatcgatggttgtgccttctacgagtgccttacgtaatgcggtcccagaaggaaaatcttggccttgagagagggtaggactatgatgtgatgattgtctagtaatgggaataaccataagattagtaaaatatcgctgggctgcgcgaatatattcaaggcctagtaatgagtttggcgcattgttaatgagttctccatttggtacatacttagcaatcacttggcgtaatgctgtaccataagaaataccggtttttatatggtgttgaatggcatcttgtccctgtggcgtatttagaaattcagcggctgagtgcaatatggcattattgtcaagctcagagccaaaggaaatgctatgaatgtgtagcgctttcataaggcgcaccgcaccggtacaaaatagttctgcactgcctagagaatagaccgtaggtaattcgataacgacgtcggcaccaccatgaatagcccatcgagcacggtcgaatttgctaaaatacgcaggctcgccccgctgtacaaaggaaccgctcataatggcgatacgcaatgcatcaggataggtagtacgtaatgtatgtaattgatgcgcatggccgttgtgaaacggattgtattcacaaataataccgattgatttcatcgtagttcctttcataggtttattttctattattatataataaattaaagaatttatataatgggtggcatgtgtaatgtatggaatttttgaccttcttgttaggaattatagaatttcttgtgaaagtactagaatgggaggcggtgtaatggtataattatctgtgaattctgatttgacgtgaggtgatttgatgaaagtacagtggaaacgagcgttacagaccatcgtgttaggtacatccttattggctttagctggatgtggttccgataatgtgatggatatatatagctttggtaatcaagtcattcgttccggtcaatcggaagtgactgtagccttgccatatgaaatggggaaaacatcagaaacgatgagtgttgatggataccctatggacgcgtatgggactctaagccaacatatattgatttctgtagaggcccgtcaaccggcaccgaataaagcgttgccaacggttgcacagtttgtggatcaaaagaaatctgaatatgcaaaattgggtgctactgttaatgtggaatctatcgatttaaatggggtgcaagcacagctcattactggtgatttttacgttaacaaaattaaaactagtttctctcaatatgtctttatggataagggcgtattgtggaatataacctatagatatcctacggatgatcaaataggcgctgatatcagcaaacaaattaaagataagatttacgttacgcaaaagaaagagggttaatcaatgaacgtattagtagttaactgcggtagttcttccttgaaatatcaattacttgatatgacaaacgaaactgaattggcgaaaggtttatttgagaagatcggtgatcaagacgctatcttcactcataaacgtccaaacgcagacaaattagaacgcgttgaaccaattttgaatcacaaagaagcattacgcatcttgctcgacatcttggtagatccagagttcggtgttattgaatctatggatgaaatcgatgcagttggtcaccgtgtagtacatggtggtgaaaaattcgctgattccgtattgattacacctgctgttatgcaagcattggaagaatgtgcggctcttgctccattgcataacccaccaaacattcaaggtatcgaagcttgccaagctatcatgccaaacgtaccacaagttgctgtattcgatactgcattccatcaaacaatgcctaaagaagcttacatgtatgcgcttccttactcctactatgaagactatggcattcgtcgctatggtttccatggtacatcccataaatatgtagcacaacgttgcgcagaattgatgggtaaacatatgtctgatcttcgcatcattacatgtcacttgggtaacggttcctctgtatccgctatcaaaggtggtcgttccatcgatactacaatgggcttcactccattgtctggcttgatcatgggtactcgtactggtgatatcgaccctgctatcgttccattcttgatggataaaacaggcatgtcctatgaagaagtcgacaaagtaatgaacaaagagtctggcgtattgggtatttccggtgtgtccaatgacttccgcgtaatcgaagaagcggctgctaatggccacaaacgagctaaattggctcttaacatgttccattacaaagttcgtcgtgtaatcggtgctttcgctgctgttatgggcggtgttgatgctatcatcttcacagctggtatcggtgaaaacggtatcggtaaccgcgatgcaatctgcaatggtttagaataccttggcacacgtatcgaccctgaacgcaacaatgttcgtggtaaagaacaagaaatcagtgctgaaggttccaaagttaaaatcttcgtaattcctacaaacgaagaaatcatgatcgctcgcgatactcaacgtattacaagcgctttgaaaaaataatataacctattaatagttgtttaaactattacatacaaacctcgcttatatcttagatataggcggggtttttgtagtttttcagagctgaatcctatataataaatagtatgcagagtcttttgaaaggggttacgtatgaatattttatatagtgaacaatctcagcgcacccgtagtgcagaattattagtagtggtatttgttattttgttggtgggggctatggtttttaccacctatagaagtattgcgcagggccatatattactttcagaatatttcatagaaatcatggcgctcattgtcattgttaaacaagctgtgagccgctatacatatatattgacggattctgaatttatcatcaaagaaaaatccttttttagaaaacgtacattttctgtaaaatatgatgatattgatggcatttatgcgtataatcgcgattttctaacgaatttacgttatcgctataaatatagaaagtgttctacctccgatgatagaccgatttggttcatggtatattccattactaaagggaaaaaggttcaatatggccgtgttatgttgaaagcagaggatgcattctatgaaacactagaacagtttgtacctaatcgtgtgcgcgtgccagaagcggatgttattttctatgccacggtacgtgctgatgcagtaaaacaaggcatcgatgttaaggaatattatgatagtctaattaaaagtgcggaagaacaggaacaagaatgagtggattatatttagcaagtcaatcaccaagacgaacggaattattgcatcaagtgggtatagaccatactgttgttactagttcttatgtagaagataatgtagtgattacagatcctattgaaatggtgaaagcacaagctcttggtaaagcgcgctgcgcaaatgatgtgcctgatggtagcatcgtactaggtgctgatacaattgttgtatttgatggaaaggtgctagggaaaccgcatagtaaggatgaggcacgtacaatgcttcgtacattatctggtcaagttcactctgttattaccggtgtagccttactcattaagggacgcgaaatcgtctttcacaatgaaacaaaggtatattttaaaacgctgcaggattttgaaatcgagtcatatatcgactccatggaaccgatggataaggctggagcctatggcatccaaggaaagggcgctttgtgggttgataagattgaagggtcctatacaaatgttgtagggttgcctgtagaacatgtatacgaagaattatgtaaagcattaggtgtaaagtcttagattaatattgatggtcatgttaacacatcaaatagatattctaatgttatggtagaaatatgaggctgatttgtttatgtattgtaagaatggagaaattcaatgcaagtcaaaactatcagcgtaaaagatatgttgccatttcaacggccacgtgaaaaattcgttgccctaggggctaaacaaatggcgatggaagaattattggctatattattacgtaccggtttaaaaggtcaatcatcaattgatttagcacatacgattatcgattctttcacagatggcatttatgggctaaaccatatgaccgtagatgatttagtaaaaattaagggcgttggtatcgataaagcggttactatttgtgctgctgtagagttagggcggcgtttgggtgagttaaaaatcacctctacatacgaagatttttctcagccttatgttatcgctcaatatgtaatggaacgcttgcgccatgaaacagaagaacatgtattagcggctatgttgacgtctcggaataaattaattcacattgagaccatatctaatggaggcctcacatcgagtcttgtagaacaacgggctgtttttagaaaagccattgcttgtaatgcggccgctattattttgattcacaatcatccatccggcgatagtagaccaagtgatgatgacatacgtgttaccaagttatttgttagtgctggacaatttatgggcattccagtcttagaccatatcgtcattggtgatggcgagtttacaagcttgagtgaaattggtaaattaagctagttgtggtaaaatggaatgatgatgtaatgaaggagattagcattatgaattccattttaccgtcttttggaaaagacgtgagtatcgatattggtacgtctatgacacgtgtcatggggggcacgcgcgagaccatgatgagtgagccctccattgtggctactgatacaaaattagataaaattgttgctgtcggtgatgatgcagatcgcattgtacgacgcatgcctgatatgtggatggagttgacaccattacaagatggttttatcgtcgattaccgcgtaatgcatacgatgttaaaatattttcttcacaaggtatccaatacgttgcgtagatctcgtgtactcgttggcgttccttgtggcatgactgatgtagaacaacgggccatgatggatgccgtaatccaagcaggcgcgcgggaagtctttctgattgaacgccctgtggctgccgctataggttccggtttaccaatttttgaggctcgtgggtctatggttattgatattggtgaaggtactgccgacatggggattatctcattaggtggcacggttattagtaagacgatacggtttggcggcggcgatttagatcgcgccatcatgcaatatattaatcagtgttttggtttaatggtatccgagcaaactataacggatattaaacatgctataggtactgcggttgtacctgcggaggattgtgagttttcctttactggtcgcgatatgacaagtggtattgttagacgtgctgtacttcatcaatctgaaatctacgaagtgattaataaacgccttgcagactttttagatgcaatccaacaaatgatacgcgttacagcccctgagttagtggctgatatcatgcagcatgggattgtgttaacaggtggtatggctcgtttgcaaggtctagcagagcgaattagcaccgaaatgggcgtgcctgttcaggttgcttctgatccagaattaaaggttgtacaaggtttgcatcgtagttcgggtcaaattgtagaattagctcgttttattattaattcaaaggatagaaggggacgtgtatgatacagtcagatcgtaaattattaatctttgttgtcctcggctgtattatcatggcccttcttggttttgcctggaaacagcgaactagtatcccctttgtaaccgtaccatttgaaaaaattgttaccccattcacatatggttcagctcgtgtgctttcaacaattcaaaccggcatacgtatcattgataatgctatatcgggttttgttgaaagtaatgataaggataataccattgcagatttacaacaaaaggtgttaaatcacgatgaagttgtggccgaaaatattcgccttcgtcagatgcttaactataaatcgtcccatccagagtttacgatgaccttggcgggcattattactaaagatttcggtacatggtcaaatacatttaccattgatcgtggtgagaatgatggtatacaacctaatatggccgttgtcgtaccaagtggcgttgtgggctttgttaccgatgtatatcctaattcagcacgtgttcaaactattttggaccctcgcagcgcaattggtgttattgtacagcgtcctgaatcacgcttggccggtgtggtaaaaggggatggtaatcatcctaatgagccaatgatggtcaatattgcacgtgatggagatgtccttgtaggcgataaattaattacctctggttatggtggaatttatccaaagggcttgttagtgggtaatgtattaaccattacaaatgatacagaaggtttcgtgaaaaacgcggctatccaaccgagcgttgattttaatcgcttagaagaggtgtttattattactgcctctacagtgcaaacaccagataaagcaaaattagaacctaaattagttcctcaaacgcagcgtgaccaagtgcaaggggctaaaggagcggtaaatcaatgaggtatattgcattaattctcgtgtgttgtgctttgtattttatacaagctcaattattaccggccatatttcatacgaattggctgccaaattctatactgacggccgttgttctagtcacgatttttaaaggtcgaaaaatggggcttatcgctgccgtagtaggtggatccattcatgatattttgatatctaacttttttggattacatctctttccgtacattgtcgtagtatatctattgtctcttgtaaaaagtagtgtatacgaagagcgttggtactggtcatgcggcattatcggtgtttgtacaattctagatggaattatgcgctgcatcatgatcggtgccagtggtggtgatatccaattcatttcttacatgggacacatggttatgccaactgtattttggaatgccatattaggtggtataggacataaaatgatgggccttatggaagaaaaagaggattatatttggtagaattgctgatttagtaaagcatataaggggaatcataggtgcttgaaagtttatataaaaggaaaaaaacgagccgttttgatgtgcttttctatattgtaatgggtatcttcgttattctagggctccgtctatttgctatgcaaatattagagggtggttattatcaagctaaagcagagggtaaccgcctgcgcattgtacctatgacggctgctcgtggggttatgtatgatagaaatggtcagattttagtcggttctagaccggcctataccatttctattatgcctaatggaaaacctttagatgatgatgaattggctaagctagctacattgttacataaaaagccagaagaaattcaaaaaaaggtagatgaccacaaacatggttatgaaccgatacgtatagctaacgatatctccatggacgtggtgactagtatcgaagaacatcgtcatgaattgcctggtgtttctatcgatgtagaacctttaagatattatccatatgaaactatggcatctcagctatttgggtatgttggtgaagtaagtgaagatgaactagcagaaattaaggaacaagatcctaatacaacggttggtgctggatctatcctaggccgtgctggtttagaaaaattatatgattcagtgcttcgtggcgttgacggtggcaagcaattagaggttgatgcgtctggccgacctgtagcagaggtcgatcgcaagcatactgtaccgggttcaaatattcatcttactattgatgtgaatattcaaaaagcggcagaagaggctgttaaaaaggaattggatcagttgcgtagttcaggtgcaacgggtgcagccgtggttgcattagaccctaatactggcgcggttcttgccatggtaagtgcgccagaatttaatcctaattggtttgccaagggcattacatcgactcaatggaatcaattgaacaatgacaagagtcatccttttgaaaataaggtcattgctggtgaatatccaccaggatcaccttttaaaattgtaactggtacagctgcattagacttgaaaaaggtaacacctgatgaaatgattttcgatagtgggaaacactggctcattgataagagaaatgcagaaggcgaagcattgggttggttgaattttaatcgtgctttggctaagtctgataacgtgtatttctatgaaatgggtaatcgcctaggtattgaaaatatcgatacctatgcccgctactttggattaggtgaaaaaacgggtatcaatctggtcggtgaagcagctggtaatgtggcgagtccagagtataaacggaaagtatttgatcaagattggtatttaggcgaaacctttgatgcggctatcgggcaatcattccatttggtaacgccattacagatggctgtacttctcagtcaagtggcgaatggaggtactcgttaccaaccatatgtggtgagtcgtgttgataatcccgatgggacaccagctgaaatttttggacctaagaacctaggcgtacttccagtacctaaaaatattatggaccttattcgagaaggtcttcgcgatgtaactagcgaaggtggtacggctggtgaattgtttaaaggcttccctgttgctgtagcaggtaaaacagggactgcggaaaacgcacatggccgagatcatggctggtttgttgcgtatgcaccatatgataagcctcaaattgtcgtcgttgctctcgttgagcaaggtggttttggtgcaggctctgcaggaccgattgtacgggatattttgagtgcctattttaaggtgcctactagtagttcaaaaacgactgacacaaaaacaactgatacaaaaacaacaaccaataaaaaagaaacacaggaaattaagccaagtgtaaaggaataggaaggatatacaatgggggatataatcggtcttatctcaggtaaaggtggcgtaggtaaaacgacgataacagcctgcttaggggctgcgcttagcgaacaaggatatcgagttcttctttgtgatggcgattttggtttgcgcgacttggatattatcttgggaaaagaagatgaggtatgttttgatgcatataatgcattagaagataaatccatggctgatgatgtagtcatgaaagttcaggataatctatactttttgccagctagtcaaagtgtgcgctgggaagatatgggacgcaaaaaatatcgaaaacttgtaagccacttagctaagtcttatgattatgtacttgtagattgccctgcaggtatcggtcgtgggttggaatctattgtagagctagcacagcggtttctaattgttactcaacctttgtgggtatccatacgaaatgcagcacgtaccattcaattctgtcgtgaatatggccatcgtgattatgccgttgtatttaatgcagtccgtacggatcgggatatgccgaatatgtatgatatgctcgatgcactcggtgctgaatatgtgggctctatcttaccttatgacacacaaatactagataatacacaggatggtgtactcattcaagatatgccaaaagcatatcgccatatgctagctcctgtagtagagtacatagcctctggagatgcttgggatgaacaagaccttattgagcgcttcaacgaagtgacgactgtaaaagttactgaaccttctgtgacggccacattagctcagcctgttgagtccgatgatgataattctactaatcctgtaatatatacaaattcttggtctacgcgaaatcgacttctttctggtaaagaaagtatgtggcgtcgggttcgtataaagtaggtgccatatgttacaaagaatttggcgtgattgtgattggacaatcatcatatgtacactattacttgttgccatgggggtagttgccatcggtagtgccacccatattaatcaaacaggacttcatttttccacattagtagcaaagcaactgatcttttttcttattaatgtggcccttgtgattggtattcaatttatggattatcataaattaaaagattgggctaatggcatatatatagtaacgatcatgttgttgttagccgtaatctttgtaggtacatctgccttaggtgcacagcgttggattcagttagggcctattacgctgcagccatcagagttttctaaattactgatgattatctgtatggcaaagatgttagagtctcgttacaataaattagatacctttaaatctcttgttgtgcctatcttatatgtaggcatacctattttgctagtattcatgcaaccagacttgggaacgtccctcgtttatatagcgatttttgtgggcatgctctttgtttctggcatacgattgcgcttagttcgtattatcgctacggtaggcgttttactaatgccgttggcttggtttgtgttgaaagactatcaaaagcagcggattctcgtatttatgaatcctgatatcgacccatttggttctggatatcatatcattcagtctaagattgctattggttcaggtactatatttggtaaaggattatttaatggtacacaaagtcagctaaactttttgcctgaaaatcacacagattttattttttctgttataggtgaagaactaggctttataggctgtatctttgtattaattcttttatttatgcttatttatcgaagcataaaggtagcatattcatgtaatgaccgcttcggtatgttacttgctacagggattggatccatgttatgcttcgaggtattggtcaatgctggcatgaccatggggattatgccggttacaggcataccattgccattcatcagttatggtgttagtgcgttgactacaaacatgataagtgttggtattttattaaatatatcaatgcagcgtaaaaaatatattttttagttatcattctaatttaggaatgagtttgaaagaagtctttcacaaaagacggaggatgtatgattcaattagatacgtcatggttacaacatgtccaaaaaccagctcgttatacgggcggtgaatataacagtatagtgaaagatcacagtactgttgatataactatggcgctgggatttcccgatgtgtatgaagtggctatgagccatttgggtatcaagattctatatggcttagttaatcgccgtgaagatgcagtagcagagcgtgtatttgcaccctggcacgatatggaagaggaaatgcgaaaacgcaatattcccttattctctttagaaacacgtacgcctataaaggactttgatgtacttgcgttcacactacaatatgagatgagttttaccaatattctaaatatgcttgatttagcaggtataccgatgtatgcaaaggatcgggatatggatttcccattgctcgtatgtggtggaccttgtgcgtataatgtggaaccaattgcggatttctttgacattgtgtccctcggtgaatctgaagaatggggcgatgagtttatcgacctattgaaagcagaaaaagcgaagggattccctggtggtaaagaagctttcttgcgaaaagcagcacaaatccccggtacctattgcccagcattatatgatgtagagtatacggaacaaggcgattttaaatcgattacaccacgctttgaagacgtacctgctacgattcaaaaacgcatcatagaagatgtagaacatgtatttttccctacaaaaccggtggtaccgtttttggatatcgttcatgatcgggctgttcttgaattattccgtggctgtacgcgaggttgtcgattctgtcaggcaggtatgctctatcgtcctgttcgtgaacgaacaccagaacggttgttagaaattgctaaagaaacgattgctaatacaggttacaatgaaatctctttgatgagtttaagctctgctgactactccaagttaccagaattggtagatatgctcatggaagagtttaaagataaacaggttagcgtcagcttaccatcattgcgtatcgatagtttctctattgatatcgctaagaaggtacaacaagtgcgtaagagtggccttacctttgcaccagaagcaggttctcaacgcatgcgcgatgttatcaataaaggtgttagtgaagaagatttgctagccgcttgtacaaatgcttttaagtctggatggaatacggtaaaactatacttcatgatgggattgcctactgagactgatgaagatttagcaggtattgctaatttggcgtacaaggtgcttgatttgcatcgcgatattacgggtaagcgcaatggtagcgtaaccgttagtgtatcgtttttcgtaccaaaaacacattctccatatcaatggtatggtcaacaagatgtagaagaaatccatcgtaagcaaaaatatttaaaatcgcttattaataatcgcaatatttcctatcattatcatgatggatataccggttatatggaggctgtatttgcccgtggcgatcgtagattatccaaggtattagtagaagcatggaaactcggttgtaaatttgatggctggactgagttctttagctatgaaacatggttacaggcttttgaaaactgcggtgttgatcctgcgtattatgcgcgtcgcacccgtgattttgatgagccattgccatgggatcatttggattgtactgtaagcaaggccttcttaaaacgcgaatgggaacaggccgttgctgagaaattaacgccagattgtcgtcgtggaccatgtaagggttgtaatgtatgccctgaattagatacggctattgtagattataaggagggtggcagagttgaaaaaattacgtttggccttacataaaggcgaagaattacgattcttgtcgcatctcgattttgcacaagccgtggagcgcatgattcgccgtgcagagattaagatggcctattctgagggctttaatccgcacatgaaaattagtttttcttctgcactagcactaggtgtaacggcagaagcagaatatattgatatggatgtgttggaagatgatagcttagagtctattatggcgcgattaaatgcagtggctcctcgtggacttgaggttctcggtggcaagatcatgcctgataaggttaagaaaatgatggccatctgcaattacgcaatctacgaagtaacaggtcctgtaacggaacagaatgttgactgggatagcttacttaagccttttaatgaggctactgaaatttcctatgaaaaggttacccctaaaaagacgcgtattatcgatgtaaaagaattcgtaaaagaaccgattgtagcgtccgtgcacgatggtatggtgacactaacgatggggattggtatttatccacaaggtactataaaaccgagtgaagtatggaatcttggcaaggatcaatataattggcctattacttctggttacgaaattcaccgtaaagcgattatggtagaaaatgaagaaggtcgttttacaccaatagaaattaattattaaggctatgggtttgatttggcatatactacagttaaactgaacagaagggagggataggatgcataaaattttggtcaatgttatgcgcgaggaaattcgcatggctgtcatcgatgaaaaggaacagctaattgattttgttttggaacgtaccgatgagtctcacatggcgaatcatatgtacaagggtactgttaaaaatgttctgaatggaatgcaagctgctttcgttgatattggaggctctcaaaatgcttacttgaaccttcaacaaggtaaggaacagaaaatattgccacgcctatctgtgggacaacaaattctcgttcaagtggtgaaagaagaaatgcttggcaagggggcacgcgttacagcagatgtaagtttagcgggacgatttatggtgctattgccctattctgaaggcatgcatatttcaaaaaagattaccgatgaatctattcgtgctcaattacaagagttggcagcgccttatgtaaaagaaagttgtggattcattatccgtacggctgcagctaaggccagtgccgatgaaatcgctcgcgatatggactacttatggcgcacatggcaacatgtgttaaagcgatttaaggttgccaaaagtggtacagatctatacagtgatgcggatttttggtttcgccttgtgcgtgattacgcgcatcgcaatgtagaggaaattatcgtcgattctgatatgggcgaatctcgactgttggatcttttaggacacggacctacctctcaacaaatcaaagtaacacgccaccgagatagtactcctatctttaaagcgaaccacattgaacctcaattagaagatcttatctcccgcgatattaatcttccttctggtggatctattcgcattgatcatacggaggcccttaccgtatttgatgtaaactcggctcactatacagggaaatcgaataagctagaagacttagctttcacagttaataaagaggcggccaaagaaatttgtcgccaattgcgcttgcgtgatatcggcggtatcattgtcgtcgattttattgatatgaaggataaagagcatcaacaagagttattaaaattattgagtgctcaggctaaactagataagatgaaaaccgttgtctgtggtattagttcgctcggtttagtggagatgacgcgaaagcgtgcacgccaagggttacaaaccttgatgtttgatacatgtccacaatgtggcggtaccggatatatgttgtctggtcgaactgtatatatgcagattgtacgtcggattcgggaactatttaaatctggtcgcattaaatctaatttagaaattgaggtccacccagaggtggcacaatatctaaccaaatctgtactcgatgatttaggtgcttctattggtcggagtatttcaatcgtagtaaatccacaaattagccgggaagggtattctttgatggctgtagcagaataagtaagtcgtatattgataggtgagtatcgtgtctgtttttgaaatcattttaattagtattggtcttgctatggatgcctttggcgtttctattggcaagggtttgactatgccagtaggcgaaaatggtcgaaaagtgaccttagcctttttattcgggctatttcagttccttatgcccgttataggatggcttattggtcgtcagtttatcgatgttatctctgaatgggatcattggattatctttggccttttaggatatcttggaattgctatgattcgagaaggtcttagtgatgacgatgatgaagacgatgataagcaattcttaggcgcttgggaaatgattatgctctctgtggcaacgagccttgatgcgatggcggtggggttaacctttgcctttttaccaatcaatgtatgggaggcatcgaccatgattggtgttattacctttggtatatccttaattggtgtatatttaggtaaattcatgggccaattcgtaggaaaatatgcagacatactcggtgaaggcgtcctcattcttatcggtactaagatactcttgcaacaccttggtattatcggagaattttaaacgttgtatatatatgaaagtgtcagaaactgagcgtatataagaggatttgtatttgacatagatgtgtaaatacgatatactgtatcagtattagttcggtttactgaactttgcaatccgcgtgaagcaggtttaaacgcccgaccgatgttcgggtcgggataccgaattcagcgagttcgataacaaggaggtgttctcatgtacgcaattattaaaactggtggtaaacaatatcgcgttgctgaaggcgatgtaattactatcgaaaaattggaagcagctgctaacgattccgtaacattcgaagaagttttgactgtagtgaatgacggcgacgttaaagttggcgctcctcttgtaaacggtgcaaaagttacaggtacagttcttgaacatggtaaaggtaaaaaagttttagtattcaaatacaaagctaaatccaactaccgtcgtcgtcaaggccatcgtcaaccgttcacaaaagttcgtattgaatctatccaagcttaattatggtttccattggaatccagcggaacaaggataaccaagtcattggttgtcatatgtccggtcatgcaggatatgatgaacatggctatgatatagtgtgtgcagcagtttctgtactgtctgctacagctatgttagggcttaccaaaattgctaagcaaaaaggtgagtattctaatagcgaaggccaatgtgatatggtcctctctggtgaaataactcggagtggtcaggatatattaaatactatgcttctcggactagaagaaattagtaaacagtatccaaagtttgtccaaatacacgaaatataggaggtgaacttcatgtttacttttgatttgcaattgttcgcacataaaaaaggtgtgtccagtactcgtaatggtcgtgatagtgaatctaaacgtcttggtgttaaatgccatgatggttccatcgtaaagagcggtaacatcatcgttcgtcaacgtggtactcacttccaccctggtactaacgtaggtatcggtaaagatgacactttattcgcacttgtgcctggtaaagtagcatttgaacgtgctggtcgttataaccgtaaagttagcgtataccctgtagaagcttaattttacaaagactattaatccctagtggtttacccactagggattttttgtattattgttaaggtggattatggtttatcgtatacagtgcattgggaaaatgattatttgttatagtaaattccaatgctttttagtaggaatagtggtatacttagtacagtatcggtgaaagattactaaaatagtaatgatatactttcacagacctaactagagtggcatgtccactggaaagatttgaggtaagtactatgtatgatgtaaaatctcctaaggcggaggaatttatttctcatcaagaaatccttgatactcttgcctatgcagaggaaaataaagaaaatcgcgaattattagaccaaattttagctaaggcggctacgtttaaggggctaaatcatagagaagcggcagttctcttagaatgtccgttgcctgaatacaaagaaaagctatttgcactagctaaagaaattaaaaaagctatttatggtgaccgcattgtattgtttgcgccgctatatttatctaattattgtatcaatggctgtgtatattgcccatatcactctaagaaccgcgatattaaacgaaaaaaattgactcaagaacaaattaaagaggaggttatcgctctagaagcgatggggcataagcgcattgttatcgaatctggcgaagatcctcttaataatcctcttgattatattttggaatctatcaagacgatttacagtattaaaaataaaaatggtgaaattcgtcgcgttaatgtaaatatcgctgcatgttccgttgaagattataaaaaattgcatgatgttggcattggtacctatacattattccaagaaacatataataaggaaaattatgaagccttgcatccaacagggccgaagagtgattacgcgtaccatacagaagcgatggaccgcgcgatggaaggcggcatcgatgatgtgggcattggcgtattgtatggtctagaacattacaaatatgattttgtaggccttttgatgcacgccgagcatttagaagctgttcatggtgtaggccctcatacgatttctgtacctcgtatttgccctgctgatgacatcgatgtagatgatttcagcaatgctgtaccagatgatatctttgaaaaaatcgtggctcttattcgtgtatctacaccgtatacaggcatgattatgtccactcgtgaaagccaatctatgcgtgaacgtggtttagcattaggcatttcccaaatcagcggtggctctcgcactagtgtaggcggctataaagaagaggaaaaaccagaagataactccgcacaattcgatcgcagcgatacgcgcacattggatgaaattgtagattggctcttgggccttggttatgtacctagtttctgtaccgcttgttatcgtgcaggacgtactggcgaccgttttatggcgcttgctaaatccggccaaatccataactgttgccaacctaatgcattaatgacgttgaatgaatacatcatggattacggcgatgaaaagacgaaaaaacatggtgccaaggttattgaagaccaattggaaaatatcaagaatgatttggtaaaagataaggcaaaggcttacattgctcaaatggaagatggaaaacgagatttccgtttctagttttttgctaatatttcatgtgtaaaaaatagtatataactatatgaacaagcactgcttattatgataatgataataagcagtgctgttttgttgagaaaaacaagtgaattttatatgaaagataaagataaaaccctttatttatgtggatgtttatagtataatgtaagaaattgataatgataatacatatattaaatttattgatattgattataaacttaacgaaaatataatgatattgtatatcttgtaatatattttaccgaggatggaatgatgaaaaagaaacgttggcatattatgccaaggaatgtagaaaaagagaatacattgatccgtgaactcggtgtaaatccgattgtagcaagattgatggtgaatcggaatatagatagcgatgaaggccatcgcttcttagaaggtacacttaaagatttgcttgatccctttaccttaaaggatatggaaacggcggttgcgctcatcttagaaaccatagaagcaaaaaaatctatagtcgtctatggagattatgatgtggatggtattacggctacatcgctgttatatcgctttttagttaaaatgggggctcgtgtaagttattacataccggaacggcaaagcgaaggatatggattaaatttagaggcattagagcatattatctctgatggcgcatctttagtgataaccgtggactgtggtattagctcttatgatattgtggaggccgtttgtgatcgcatcgatatcattattacagaccatcatacggcaccgcctcaaattccacctgcccgtgccgttatcaatcacaaacaaccagattgtccttatagggataaaaatttatccggtgtgggggttgcatttaaactatgccaagcattatggttgcgtcaatgcggagagtggtatcttgatgatttagatatcgttgcacttggaaccgttgctgacgtcgttccgttggttggagaaaaccgcatcatcgttcaggctggacttaagaagctgaatgagttgcctaatttaggcatcgataaacttatagatgtggccggcttacatgataaaacgatcaccgcaggacatattggatttaccttagcaccgcgcctaaatgcggcaggccgcgttactcatgcaacgcgtgccgttgagctacttgttacggacgatgtagatttggcagagaccattgctcaagaattacaagaaacgaatatggaacgtcaagaaatagaacgctctattcacgaaggggcccgcgctaatgtggctgctcaaggtcatctagcagattatgtaacagtagtagctggagaaaattggcatcccggtgttatcggtatcgtcgcatcgcgattggtagaagagttttacaagcctacacttgttattagcattgataatggcgtaggtaaaggctcttgtcgtagcattgaaggttttaatatatataatgcattaaaatcctgtgaagatatattgattcaatttggcggccatgccgcagcggctggatttagtatagatgctagccgtattgatgaattgcgtcagcgcttaaccgagtattgtaaggctcatgtttctcctgatgagtatattcctgttgtatccattgatgccacattgcccgttgatgatatcgatgttgatattgtagatcgtgtgtccgccttagaaccgtatgggatgggcaatagtacccctatatttggcgttatggatgctaaggtgcaggacattatgctgatggggcaacttaaaaatcactgtaaggtgattttagccaccgccaatggtagcgttgatgctatcgcttggaatcgccctgatttgtttagacatatttttcaaggcatgaatgtgaaagtggcctttacacttcaaaaaaatgaatggcaaggttttgtatctccacaactcatgattcaagatatagaacctaccgtagaagaacctattcaattaagtgctgaaggtttacgtgaaatatatacaattgtgcgtctcgcattaaaaggaggggctaattctttgtaccatgtggaacaagaaattttgcgacgtaaaccagataatcaaaatggttcatctgcattgatggcccttgatgtgttcaaagaattaggtattattagcgaagaaacgaacgataatggacaagcgatgatccgttggaatgtcatcaacggtaagcttgatttgacaacatccgttacgtttattacatatagtcagcaggaggtgatacaatgatgaccataaatgaagaaggcaaagccttagttgaacaaaaaggctttaataaagaagaggccttaaaagagtttatggattatgtgcattcgtatctaggagatgatgaatgcgaccaaatcatgaaggctttcacccttgcagataaagcccatgaaggtcaatttagagcctctggtgaaccgtatatcatgcatcctcttgcagtggcagagattttggcgcatttgcaaatcgatcatattacattgattgcagccttgctccacgatgtcgttgaggatacggagtatacaaaggaagatattgaaaaattatttggcgctgaagttgcattcctcgttgatggggtaacaaaattaaatcagttccaatatgaaactaaagaagatcgccaaatggaaaattatcgcaagatgattttagccatggcgaaagacgtgcgcgttgtcgttatcaaactgggtgacaggttgcataatatgcgtaccttaaaacatatgcgtagcgataaacaaaaacgcattgctaaggaaacgttggaaatttttgctcctttagctcatcgccttggtattttcaacgtaaaatgggaactagaggatttatccttccggtacctagaaccagataaatactatgatctcgttgatcaaatgaaacaaaagcgtcaagcccgtgaagatatcgttaacgatacgatggaacaattgacgaaggctcttggtgaggccggtatcaaagcggatatcaagggacgaccaaagcatttttatagtatctataaaaagatgaaaaaggataatcgcgacttgtctcaaatttatgatttattggctgtacgcgttattgttgatactgtaccggattgctatgccgttctaggtattgctcatagcatttggaaaccgttgccttatcggtttaaagattatatttccatgccgaaatccaatatgtatcaatccttgcatactacggttatcggtacgatggggcaacctgtagaaatccaaattcgtacatgggaaatgcatcgtgtttccgaatatggtgtcgccgctcactggcgttacaaagaaggtaataagggcgctgataaagaatttgaccaaaaggttgcatggcttcgtcaagtgttagaatggcaagatacgtctaatcctaaggaacttgttaatgctttgaaattagacgtattctctggtgaggtatttgtatttacacctaagggtgatgtggtcaagttgcctatcggttctgtaccactcgactttgcgtatcgcgttcataccgatgtaggccatcgttgtgtaggggcaaaggttaatggtaaaattgtgcctctggattacaccttgcaaaatggggatatcgtcgatatcattacctctaaaactggtaaaccaagccttgattggctcaatattgtaggctcctctgaaagtaagaacaaaatccgtaattggttcaaacgagaaaataaagaagaaaatattgaaaagggtcttgaagcacttgagcgcgaagcaaaacgcctcaattatagttggaaagagctttgtagtgacaatcgcattcaacaagttgtaaaacagttgaagtccaatactgaaaatgaactatatgccgcttgtggctatggtgggataccagtaagtaccgttctattgcgattagttgaactatacaaaaaatctaaagagcatgaagatgctcgtaaaacaacggaacaaatcattgaaaagttaaaggtacaaggggccaaaaaggctaagaatggcactggtgttctcgtaaaaggcgaacctggtgttatggttcgtatggcgaaatgttgtaatcctgtaccaggcgacgatattatcggttatattacaagaggtcgtggtgtttccgtacatcgctctgattgtacaagccttggtcatacaccggaagatctagagcgtatgattgaagtttcgtgggatgaagcatcgagtgaatccttccatgtaggcatcgatattcaagcctatgatagatcaggaatcctcatggaggtaatggcggtgctttcagaattgaaaattaccattaccaatatgaacgccaaagttcttgaaaacacgaaaaatgtaatgatcaacatcgttgttgaaattcgagatatatcgcaacttgattttgttatgactaaattgcgtcgtatccgtgaagtgtacacggtacaacgtagcaaaggtggtgcataatggatacatcaaatttagttctcatgcgtatgccgttgggaccgcttggaaccaattgttatgtgataggcgataaggaacagggggaagcgttcattatcgatcctgccactacagaggtgttagaggctttaaaaaaacataatgtaaagccgaaagcagttctcttaacccatggtcatggtgatcacatcggtggcgtacaaggtattgtagatgcttacgatgtgcccatctatatacatcatgatgatgtgaaatacttaagtgatcctgaattgaatctaagcaattatagcaatcctacaccgattactgtgaaaggacgcattgtagaggttcatgaaggtgatcacatcacatgtggtgctattgatttgactgtatacgaaacaccaggtcacacacctggcggcgtatgctactacatgccgggtctagtatttgttggggatactttatttaatcaatctgtggggcgcactgattttgtagaaggtgattatgatgccctcatcaacgcgattaaaacaaagttatatacattgccagacaatacgatggtatatcctggacatggtccagaaacacaaattggttatgaaaaacaatataatccatttgtaggtgcttaattaatttatttagtaaaggggatagtcattatgaatacaacattggaaaaattaaaagaacgcattaaagataaaaaatataaattgactacacaacgtcaaacgattttacaagctttcatcgatgctgaagaaaatcacttgagtgcagaagatgtatatgtattggtaaaagaagtagcaccagatatcggtcttgcgactatttaccgtacattggacttgtttacagaacttgacttgttaaaacgccttgactttggtgatggtcgtaatcgttatgaattaaatgacgaagagtttgcccatttccatcatcatttgatttgtgtgaaatgtggtaaggtttccgagtttgaagatgatatgctagaaacattggaatctatcattgcaaagaaattgaatttccgtaccatcgaccatcaattaaaagtatatggttactgcagtgattgccaagcacatatgacgccagcagaacttgaaaagctcgataaaatggcacatcatgcttaatggatatcattacacagggccactaccgcttggatcggtagtggcccacaactgtggtgcagccggattgttttcacgcaatgaagaggctgatgtgattctgcgtgctgtcgaacgtgatgatatgtatgttttgaccgtgtctattcgaggtgttgaacataccttaacaggtcctgtatcttctatggggcgacgctcaataggccagtccttactcgtattgttgcgtacagaacagggtttgcctgctcataatgagtggggcacaatggtaggggtgcgtcctactaaattacttcataaatatatagaccaatatggttcattagaggatgcaactcgtcacattggggacgagttttctgtgtctttggaaaaattagatattctcagccggattgggcactatcaacgcccttttttagagtctcactctaataaggatataagtctctattgtgggattccattttgtgaaacacgttgtgtatattgttcatttccatacggtttatatcaagagtatcatcgacaatctgaatttatagcagccttattagaggatatagatgatgtgcgccagatttgtgaaacttacaatttgcacacgaaaacgctctatatgggtggcggtacacccactatattgaataatgaagattttcatcatgtcctaactggattatctacattgatacctaaagggcatgaattcacggttgaagcaggaagaccagattctataaccactgaaaaaatacagtctatgcaagcgtgtcatgtgaatcgcattagcattaatcctcagacgatggacgatactatattacgtcgcatcgggcgtggacacagcgcacaagatatcgatgatatgtatcaatatgttaaaaaacatacagattttgctgttaatatggattttatagcaggtctacctgggcaaaatataaaacatatggtgcataacatggattatatttgtcataatttgcctgaaaatgttacaattcatacgttagctatcaaacgcggtagtccgctatatgatttgaacatgcaacatgatgtacctgatgagtccgtggtaaaacacatggtgcagtatgctaaggagcgattagagcaggctggttatgtgccgtattatctatatcgccaacaatatatgagaggtcaactcgaaaatattgggtatacattgccgggtaaagcgtgtgaatataatattcaaatcatggaagagcggcaaacaattatgtctatgggaccaggtggatcatctaaatggattaaggcccctgcgtttagacaaaaaaagcaacacatgccaaaggatgtagatgtatatacagatacattaaaggctttattagctaagaggcatgcattatgtaaatcattttgggaggttgtgtaatggctattaaaagaccaagaggtacacaagatttcttgccagaacaaattgtaaattggcattatatagaacagcatatgcgcgaaatttgtaaagcttatggctttagtgaaattcgcacacctgcctttgaagatacaaaattatttttgcggggcattggggaaactacggacgtagtatcaaaggaaatgtataccttctccactggcgatgacaaggaacaaagctatacattgcgccctgaaaatacggcttctgccgtacgggcttaccttgaaaataaggtgtatggtaaagaaaatttaacaaaatggttctatatgggttctatgttccgtcacgataaaccgcaagctggtcgctatcgtgaattccatcaatttggtgcagaagtactcggttcgccatctcctgtagtggatagcgaagttatctgtatgatcgtacagttgttgaaagatttcggtcttaaggatctcaatgtagaggtgaactctgtaggttgtccaaactgtcgtcctacgtatcgtcaaaagttgattgaattctttgaacctaaaaaagatcaactttgtgaagattgccaagagcggttgtacaaaaatccattgcgtttattggattgtaaaaatgaaacgtgcaaagccttatccgtaggtgcccctgaaattcatgaacatctatgtgaagaatgtaatacacattttgaagaacttaaaacattacttgatgcggcgaatattcaatataatctaaatcctcgtttggttcgtggcttagattactacacaaaaacagcttttgaagtccaatacactccattaggtgcgcaaagtgccgttgccggtggtggtcgttatgatggccttgtagaggaactcgatggtcctcatacaccagctattggttttgcaatgggcatggaacgattgttattggctttggaaaaacaaaacttgttgcctgaaccgacaatcgaaccagcagtatttgtagtagcccttggagaggctgcaaaattagaagctttcaaaatttgccaaacattgcgtagtgcatatatcactgcagaaatggatggacaaggtaaaagtatgaaggctcaattaaaatatgctaacaaaattcatgcaaaatatgttatcatagtgggtgatgatgaattggctaagcaagaggccatcattcgttttatggaaacaagtgaacaagaaacagtgccattagcatctgtttctgaacgtatatcttctttggtgaaaggatgacagtagaatggaaacaatgaaaggcttacaccgtacacacggttgtggcactatttctgaagcagaagtaggtaaagaggttgtattatgtggttgggttgaacgtcgtcgtgaccacggcggtttgattttcttggatttgcgagatcgttctggcatcgttcaagttgtagcatccccagatcataatgtggaatctttccacaaggctgaagatgttcgtaatgaatatgtgctttgtgtacgtggtaaaattacaaaacgcgatgaagaagcaatcaatcctaacttgcctacaggcgcttatgaaatgtattgtgaagaacttcgcgtattgaattctgcgaaaacacctccattctacattcaagataatatcgatgtagatgaaaacatccgcttgaaatatcgttatcttgacttgcgtcgtccagaaatgcaacgcaacttgattttgcgtcataaggtaacaaaggctatgcgcgatttcttcgatagccgcgatttccttgaaatcgaaacacctatgcttacaaaatccacaccagaaggcgcgcgtgactatttagtaccttctcgtgtgaatgcaggcacattctatgcattgcctcaatctccacaaattttcaaacaaattttgatggtagcaggctatgaaaaatatttccaaatcgtacgttgcttccgcgatgaagatttgcgtgcagaccgtcaaccagaattcacacaactcgacttggaaatgagcttcgttgatgaagaggacatttatgcactattggaacaaatggttgcagaagtgttcaaaaagacattgggcaaagaaattccattgcctatgcctcgtattacatgggatgaagcgatggataaatatggttctgataaaccagatcttcgctttgacatggctttcacagatgtaactgaactcgtaaaagatactgaattcaaagtattccgctctgttatcgacaatggcggtatcgtaaaaggtatcgttgtacctggtgatgcaggtattcctcgtcgtgaactcgatgatttggtagcatatgtaaatcgctacggtgcaaaaggtttggcttgggcttgcttcaatgaagacggttccattaaatctcaaatcatgaagttcttaggcgaagatacaatccgcaatatcggtgaaaaaatgggcgctaaaggtggcgaccttgtattgatgattgctgataaaccagcaactgttgctcgtgcacttggtgagttgcgccttgaaatggctcgtcgtatgaatatgattgacgaagataaattggctttcacatgggtaacagatttccctatgttcgaatataacgaagatgaaaaacgctatgttgctatgcatcatccgttcacaatgcctcgccacgaagatcttgataaattgcaatccaatcctggtagcgtaaaagcaattgcttacgatatggtattgaacggcgttgaaatcggtggcggttccttgcgtatttatcaatctgacgtacaagaaaaagtatttaaagcaattggtttatccgaagaagaagctaaatctaaattcggtttcatgcttgatgcatttaaatatggtgcgccacctcacgcaggttgtgcatttggtcttgatcgtctcgttatgttgatggctaaacgtcaatccatccgcgacgttatcgcattccctaaaacacaatccgcttctgatatcatgagccaagcgccatctgaagtagaacctaaacaattaaaagaattacacataaaaccagatgtagaggaagaagaacaatccttggtataatcgcaagtaagcatattataaaaggaccgcaagaattgctaaaattttaaaagtcaagtcttgtaaatgataaatctttctgctactatttatgtataagatatccctgccatgtgcgtgtgatatcgcagttttgagccaacacattttcttcgggagtccagaactctcgtctgaacgttacgccctcacgggacaactgcaggatgaggaggacacccacctgctcttgcaggatcaaaacgcggtacattacggcatggtggggcttttttgcatgtaaagaatgaatggaggtagcatggatagtttatttgatgcattacctacgaataaatatgaaccactaccggtgcgaatgagaccgacagaacttgatcatttgtatggtcaagaacaggcggtagggaaggggacattccttcgcgccatggtggaaaaggatacaataccatccatgttgttttacgggccttgtggaactggcaaaacgacattagccggtatcattgctaagatgagcaacagccattttgtcaatttaaatgcgacaaatgcaggtatcggtgaattgcgaaatattatagaagatgcgcggaaacgcgttcgttctttgcaacaacgaaccattttatttctcgatgaaatacatcgctttaataagagtcaacaagacgtactgttaccctgcgttgaagatggtacgattattcttattggggcaactacagaaaatccattttttgaagtcaatcgcccattattatcgaggctacgacttattacattggaggccttaacgccgaaggcaattagtcaaattttaaagcgagctcttacagatagcgaagtaggcttaggggctcgtaacttacaggtaaaggatgagttgcttgaggatataggtatcttcgtcaatggagatggtcgtatggcactcaatattttggagcaagctgcggccatggtacacgatggtgaagaaatctctttagaaatacttgaaaaggtcgtaggccgtcgcatttatacatacgataaaaaaggagatagtcattacgatacaatttccgcctttattaaaagtatgcgcgggtccgatgtacaggctacacttcactacttagcacgtatgatagaggccggtgaggatcctaattttatcgctcgtcgtattgtcatttgtgccgccgaagatgtaggattagcagatccacaagccttaatattggctaatgcagcagcacaggccgcgcatatggtgggatttccagaggcgcgtatcattttatctgaggcggcgtgctatgtggcgctagcgcctaagagcaattctgcatatctaggtattgatgcggctatttcagatgtgcgtcataaggactgtggacaagtgccggatcacttgcgtgatagccattatagtggagctagtaaactaggacatgggctaacttataaatatgctcataattattcgaatggatatgttaagcaacaatatttaccggatcctttaatacatgctgagtattatacgggcgtcgatcgtggggtagagcataatctgttaaaagattggaatgataggcgcaaagataaatagaatggtcaatatatggtataatataatgatgatttgaaatagatttttatataaaagtaaggggtttgtatacgattatggcagaagagaaaaaaacttctacacgagggcggaagcctcgcaaaaaacgagctacaccggcaccaaaaaaagaaggattttcactgcgtaatgaagtgaaaggcattattgtcataggtgttgccatactggcattgctaggcttttttggctttgatttaggcattgtaggcgaaatattgacgggaatatttcgctatggatttggctttgggggcataattccgtgcattgctgtactatggcttggatggcgtttgttataccaaggtaaatttatgtctattacacgtcgtggtcttctcataacagttttttacttattagccattaccatggttccactatgtcgtgtgcctgttggtgatgaattggcgactacagcgctgtcagatcaaggtggtgttgtgggcggtttcttggcttcctttatacgaactatgttcggtgaagttggttccattattgttgttgccgtacttatgctttgctgtggtctccttattacgcgcctatccttgggaaacggattgcgtaaggctgctgataaaacgcaagtaggccttgataaggcaaaagaagtggctgttgaaaaggtagcagtagccaaagaggttatcgaagattggaatgaacagcgtaaagaagcagcacagcgcaaggcttatgaccgcgaaaaggatatgcgatacaccgatgcagctcagaatgctgtagagactcttgaaaatagaggtgttgtagctgctaatgatgactatgaagttgagccaatcgatacacatacgccttcttcttggaaagaattagctgagttagaggctcgtaatagagcggcagaacgattagtacaaatctctgaagaatctggtgatgctgtcgataacggtgaaattcgtactgatagtaccggtgatgattcaaaaacaatgcctgcatggcttcatgatcatgatgaggaacatgccgatattgaagaatttgatacagatgatagtgttgaggatgatgtgcgtaccaccgatgaatcaggcccagcagaatactcttatcaaccaacaactattggtccgttagaaaccaatcatgcggcgattgcgagtgccgtacctggtacaggtgccgctgctagttctgttagtgctggcgcaggcatgagttctatgccattatctgtaccgtctttggcaagtactgctgaggatacagcacaggtagccgtttctaaagatggacagattcatagaacttacgatagaccatatcatttcccaagccttgatattttggcgaaaggggaggtaggtcaaaataataatgacgaggtcgcgtataatgcgatgcgccttgaagatgttttatctagttttggcatttctgctaaggtagttaatgctacgcaaggcccaacggtaacacggtatgaaattgaaccagcccaaggtgttaaggtaagtagaatcgtaaacttaacagatgatattgctttgaatctagcggctcaacatatacgtatggaggcgccaattccaggaaaatctgctatcggtattgaggtacctaatacgaaaacagaagccgttcacttgcgcgatgtgctagattgcagtgactttaaagaagcgaggggcggtattcctgtaggccttggtaaggatatcgctggtaaaccggtgattacagacttggctaagatgccacatctattggtagctggtacgacaggctctggtaaatctgtatgtgtgaatacattgatttccagtattctctttagccgtaaaccagaagaggttaagttattacttatcgaccctaagatggttgaattatctgtgtataatggtattcctcatttgatggcaccagttgtaacggatatgaaaaaagcagctgctgtattgcgctgggccgttcgtgagatggaagctcgctacaaggcgtttgctgcatccggtaagcgcgatattaaaagttataatgaagcgcatcctaagtcggcaatgcctcttatcgtattgattatcgatgagttggcggacttgatgatgactgctcctgatgatattgaagaatccattagtcgattggcgcagatggcacgtgctgctggtattcatatggtactagctacacaacgtccatctgttaacgttattaccggttctattaaggcaaacgtgccaagccgtatttcttttgccgtagggtcccaaatcgattctcgtacaatcctcgatatggcgggtgctgaaaaactattaggcaaaggtgatatgttgttctctccaattggggctaataaaccaattcgtgtacaaggtgctttcatctcagatgatgaagtggaacatttggtagagtttgtaaaacaacaacgagaaccagaatatgatgatacggtaacggctgaggcagaaaaggaaaccgcagcacaagataatgatgaacaagatatttatcgtgatgagttattagaacgagccgttaatcttgtgatggaatctggtcaagcatccgtgtcgatgttgcaacgtagattccgtatcggttatacgcgtgctgcacgccttgtagataccatggaggatcttaaaattgtaggtcctaatatgggtagtaaagcacgagagattttaatgagtccagaacaggtgaaagctcgatacttctctgattctgaggaatagaaagggatatactgtggctgagttaggtgaagaattacgtcgagaacgtgtacgtagaaatctcacatttaaagatattgaacaagtacttcatattaaaacaacctatttagaagccatcgaagatggaaactatgcagttatcccaggacgtgtatacgcgaaaggttttattcgcaattatggaaattaccttggccttgatggagatcgcttagtgaaggtgtatcaaaatcaagtaggtgaagtggatacattcacaatacgtcctattatgcgtcaaaagaaacaggaaaccattaactctgtgcagagtgagtacgttgagcatcagatggcaaaacgtcgtatgtcgcttgaaacgagacagaaaaagcgacaacggtccattgaacaagaacgcattatgcttgctattattgccgtattcatggtgatatttttgatatggttgtttttattctaagatacatcgttacagttaaaggaaggttatattgatggatacatttttagttacagaacgcgcagatatggaagcgcgcgggtgggcagaactcgatttcgtgctcatcagtggcgatgcgtatgtagatcatccatcttttgcgcctgccgtaattggtcgttatctagaatccaaaggctatcgagttggtattattgcccaacctgattggaatgatgttaatgcttttaaaaaattagggaaacctcgtcttgcatcgcttgttactgcaggcaacttggattccatgctcaataagtttacggcagctaaaaaaattcgccgtgaagatgattactcaccgggaggtgaggcaggacatcgccccgatagagcgaccttggtatactctaaccgcatgaaagaagcctttagagatgtgcctcttatcattggtggcatcgaggcttcattacggcgttttgggcattatgattattggtctgatacggtgcgtaggtccattcttgtagactccaaggctgatgtacttatatatggcatgggtgaattacagattatagagttagccgaagcactagatcaaaatcgatttgaagaatcattgccaaatatacgtggtatttgttatatgtcaaaagacataccatccattgattgtgttgaatgtccttcctttgaagaaatcaaggtagataaaatggccttcgccgatgcttttcgcattcaatatgatgaacaagatccattctatggacgacctattgtacaaaaacatggagatcgctatgttgtacaaaatgtaccggccttaccattaacacaggaacaaatggatgcggcttatgatttaccatacactcgtaaatggcatccatcgtatgatgataaagggggcgtgcctgcattaagcgaggtgcagtttagtctcgttagtcaacgtggttgttttggtagttgctcattttgtgctattaccaatcatcaaggccgtataattcaaaatcgcagccatcagtctttgattgatgaagctaagttgatgatcaatatggatgggtttaaaggctacattcatgatgtaggtggtccaacggccaatttcagacatttagcatgcgataaacaagccgtctttggcgcttgtaaaggtcgcacctgtgcggcgccggaaccttgtgaaaatttgaatactaatcacgatgattacattgcattattgcgcaagttacgaaagttaaagggcgtaaaaaaggtcttcgtcagatcggggttacgttatgactatgtgttagccgacaataacaaagcctttgtaaaggaactttgtcaatatcatgtgagtggtcagctaaaggttgcgcctgaacatgtatcaaagcgtgtaacgactatgatgggcaaggctggaaaagaagaattcctgacctttaaaaaatggtttgaagaggcaaatcgtgaattagggaaaaaacaatatttagttccttattttatgagttctcatccaggatgtacattagaggatgccatagaattagctgaatttttacgagatcagcatatgtaccctgaacaagtgcaagattttattcctacaccgggcagtctttcaacgtgcatgtattatacggggattaatcctcttgatggcaagcctgtttatgtggctaaaaaaggtcgggacaaggctaagcaacgagccttgatgcaatataaaaacattgaaaattacgacttggtaaaagaggcccttatcgaagctaatcggcgtgatttaatcggctttggacctgagtgcttaattccatctagaccaattggacaaggtaaaatgcaaaatcaaggacgaaacaaaacgggacaatcgagaggcagtcaatctcgatatgctcgaagtggttctccttcacaggtcaataagactaagggagaacgtaaaaggagatttacgcgatgaaacgatggatggcatttattgtgttaatgctttttgtcttaggtatgatggggtatggcatatacttttatcgagaggagcaaattgaaaaatcaaaagcgcctgtacgcggtgaaattacggtttatactgacttacctaataacttaacaacactattagctgataaatatttagaggataaaaacgtaaaagttaatattatgccactcactgaggagcaaatggaacaacgggtttcctctaagttagcagattcatctggtgatgtagtgattacatctgaggataacctcgtcatcggtgctagtaaagataagtttgctcctattgtaaatgaacgcatagatgaggtcttggatcgcctaaaggattcaaatggttactgggtcggcttatggtatgatcctatcgtttttgtacaaaatgaatcattttacaataaactaggtcaacatattacgacttgggataccttgcaaaagcctgggaactggcgtgtggtgatgacagatttcggagcatctcaaaatgcggctaatcttttgtacaatttggtggaatataaaggcgagccagatgctcttgcagatttattagctttaaaaacacatgttatacaacattctaagttcctttccacacctgtacggctaacagctcttggtgaatcggatattggcattgggaatctttctgatgcacaacagtacattcgccattcttatcctgtaaaaatgatttatcctagtgatggcacatcattttatataacaggtgcagcggtgcaaaaagattctaagcataaaaatgaaagtatagagtttattacttggttactatctagtgaaactgcaaaatatatgatgaataataattttacctatatattcgccaatcctgaagttaccgaacccgtagatgcactagggcgttccgtagtgctatggcctgttaatggtggctatacagtggagggaaaagaacttttattgaatcactgggttagccaagtacgttttagaaaagatcaatagaagtgtatttctataaaatacgtatacaatatcgttacattctataaataagaaaggatttagaatgaccaaatcattgggatatattagcctaggttgtgctaaaaatttagtagatacagaggttatgcttggattgttaaaggatgatggttataccattaccgataatttacatgaggctgacttaattatcataaatacatgtacctttatagagaaagctaaggaagaatctatcaatacgattcttgaagctgctcagtataaagaaactggtcgttgtaaaggcttaattgtagcaggttgcttgagtcaacaataccaagatgagttgtttacagaaatccctgaaattgatgcccttattggtactggtgcatgggatcaagttatggtagctgttgatgcgattgaacatggcaatcgtagctgcatcatggaaaatattactaatatctatgatgaacgcatgcctcgcattcaaacaacgcctcgctacagtgcgtatgtaaaaattgcagaaggttgtaacaatggttgtacattttgtatcattcctaaggtgcgtggtgcatttagaagtcgttccattgaatctattacggctgaagttgaacgattagctgcgtcaggggttaaagaaatcgttctcattgcacaagatacgactagctacggcattgatttaaataatggtaaaccattacttacagagctgttaaaagaattaactaaggttgagggaatcgagtggattcgcatgctctatttatatccaacattctttagtgatgaattgcttgatattatcgtcaatgaaccgaagctttgtaaatatgttgatataccattacaacatgtaaacaacgatattcttaaacaaatgaatcgtcgtgattctcgtgaggatattgagcgattattaaagaaaatccgcaatgcaccaactcatgttacattgcgtacatcgattattgttggattccctggtgaaacagatgaacagttccaagaactttgtgaatttgtgaaggatatcaagtttgataacatgggtgttttcacatactctcaagaggaagggaccattgcaggggctcgtgaagatcaagtaccagaagaggttaaagaagaacgctatcatacattgatgtctatacaagctgctatttcagaagagaataaccgcgatttagaaggcactattgactatgccatgattgaagaattagaagaaggcgataatgatactgttcttgcaaaaggtcgtttgaaatcacaagctccagatgtagatgggaacatgtatatcgaagactgtggcgataaggttaaagctggagatattgtacaggtacaagtagagcaaggttttgcttacgatgtagtagctactatcgtagaataatattgattggtgtattaggtaataccactattaacacatctgaagtgatgggaggtatttacaatgattgtagaattaatttctacaggttctgaattattgttaggggatacggtgaacaccaatgtctcctggttagctcaggaacttaataaattaggttataccatagcgtatcagtctgtggtgggagacaatccaggccgtatgtctgaagtgtttaaaaaagcggcacaacgtgctgatctcgtgattagtacaggtgggttgggtccaactcagggtgatataacacggcaagttttggcatcgtctttaaatcgcggtgtcgtatataatgatgatgctatggctgaggtgcgacagtttttcaaacgagtaggtcgtgaaatgcctgatgcgagtcgtagagaggctatgttgcctgatgactctagtgttttagctaatcctgtcggtgttgcaccaggcgtagtaaccgtagatggcgatgtaacctatatactattaccaggacctccaggtgaaatgaaggggatgtttacacaaagtgtagtgccttatcttcataagcgttttggttcacaaggtgttgtaacgtcttatcgttatggcgtttatgatattcgtgaaatcgatttagaagaacgcgttatggatttgattaaacaacaatccaatccgaccatagctttgttaataaaaaaaggctacattgaattacgtattactgcaaaggcttcatctctcgatgaagcacatagattgttaaatccttgggatgaaatcattcgtcgccgtttaggttctttgattggccgtaagttagatatttctatggaggaaacgctcggtaatacgttaaaagaatcgtctgcgaccattgctacggcagagtcttgtacatctggtttagttggtaaactattgacaaacgtaagtggtagtagtgattactatatgggtggcattatatcctatagcaatgatgtaaaacatcgggtcttaggtgtgccacaagatttactcgatacatatggcgccgtgagcgaacaagtagccaaagcgatggctgaaggtgcaaaacgcgtatgtaatacgacatatgcggtgtctacaacggggatagcaggccctggtggtggcacaccggataaaccagtgggcctcgtttggtttggcgtaactggaccatatggaaccgttgctcacaaagctaatcttattggaaatcgagaagatatccgccaaagtgcggctgaattagcattatattacatgaatttgtacattcaagaaaaaggggataaataatggctgttgatggtagacaagcagcgttggataacgcattaaaacaaatagaaaaagactttggtaaaggtgctatcatgcgcctaggtgaagcggcagatcgtatgaatgttgaggttatttcctctggttctcttgccattgacctcgctgtaggtgtaggtggcttccctcgtggtcgtgtcattgaaatttatggtccagaatcatctggtaaaacaactgttgctcttcacgctgtagctgaagcacaaaaacaaggtggcgtcgctgcatttattgatgcggaacatgcaatggacccaatctatgcacgtaatcttggcgtagatattaataacttgttaatttcccaaccagacaatggtgaacaagccttagaaattacagaggcgcttgtacgtagtggtgctgtagatatcgttgtagttgactctgttgctgcattggtacctaaagcagaaattgaaggggaaatgggtgatgctcatgtaggtctccatgcccgtttgatgagtaaagcattgcgtaaattaacaggtactattaataagacaaaaaccgttgttatctttatcaaccaattgcgtgaaaaggtaggcgtaatgtttggtaatcctgaaacaacgaccggtggtcgtgccttaaaattctattcttctgtacgtcttgatgtgcgtaagggcgaattgattaaggccaataatgaaaatgtaggggcccgtacaaaggttaaggttgttaagaacaaggtggcacctccatttaaaactgctgaatttgatttgatgtatggtcaagggatttccagagaaggtactcttatcgatatcggtactaatatggaaattatcaaaaaatctggcgcgtggtattcctataatggggaacggatgggacaaggtaaagaagcggcaaaacaatacctcttcgacaatcctcaagtagctgaagaaatcgatcgtatcattcgtgatacattggcagctgaaccagaaacatttgatgttgttggcgaagatgctacaccagaagaagattaatagatatagcatataaaaaagggctactgtgtagccctttttcattgaggttattatgatagacgatatgtttacagaagaggaaaagcaggctgcgttagatcaagcctatcgatttcttgcacagcgctttttaagctcttatgagctgcgccaaaagatgaaacgaaaacagatttcatcggatctcatcgattacgtagaagagcgattaatatactatgattacattaatgatgagcgtttagcgaaacaggttgtatcctatttgatgagagagcagaaatatggtgcatatcttataaagcaaaaaatgaaacagagaggccttgatgtgcctcgtgatattgaaaaatatgatgaactggcagccgcttttcgaattgtagataaaaaatatggtgaatctataagcgatattccgcgtataaaaataatgaatttcctaaaaaacaggggattttctatgagcactattactaaggtttgcgaggcctatcaatcttgacagaaagggctttcaagcataaaattaaaatagccttgtaaacatataatgtattataggttattaatttaatatgttaaaaatcaggaaacaaggggcgtagtgcccgtatgtgaagatacaggaggtgagactgattttagagtatagtctaattgcagtagtaatggtgctaattggactaggtgtaggctattttttacgaaaaaatatcgctgaaggaaaactgaatcaagctgagcaagaggctgagcgcattgtcgcaaatggtgagcgcatggccgagtctaaaaagaaagaagctttattagaggcgaaagaagaaattcataagctccgttctgatgtagaacgagaaaataaagagcgtcgttctgaattacaacgtatggaacgccgtattcttcaaaaagaagaatctttggataaaaaattagacaatattgagcacaaagaggaagctttacatcgtaaagaagctgacttagttcaaagcaaagaaaaaattgatgctttgtatgaaaagcaaatggcagaattagaacgtatttctggcatgacctttgatgaagctcggaacatcttgttaaccaatgtagaacaagaaatccgtcatgaaacagctatcatggtaaaagaaatggaacagcaagctaaagacgaagctgagaaaaaggctaaggaaattatttccggcgctattcaacgttgtgcagctgaccatgtcgcagaaacaactgtttctgttgtcgcattgccaaatgatgaaatgaagggacgtattattggtcgtgaaggtcgtaatattcgtgctctagaaacattaactggtattgatttaattatcgatgatacaccagaagctgttattctatcaggctttgatccaattcgtcgtgaagtagcgcgaattgcattggaaaaattgattgtcgatggtcgaattcatccagctcgtattgaagagatggtggcaaaagctcgtaaagaggtggaccaaacaattaaagaagccggtgaacaagcaacctttgaggcagatgttcatggcttacatcctgaaattattaaaattttagggcgtttgaaataccgtactagttacggtcaaaatgtattaaaacattctatcgaagtatctcatttagcaggtcttatggccgcagaacttggctgtgatgtgacattggctaaacgaggtggtttaattcatgatatcggtaaagctctagatcgtgaaatcgaaggttcccatgtggaaatcggtgttgatgtagcccgtaagtatcgtgaaagcgcagcagtaatcaactgtatcggagcccatcatggtgatgaagaattccaatctgtagaggctgttctcgtagcagcagcagatgctatctctgcagcccgtccaggtgctcgtagagaaaccttagaaaattacttaaaacgattatctaaattggaagaaatcgctgaatctttcgaaggcgttgaaaagtgctttgctattcaagccggtcgagaaattcgcgttgtagtaaaaccggataagattgatgaagctgaatctacattacttgttcggaatattgtaaaacgcattgaatccgaattagaatatcctggtcaaatcaaggtagttgttattcgtgaaacacgcgttgttgattttgctaaataagcattataccaaaaattgtaggctgcaatattatattgcagcctatcctttttaattgtaggctattatattagaggatttttgaaagttttatcgaatatagaattatagacccttttttctatgattgtatagtcgataaaatataaaaactaaaaggaggtgttctggtgagtcgatattttgaaaatgaattaattgaacaaattaaagatgccaatgatatcgtatccgttgtatcagaacacgttacattaaagaaaaaaggtaagaattattggggttgttgtccatttcacaatgagaagacgccatcttttagtgtggctcctgacaaggggttttattattgttttggctgccatgcatcgggaaatgccatcaagtttttgatggaactagaaggaattacctttgttgaggccttggaacggcttgctaatcgagctaatataccattgccagaagcaaagctttcaccacaggtgcgggctagagaggaacggcgaaagaaattatatgaggcttgtgatttagcggccaatttctttcataattgcttgcttaaaacatcatatggtaaggccggattagagtacttaaaaaagcggggactcacagatgaaaccatagaaaagtttagacttggatttgcccctgatggttgggatagattgtataaggcttttagagaacggggcattgaagaatctattttgcttgaacttaatttaattcgcaagaatgataaaggtcaggcctatgattttttccgtaatcgagttatgtttccaatcatggacggtaaaggccgtgttgtcggctttgggggccgtgttatggatgatagcacgccgaagtatttgaactctcctgaatgccaaatctttgaaaagggtaaaattctatttgcttttgataaggcttataaatcgatacgcgaagaaaaacaagccatattagtagaaggctatatggatgttatttctgctcataataagggtgtaaccaacgtagttgcttcgttggggacggcatatacaaaggatcatggtcacatcttgatgcgccaagcagatgagattatattggcttacgatatggatggcgctggccgccaggctgttacacgcgctattgaattactacagaatacggattttaaggttcgcgtgttggctatgcctgatggcaaggatcctgatgactatgtgcgaaatcacggcggcaaagcttttaaggaattagtagaaaaggctgttaagccgctcgattatttattaagtgaatctcttattaagcatgatacgaatgacgcagaaggcaaacaggcggttatgcaagatatattcccttatattgcgaatattcatagtcaaacgattcgagacgatgcattaaaggccttagcattgccattatggctagataacagtactatattccgctattttagaaattatacccaaaagggaaatattgaattagtcgatgaaaagattacacagcctaagaagattgtcagtggtgatgaagagttattgatggctcatgtcattacagattcaaaggctttacaagaggtagtacaatatttaccgcttgaggactttcaaaatattcaatatcggggtataatagaaaagatatacaccttatttactcaaacaggtcaatatcagccggaatccgtggaggacgtattgacgcctcaagaatatgaaattttttcacggcttatgataattgaggcaaatgaggctgtacctgtacttatccgtaaaatacggctacattccttacgggaacaatataaaatgcactcaattttggccgatcagttaaaacgtgcaggagattcgacatttattagcgaattacataaatgtcaggaaatacaaaatctaattagagaatggtctaaatagtaagtaataaaggagagcgctgtggctaagaaagtacaaaaaagtcaaacagaggagattgtagcacaacttcttgaaaaaggccgtaaaagcggtgtgttgacacaatcagaaatttcagatgctcttcatgagcaaagtgagttaacagcagaacaattagatgatatttatgttactttcaataaactaaatatcgaagttgttccagatgttgaggacgatgataaagacgatgccattgaacctgatgatgatgtcgataatgaccgtgatgctgcgtctgaaaaaaatatttccattgacctaagcgtagatgctagtgttaatatcgacgatccagttcgtatgtatttgaaagaaattggtcgtgttccattgctttcagctgacgaagaaatcgtattagcaaaacaaattgaagcaggggcagaggaagatgctacatataaagaaattcaacttagcaaaaaggctaagaagaaattggtagatgctaacttgcgccttgttgtaagtattgctaaacgttatgttggcagaggcatgttgttcttggatttgattcaagaaggtaacttgggccttatcaaagcggtcgataaattcgactatacaaaaggttataaattctccacctatgcaacatggtggattcgtcaggcgattacgcgggctattgcagaccaagcgagaacaatacgtattccagttcacatggttgaaactatcaataaattgattcgtatttcccgacaattattgcaagataaaggcagagaaccaacgccggaagaaattgcggaaggcatgggtatcactgctgaacgtgttcgtgaaattcaaaaaattgcacaagagccagtatccttggaaacaccaattggtgaagaagaagactcccatttgggcgatttcatcgaagaccaagatgcggtggcaccagatgatgcggctagctacatcttgttgcaagaacaaatcgaagacgttttcacatgcttaacagaccgtgaacaacaagtattgattttacgttttggcttgaaagatggcaaaccacgtactcttgaagaagtaggccaacactttaacgtaactcgtgaacgtattcgtcaaatcgaaggtaaggcgttaacaaaattacgtaatcgtggtaaacgcgataaaattaaagatttcttataagaatgtcttaaccattagggttgctgtacatatacatgtatggcagcccttttgtgctataataaaagtaatataatacactaagtttttagatatataggggataacatgtatactgttagcaaacgtttagaggtgagtgcatctcatcaattacaattagattatccgagtaaatgtcagaatttgcacgggcacaattggattataaccgttcatgcgcgtagcgaagaattagatcataatggcatggtgattgattttacgatcattaaagaaaagattcatggccgtcttgatcataaacatatcaacgatgtattagggggtattaatcctactgcagaaaatatggcgaaatggattgccgatgaattaggcccaaaatgttttaaggtagaggttcaagagtcagaaggaaatgttgctatctatgaacgtgattgaactattttcctccattgatggagaagggaaacggcaaggctttttgactacctttttgcgcctccatgactgtaatattcgctgctcttattgcgatacattgtatagttatggtcccgaaagcacttttgaaagcatgagtgttcaggctgtagctgatgtgattgaacaattagaaaatcatcgcatcaccgttaccggtggagaaccgcttttacaggaaccggccattattgaacttattgatgagttaacaagacgtaatgcacgatatgattttaatatagaaacgaatggtacaatcatacccagctttcacagagataatgtatggtttacctatgactacaagacgccgtcatccttagcagaagatgccatgaacttagatatattcaaggtagctacacctgcggatatcattaaatttgtagttggttctatgcaagatttagaccgtatgaatgagattctaaaaacatatcctacgaatgcacaaattttcgtgtctcctgtatggggcaatattgaaggggctacgattattgagtatatgaaagcccacaattggcagaacgttagattccagctacaaattcataaatttatttgggaccctgatgcgaaaggagtataacatggacacaaaacgaattgaatctctagtgtatcaattactggaagcattgggagaaaatccagaccgtgaaggcctcgtagaaacaccaaaacgggtggcccaaatgatggaagaaatgtttgaaggcatccaatatacgaatgcagacattgcggatatgtttggtaaaacctttgacgtcgatacaaaccaaatggtaattgtaaaagatattacttgcttttcccattgtgaacatcacatggccttgatgtatgatatgaacattagtatcggctatattcctcgtggccgtgtcatcggcttgtccaaaatgccacgcattgcagaaatgtgttgcaaacgattacaactacaagaaaaaatcggtgaagacattgccgaagtcatctccattgccaccggcaccgacgacgttatcgtccacatcacaagctcccatagctgcgtcagcgcccgcggcgtaaaatccgccaatagcaaaaccaccaccctcgctaccaaaggcgtcttcgaacaagaagacatgatcaaccgattcctaacactaaaaaatgcatagacgaatgtatcctgtctgaacccggagtactgtctgagcccagggcactgtgaatactgaaaactcttaggtgctcagttgtcgtatagtaacaaaaagaagggttgtccaaccgactttgtctgtctaatcccggagccccgtagatactgaaaatttcttgcttacatagatgtcgaagtgtaacggaaatgtaccgtccacaaacgatttttcctgtttaatccgggattcccgtagatgctgtaaattcttaggtactcagttgtcgtatagtagcaaaaagaagggttgcgactttgcctgtccaaacccggggcaccgtagatgctgtaaattctttgctaacggaatgtaggatagagtagaacatgcagttcctctcaaacgacttatctcctgtttgggcccagggcactgtgaatactgaaaactctcaggtgctcagttgtcgtatagtaacaaaaagaagggttgtccaaacgactttgctaagtcgaggccctaggccgaagactgttaaggcggtggaggcttgggcaacccttctttttgtggccacgtagataacttgacgtacctaagaattttcagtataattttatacgcaagcttgggcctatagctcaggggtagagcaaccggctcataaccggtcggtccctggttcgatcccaggtgggcccaccaaacttgtataaattgaatcaatgaaacctgctccgattggagcaggttttttgttataatatagatatgaagaatagatagtatgaaggtcggtggacctgttagtatacgaggtagttatgaaagcaagacctatgatggatcgtttagaagcggtctttgatatcgttccccatgcagaagctattgcagatattggaacggatcatggttatttagctgttgaattaattgtgagaggcaaggccaaacgcgttatcgctggtgatgttcataagggccccttggaatcggccaagtcctatgttacatctcgagggcttagcaatgtgatcgactgccgccttggtgacggtttgcaagttactaaaaagggcgaattaaacggcgccatctgttgcggtatgggtgggtttttaatgcgcgatatcgttgagaacggtccagaaccgctggagttttatgtgttacaacctcagaatggccaggccgaattacgccaatatatggtggaaaaaggataccgtattgtcaaagaaattatcatgaaggatatggggaaaatgtacactgcatttgtagctcttcgttctgactgtatcgatacatatggtaacaatgctagctattcgattcattctgacgatgctctttatgatacattgccaaagacatctattctttggtctgtaggggctttattagccaaagagaaacctgcattgtggaatgaatatgtagattttttgatatatcaacgacaatgtgcgctggatggcatgacagtgaaacttttacatacggagaaatataaacaattacaacatgaaatagatgaattggccagcctgcgctaattatcggttaggagtgatacgatggtgttagcaaaacaaattatagaatcgatggaacaatgggcaccgcctcattatgctgagtcatgggataatgtaggccttatggtgggttcgaaacaacgcgatgtatccaaaatcattacgactctcgatattacacctgaggtcatagaatatgcgatagttgaacaggcccaaatgatcattagccatcatccatttatttttaaaggtttgaaatcattacatttagatagccctcaaggtaaattaatcgagaaactgataaaaaatgatattgttgtatatagtgcacatacgaacttagatattaccattggcgggctcaatgatatgttggcgaaccgattaggattgacgaatgtgagaggctttgttccgaccggttctgatatggtatataaaattaccacctttgtgccgaccgatactgccgatgcagtacgtgaagcaatggctagtgctggcgctggtcgtattggcaattacgaatcatgtagctttagttttgcaggcgaaggtcggtttagaggtaatgatgaatcccatccggtcattggtgaagctggaacattgacggttgtaccagaggtggccgttaatgtcatcgtagatggtgctcataaacaggctgttatcaatgctatgaaagaggctcacccttatgaagaggtggcatacgaagtatttacgttacatgaacctaatgtaggtcgtacgttgggtcgtatcggtgaattgcctgagactatggattttgaaagcttccgcgagcatctccaagaatctttgccacatgctaatcttagatttggaggcattaaaaaagattctattaaaacgatagccctttgctctggtgggggtgcagagtttatcaaaaatgcagttaaggctgatgcatatgtaacaggagatgtaaaataccatgatgcacagctagctaaagaactagatttactcgtcgtagatgcaggccattttggtacggaagagattgtggctgatggtatccgtgattatttacgagaccaatctgacaaaggtggctgggatattactgtacaatcctttgagaaccaagcagattttttctttgaataaaaatctattttaatagtaaatttcgatattcttgcatagtatatacagctatgataaactgaattgaagcaagtatgaaagacggttgcgagtcaattggactcgaggaaagtccgagctccatagggcaggatgccagataacgtctggcgagggtgaccttagggaaagtgccatagaaaaggaaaccgccacgtcagtggtaagggtggaaaggtgaggtaagagctcaccagcagtctggtaacaggctggctcggtaaaccccatccggagcaagaccgaatagggaagggttaacggtggtcccgcctaccttccgggttgtgtcgctcgagcgtgcaggcgactgtacgcctagaaagataatcgtcaccgcgtaagcggaacagaactcggcttaatgattgcttgcttcttatatagtttataatatgtaacacataaaggaggcctttcgatggctattactgctattacaagcgtagaacaatttgatgaattagtattaggttctaaagagctcgttattgtagatttttgggctggctggtgcgaaccttgcacagttatgcgtccagaagtagaagctgtagcagaaaaattggacggccgcgttaaattcttcagcgtagatgcagaagataaggctttgcgtcctattcttttaaaagaagatgtagaaggtattccttccatggcattctttaaagaaggcaaactattagatcgtcttgcaggttacaaaaaagctgctgtattagaatctttgatcaatgaagtgcttaaacaattctaattgatgagaacacctaactagataatagtagatattatctagctaggtgctttttttatcaatttttttgatatatatacataatgtcatagttttatgtaatttaaaatgatataatgagttaatcgagataatatatctctcaatagttatagttgattaggtaatatacacatattgctgcaaagttgttgtaaggaggctgtattccatgaaaaatcgtgtgaacagtttatggactctcttccaagagagacgtctcagtcgacgtacatttatgaaatcttgcgtggcgttgactgctattctagggttgccacctactatgcttgatacagttgtaaaagctgcagaaacaacagaattacctactgtaatctggcttcatggccacgaatgtaccggttgtagcgaatcctttattcgctcttcctcaccatttacatccgatgtgatcttgaatatgatttctttggaatatgatgatacattggctgcagcatctggagaacctttagaggaacaccttaaaaaaatcattgctgagaaaaatggcaaatatatcctcgctgttgaaggtggggttccattggatgaaaatggtatctactgtacagtaggtggccgtacatttaaggaatctttattagaagctgctaaaggcgctgctgcaattatcgagtatggttcttgtgcatcttggggcggtattcaagcggcaaaaccaaatccaacaaatacagtgtctgtatcctctgttgtatctggtaaacctattattaaagttcctggctgtcctccaattccagaggttatgactggtgtagttatgcactacgcattatttggtcaaattcctcctttggattctcaaggccgtcctaaacaattttatggcaatcgcattcacgatacttgctaccgccgtgcattctttgactccggtctattcgttgaagaatttgacgatgatgcatccaaagctggttggtgcttatataaagtaggttgtcgtggacctcaaacatataattcttgtggtaatttgcgttggtggaatggtttgtcctatccaattcaatccggtcacggttgtattggttgctctgaaaaaggcttctgggataacgatgtattctacaaacgattaccagatattccattggcaaacaccattactacagctgatacaatcggcacagtagctgctgttggtgctaccgctgcagttatcgtacatggtgctgcaactcttacgcgtaataaaattcttgatatgaaagaagaaaaacgcttgaaagaacaaggcttatgggatgaaaagaaacataataatggaggaggtcactaatgaaacgcgtagtagtagatccgatttcccgtattgaaggtcatttacgggtagaaataaaagttgatgaagcaagtggtaaggtagaggacgcattgtcctctggtactgcttggcgtggcatcgaacttgttgcaaaggaccgcgatcctcgtgacctttgggcatttgtgcaacgtatttgtggcgtatgtacaacaacacatgcattggcagcgttacgtgccgtagaggatgcacttggtatttccatccctaaaaatgcaaactacattcgtaatatcatgcatagctctttagatgtacatgaccatctcgtgcatttctatcatttacatgcacttgactgggttagcccagtagctgcacttagtgcggatccagctaaaactgcacaattacaaaatgacgtattagctacttataatgtaagtggtctagcgccagctgaaacagcatctaaagattctgcatatcctaaggaattccctaaagctacaactgcttactttacagctgtacaacaaaaggtaaagaaaattgtagaatctggccaattaggcattttctctgctcaatggtgggatcatcctgattaccaattattgccaccagaagttcatttgatggctgtatctcattacttgaatattctagaccgtcaacgtgacgtagttattcctcacgttgtattcggcggtaaaaaccctcatccacactatattgtaggtggtatgccatgtgctatttctatgaatgacatgaatgcacctatcaatacacagcgtcttgctgctgtagaacaatctattgcattggctaaggatttagtaagtaatttctacttgcctgatttattagctatcggcaaaatttacgttgaaaaaggcatggtcgatggtggtggccttgcgaaaaaacgcgttatgtcttatggcgattatcctgatgatgcgtatacaggtattgctgatggcgattaccataaaaaatgtatcgttcgctctaatggtgttgtagaaaactttgcattaggtgtagataaagctacatttatcccattagaaggtaaggattttatggatcctcaatacctcagtgaagaggttgatcactcttggttcgcatatccagatggcactagcacacttcatccactcgatggtgtgacagaccctaaatttacaggtcctaaatctggtacaaaagaaaaatgggaataccttgatgaagataaaaaatattcttggatcaagtccccaactttcaaaggcaaaacagcagaagtgggtccactagctaaatatatcgtcgtatatacaaaggtaaaacaaggcattatcactgatccaacttgggctgaatccatgatggttcgtcaaatcgatactgtatcccaagtattgggtgtgcctgctcatgtatggatgacgacaatggttggccgtaccgcatgtcgtggccttgatgcacaagtggcttctaatattagtcaatacttctttgataaactcgtagctaacatcaaaaatggtgatactactgttgcggatacatctaaatttgagccaaataaatggcctaaggatgctaaaggcgttggtcttgtagatgcacctcgcggcggtttgggtcactggattcatattaaagatggtcgttctgcaaactatcaatgtatcgtaccatctacatggaatgcatgtcctaagacagcagctaacgaacatggtgcatacgaagattctatgattgatacacatgttaagattgcggacaaacctcttgaaatcttgaaagttatccactcctttgacccatgtctcgcatgtgcaacccatttatacaataaaaaaggcgaaaaaattatttccgtcaatactgatgcattgtgtaaataaagggtggtgggcttatgttaatacatactgacaaaaaagcgtatgtcgtatttagtttatggctgcgcatattccactggacaatggtgctttccgtaacagctttattctggactggcctttatattggtgatccaggttttgcagctattacaggccatccggaaccaactttcgctattgatggctggttcgctatggagacgatgcgtcgtatccacttcattgcgggtgttattttgacattctcctttatattccgatttgctggtgcactttggaatcgcggagatagattgttgcctaaattccgtcaaaaacggtattggtatggccttcgcgaaacaacattacactatttgatgattccacaaaagcatgaacatcactggttacgtaactccttggcgagaacggcatatatgatggtgtacatcatgttcttctttgaaatcatcacaggtttttctatgtatgcgatgattgatcctaatggtattataggaactctttttgcaccgattattacgctatttggtggtgaatataaagttcatattatccatcactatattgcatggggcttcttattctttaccattattcatgtgtacatggcattccgagaagatgttatggaagaatctggcgaagtatccgctatggtttcaggcatgaaatattatgcccatgatcctatcgatattgaagaccttaacggtaaacgccgtcgtggtgaacgtatcgataaaccatctggtactacatatcgtccaagcaatcctgacgatccacgagaaaaggaattaaaagatgactaatataaccactgaagaacaatttggtggcatagaatacgcgggctctgagagcccgcgtattgatttacatgccatttatgatgattatgagaactctattgtcgttctaggggtaggtaatattttgcttactgatgagggccttggagttcatgttgtagaagatttaaaagccaattatactttcacccctcagataagcttgattgatgggggaacgatgggcatggaattattgacctatatgcggggcatgaagaaaatcctcttgattgacgccgttaacggtggcgaagtacctggcacaatctatgagttcccacatcgcgaattagaacagtattttacggaccatatttctgttcatgaagtaggcatgcaagatatattgcgcattcgtgccattcaagaaaatccattggaagatgctattgttataggtgttgaaccggagtccttagacgtaggatttgaacctagcgcgcctgtacaaaaggcattacctgaggtaaaagaacgcgttctacgtgttcttcgcgaatggggcatacaaatcgaacctaaataaactgatatgtttatagataaataagaatagattgataggatgagaaaggagggacactatgattgaaaattataataatgtacgtgccgttctaaatgagttgcgtcaagcactaaagcaattacgtgaaactggtgcaacctattccatatatattgagaagacaggccttgctgaagaagagcaagtagaggtgctagaaactttggggcgtggacatattacgattaccttcaatgaaacagatcaacctgtagaatggtatgaatctcaattttctggcatttgggttggtacctataaaaatggtcgtgatgactcaatcctacatacgatagaggtagctcgttatcctgaagtcgtaggtgcttttgatgaagatatggtgacagcagaagaagatcttacgacatggattgatgctgcggggctataaaacaaatagtttaatgcctatatatatgatatgcgtaaaagtgtataaatataacgttttaataaatgaatagctcattaataagtgtttgagataagactatgatatgaagagaatgaacctcaaaatcctgaaaagtagcatagctatgggaagtatgaggttcatcttctttattgtcaaccttttaaatttgcctatattgacgatttaacgctaaaatatagaagtaatcgacggaggatatatgttagtttcaattgttgtacctgtatataatgaagaagaaaatatagctattttttacaatgccgtaacaaaagttatgacaggtctaccttatgaatatgaacttatctatgtcgatgatggatctacggactcgtctgttgtcgttttgcgcgagattgcaaaactcgatacgcgagttaaggtcgtgttattggcacggaactttggtcatcagactgcgttgacatgtggtcttgattatgccaaaggtgatgcggtaatcaccatggatggtgatatgcaacatccgccggctttgattccagaactgatacgtttgtgggaggctggttacgatgtggtccgtaccatacgcgactctacggaggatgccagctgggcaaaatccttcacatctaaatattattataaactgatgaataaaatggcagatgttcccatcgtagaagggggatctgattttcgtttaatgaatcgtaagtcgctagaaactttgaaacatttccgtgaacacggacgtttcttgcgtggcatcgttggtgcacttggctatcgccaagcggaacttcactttgtagcgcctcctcgctttgcaggggtttcgaaattcagtgtgcgtaaaatgattcgctttgcccttgatggggttactgcgttttctcgcgtgccattgcgtgcggctttgtatgtaggtgtcctatgtggtggcttgagttttctcttaatactacatttgctctacgtgtacttaacgggtcaagcattaaacgggtggaccaccttgggcgtgtccgtattatttattggtggtatccaattagtcggacttggcattatcggtgaatacgtaggacgcgtattcgaagaggtaaaacaacgtccattatattgggtgaaagctgctataaattttgatggtgaaaatccagaaatagcttatgaaccatcaaaagctgatatatttatagccaatcaagtacctggccctgaagaagataaagactagctgtatttgttggatgcaaatagagagacggttagtatattttgaataagtaaactcactttgaagttttaggaaggaagaatatgaagtcaaaatatagtaagagtaaaattgcggcattaacattaacatttgtatgtgctaccactgcgatggcaagcgctacaacattacaatatggtgataaaggtagaaacgtaatcgctgtacaacaacaattaattaaacacggttacaatgcaaccgataaaaatggtgtgtatggtaaggaaacaaaatgggctgtacgcctattccaacaagatcgtggtttacctgtagatggtattattggaccagcaacgtacaatgcattgatgggtgctcctcgtacaacaaaagcagtattatccaataatgcagctacaaaagcggtggcaacaaaatctgctttcacaaatcaaaatgctcaatctagacgtcttgcaggccaaaacgttaagttgaataatttgaaaaaggtacaaacgccaaacaatattcatgctattttggcagaagccgataaataccgcggtgttccgtatgtatttggcggtactacaccaagtggttttgactgctctggttatgttaaatatgtatttgcaaaacaaggtattgcgctgcctcgtttagcggatgaacaatacaatgtaggtgttgaagtttctcgtgcgaaccttaaagctggtgatttggtattcttcgaaacctatgaaccaggtccatctcattccggtatttacattggcaatggtaaatttatcagtgctacatctagccgtggcgtagccgtagcagaccttgatactggttattggggcgaacgctatattggcgcgaaacgcgttatataatatatggtttctccatgtagaaccattggtgaactatatatgagccataaaaaggggctatacgaatcaattatgttctgttgatttgtataacctcttttttgtatctctttttatggcaactagatggcatagagaatactaatgaaggttaattatatccggatatatataggttataatagattttctatggtttttacgttataattaagagtaaattattttaggaggaatatacacatgaaaggtaatgaactgcgtcaagcatacttgcagttttttgaaagcaaaggacatttaaaattagatagtttttctcttataccagaaaacgatccgtctctattattgatcggggcaggtatggcgccattaaagcctttctttacaggtaaattggtacctccttgtcatcgtattacgacaagccaaaaatgtatgcgtactggtgaccttgaaaacgtaggccgcacagcacgtcaccatacattctttgaaatgcttggtaacttctcctttggagattactttaaaaaagatgctattcattgggcatgggaattcctaacagaagttattaaactcgacaaaaatagattatatgtcactgtatatccagatgaccaagaagcatatgatacatggcacaacgattgtggcgtagaagaaagccacattacacgccttgaagataacttctgggaaatcggtgaaggtccatgtggtccagatagtgaaatcttcttcgaccaaggccctgaacatggttgtgatgatcctaactgtgcacctggttgtgactgtgaccgttaccttgaaatttggaacctcgtgttcactcaattcaataaaatgccagacggttcctatgagccattgcaacataaaaacatcgatactggcgccggtcttgaacgattggcttctgtattgcaacattgcaaaacaaactttgaaacagatttgattttcccaatcatcgaagcaactgcaaaacgggctggtgtaaaatacaacgaagattcaaatacagatgtgtctttgaaagttatcgctgaccatgcacgtgctgtaactgcgttgatttccgatggtgtattaccatccaatgaaggccgcggttacgtattgcgtcgtatcttgcgccgtgccgtacgtcatggccgtttgcttggtatcgaaggtttattcttaacaccgcttatcgatgtagttgtagatattcttggccctggtatcaaatccattgctgaaaaacaagacttcgttaaacgtgtcgttcaaaacgaagaagaacgtttcaaccaaacattggaacaaggtcttgagttattgaattccttaatcgatacattggctgctgaaaaagcaactgtagttcctggtacagaagtattcaaactatatgatacatatggattcccttgggaattaacagaagaaatcgcatccgaacgcggtttcacaatcgaccatgaaggctttgacgttgccatgaaagaacaacgtgaacgcgctcgtgaagctcgcgtaaaagaagatgcaaaggtagctacaccagatattacattcttaaaagacgaagaacttgtagaaaatgaagcggaaacggcatcctctgtattgatgcttggtaaaggctctgaacgcttgcaaaccgctgttgatggcgatgaaatcactgttattgtgcgcactacaccattccatgctgaagggggcggtcaattaggtgatactggctttatcgttggtccaatgggcaaggtagaggttcataatacaaaacgcttaccagaaggtactgtataccacatcggtactgttgtagaaggttccatctccgaaggtgatgatgtaacgcttgaagtagatacagctcgtcgtgcagcgatggctcgtaatcatacagcaactcacttgttgcatgctgcattaaaacgcgtgcttggcgaacatgttaaccaagcaggttctttggtaacaccagattacttgcgtttcgacttcactcatttctctcctgtaacacaagaggaacttgatcaaatcgaagcccttgtaaatgaagaaatccttaaggctacagatcttgctattgctgaaatgtctatggacgaagcaaaagcaaaaggtgctatggcactctttggtgataaatatggcgacgtagttcgcgtagtagaggttcctggcttctccgttgaattgtgcggcggttctcatgtaggcaatacagctttcatcagttccttccgtttaacatctgaatccggtatcggttctggtgtacgtcgtatcgaagcgattacaggtcgtgccgctctcgatgcagcaaaacatgatcgtttgactatcgaacgcattgctggtgaattaaaaactaaacctgctcaagtggaagaacgtttgcaccaagtattggcagaggctaaagaaacagctaaagaattagaccaaattcgcaaagaggtttctgctgcaggtgctgctgatatcgtagctggtaaggttatgattggtgatgtagcatttgttgctgcgtctgtgaaagcatcctctattgatgaattgcgtgatttcgctgatatgggccttgataaattagatggttctggcgtagtactcgtaggtgccgctatgggcgatgacaaggtaaactttgtatgtaaagtttccaaagatgttgtcggtaaaggcgtaaaagctggtaatatcgttaaagcagcagctcaagtagctggtggtaatggcggtggtcgtccagacatggcgcaagcaggcggtaaagaaccagctaaattgatggatgcattaaaagcagctggcgaagctgttaaagaagctcttaacgcataatacattctataggtatatcttgcatatgctataatagaaacatacaatacatatatgtgggccacgtacgtggcccattcatacaaaggagggatacccatgaaggtttcagatgaaactatgttattccgtaaagtagacgatgaaccgatgactgccgaagaggtattgactcgcgtttataaatctattcaagaaaaaggatataatcctatcaatcaaatcttaggttatcttatctctggggatccagcgtacattacaagctataataatgcacgtagtgatattcgccgtttagaacgtgatgatttaatcgaagaattattaaaagaatacgcaaaggctaaacaactataatgagaattatggcattagacgtaggtagtcgcaccattggcatcgcatgtagtgatgcgctattgatgactgctcaaggtatagaaacgattcgtcgtacatccttagaaaatgactttaaccgattgcgtgaattgatttcagaatacgaagtgcatgaactcgtagtgggcatgccgaagaatatgaacggcaccaagggtgagcgcgctgaaaaaacggaagaatttgtcgaaaaaatgaaggctgtcatcgaattgcctgttacattttgggatgaacgtttatctaccgttatggccgaacgtcaactcatcgcagctgatgtgagtcgtaaaaaacgaaagggcgtcatcgataaaatggctgctgtcgttattttacaaggctatttagacagactacaatttagtaaatcttaattcgcatagatatctactgcgaatatcatacaggttcttatatacataataaaggagggaatacccatggttgatcaaaattacgaaggtgaaattttctatctcgaatttgaagatgaagatggtaacaaacaatattttacagaagatgtaatcttgaatcatgaaggtcaagaatacgctgtacttgttcatgtacaagatgaagaacatgaaggtcaagatgatacatatatgattttggctcgcatcgaaacaaacgatgaaggcgaagaggaatatgttccattagatgaagatgatgaaaacttcgaagtattggtaaatatgtacgaagcaatgggtgaagaagagtaatttctaagccctcaaagactctagtataacggttgttatactagggtcttttttgtaattgtaatctcttgtgtactaattgactcatggttatttggtatgatagataatataaaagaagagatacatcgaaagcctttaatatggtataataagatgatatacaatggtttgtaatagaaaggaactcatccatgagaaaggccttaaaatatgtttccgtaggtgttcttagccttgctattttaggtggcggtgctttaggtgcatcctattttgtaccaaatacctttaacgatgacggaggatctcaagtcctcgtaataggcaaggatgcaacaggaacagaaattgccgatatgctctatgaacatggactaattcggtctacacaggtatttaaattatggttagctcttagtggaaccggttcaaaactacaatctggtcactaccaaattccaaataaggtatcggtccatgaattaattaacttattacaagagggtcacgttgagtccattaaattaacgattcctgaaggatataccgtaggggatatcgccattgctcttgaaaaagctcaaattatgaaagcttccgatttcttggcagaggcgaaaacattcgtcccatacccatatatgaagggtactaaaccgactacatatcctgtagaaggtttccttttcccaagcacttatgaagtgccagttggggctacgccaaaggatgtcattttgatgatgtctgagcaaatgaatcgctatttaacaccagctgttaaaaaacaaattcaagcacaacacatgagtattcatgactttgtaaccttagcatccatcgttgaacgtgaatcattatatgatgcggatcgcccaactattgcgggtgtatttaagaaacgcttagcacatggtattccattgcaatctgatgcaactatttcttatgttcttggttatgcaaaggaaaatgtaacgcttggagatacgcagttacaaagtccttacaatacatatgtaagtaaaggtttgccaccaggaccgattgcaaacccaggtaaaaaggcattagatgcggtacttcattctgaagatacagattatctatactttgtagcagataaagatggtcataatcatttctccaaaacatatgctgagcatttggctgaggttgaaaaaatttatggtgctgaacaagcgagtgcaggctcttctaatcaaggtcaggctcctgcattggcacaagctggtcctaactatgacgtagcggctacatcagaaccagattacaactacagctctgctgaggctgtagcggcagattctcaatatgtagatgtagaaccaacatatacatatacaccgacaactgtaccggcagcaactcaagtaacgccagcgccagcagcaccggcagcaagtgaacaaccggctacaacatcatcgcctagccaaataccggaaagtatgcaacaagtagttccacagcaatcagcaccggttcaatcggcacctgcagtggaagaacctcgtgttattcgacctagcacacaaactacaccttcttctggtaatactcgcggcggcgttgatagataattagcgtatatgattactttcacagtcaaataaatagtaggaatttataatacattttatggaattaaatgagatattaaatgagcagcgtatttacgcgatgattaataatgtacccatccttcgggaatctgaggtgcatttatttgaagaattgattggattatatcggcccacctctgtgttggaggtgggcaccgccattggttactctacattactgatggcacctcttattgaacgaggcgggaaaattacatctattgaattggatgaggttcgccatgagatggcgaaatattatataggtcaatccgagtataaggatcaaatcacgttgattaaaggtgatgcgaaggacgtattaacgcaaatcaaaggtgaatatgatcttgtatttctcgatggcccaaagggacaatatcttaatcagctagaggtcatattacctcatgtgaaagaaggtggcgtcatccttgccgataatgttctctttagaggctatgtgcgtggcgacaaagaggcaccgcatcgattcaaaactattgttaagcgattacaagcgtatttagcatatgtagaaaataaagaattatttaacaccaccatttacccgatgggagatggcatgagtgtgagcgtgtggaaaggacacaacaaataatggcagatcattttatggaattgctttgtccagcaggtaatatggacaaattaaaaatggccattcgctatggtgcggatgccgtttattgtgcaggtaaacgatttggtttacgtgctggtaactccaatttttccgacgaagaattgaaggaagccgttcaatttgtacatgaacatggtaaaaaaatccacgttacatgcaatattattcctcataacgaggactttgaaggtcttgaggactatttgaaatttcttgaaagtatcggtgtcgatgcgattatcgttgctgatatgggcatctttagcttggctaaacgcgtagcaccaggccttgaacttcatgtaagtacacaagcatccacgacgaactggcatactgtgcaaatgtggaaggaacttggtgcggctcgcgttgtagcagctcgcgaagtatctgtagcggatcttaaggaaatgaaggaacatgtagatatcgaaatcgagtccttcgtacatggttctatgtgtatttcctattctggccgttgcctcttgtctaactacatgaccggtacacgcgatgctaaccgcggtcaatgctctcaatcttgccgttggaaatacagcattgtagaatccaatcgccctggcgaatattatccaatcgaagaagatgaacatggtacatacatctttaactccaaggatttatgcctcattcatcgcattccagaattgtatgaagcaggcatcgatagccttaaaattgaaggtcgcatgaaatccgttcactattgtgcaacggtagctaaggtataccgtacagctatcgatacctatttgaaggaacgtgaaaactggtatgttcgtcctgaatggattgctgaattagaaaaaatttcccaccgcccttacacagatggctttgctgatggccgtcctgatgaaagtgctcaaaactacggcaaatctacgaatactcaatcccatgacttcatcggtttagtgcttggctataacgatgaagaaaaatatgtggatcttgaacaacgcaataatttcaaggtaggggataaggtagaattttgccaacctaagggtgaacttgtagaggctgttatcgaaaaaatgacagacgaagatggtaatcctatcgatgtagcacctcatgcgcaaatgaaggttcgtttgtatatggatacaaaattggaaccatattccatgatgcgccgcgagtgcaaggtgaaagcagagtaacatggtacatgaaaatactgctactatgtcaatgcttgatgaaatgacacctgatgaagtgacacctgatgagacgataccgttacgcgataatcaagaaccattgatgccgtcccgttcattgtctggctttcctgaaccgccttcgtatagcggcacaggtgaggaaggctatttgtactttcacatagatccaaaacataccaattatgtcaatcgcatcttagaaggctatgaatacgtaggtgttatgactagcctagacaagtcggggcgctgcatggtgcggtgtacaccggatacgcgcagtctagccagcgaaatcctatcgcgcttgccagaggttaccttagaaatatagttcaataacatcgattagagaattatccaaatttaggagaataataatgaaatgtaatgtattaaaacgcgcattagtcttaacagcacttggtgcctctatggcaaccgctgcttttgcagcgccaaatggtcctgtcatgattccacaaccaggtacggttgttgtgattaatcataatccagatgtaacatttgctggcaatattaactttgatgttgaaagccaagaaaacaataatttgaaaattggttctactgttgtgccgaatgtattatatggtgccgtattcaacaagtccggtgctcctgatacaattgtgccagcacaaacctatgtatttacaggtgctaaagaagtgcctgctgcgttgacatctcctagcgatgaaggtaaaccaggtgcaacttggtctgtggaaacaattaagaaaactaaatctggcgatattcaagtggctagccgtggtgtacctgaaaaaccattgggcgtacaaatggaaatcattaaagatactttcacaatgggcgctatcgacaatagtaaaaccgtacaaggccaaaacagcaagggtacattgtacatgaccgtgcctaaggatttaaaactcaatcctagtaacgacattcctgcagacgtgcgtgaaacaatgccagctatgcttcgtggccgcatgggcgaatccatgatggttaacctattgccactaaatgatgaagaaaaacaacaacttcgcaataacccgcacaatgcgaatgctatcgtattcaatcgtgctatgggtatggcgagcagcatcggcaactccgctaaacaaagcaaagtatatacatacatgaaagaccattacctcaacataattattgttgcaaaagattacgacgataatggtgctcgtggtagcggcgtcttgatggtatctaaacaagacaactccgatgacgtaatgttgatcctattcaagggcccagacattacaaactctaaaattgaaaaagtaattggatccatgctatctgcgcactttgaacgtaaatagataattcttggaaatactacaggcctgtactaatttttagagagatgtgtatgcgcatctttagaaatagaacaggcctgtactaatttttagagagatgtgtatgcgtatctttagaaatagaacaggcctgtactaattttaggaagatgtgtatgcgtatctttagaaatagaacaggcctgtactaattttgggaagatgtgtatgcgtatctttagaaatagaacaggcctgtactaatttttagagagatgtgtatgcgtgcctttaggaatagaacaggcctgtagtaatttttagagagatgtgtatgcgtatctttagaaatagaacaggcctgtactaattttgagaagatgtgtatgcgtatctttagaaatagaacaggcctgtactaattttaggaagatgtgtatgcgtgcctctagaaatagaacaggcctgtactaatttgagagacatgttaatagagtatatttagaaatagaacaggcctgttctatttttgtacgccgaataggcatgactaaacccccagttaaactgggggtcggtaaaaaattcttagagaaaaggaaagaacctcctagtggtaaaatgaagttggtctggcaaccacaacatttcaacataggaggttcaatgtcaatgaatgacgtaaaaagcttatcacatagtaaatggagatgtaaatatcatattgtttttgcaccaaagtatagaaggcaaataatttatggacggataaaagctgatgtaggtaaaattttaagagatttatgtaatagaaaaaatgtagagattatagaggcagaatgctgtccggatcatattcatatgttagtaactattccaccacatttaagtgtatcaagttttatgggatatttaaaaagcaaaagtagcctcatgatattcgataaacacgcaaatttaaaatataagtatggaaatagacatttctggtgtagaggatattatgtggatacagtgggaagatacgaaggagcgataaaagagtatattcgcaatcaattacaagaagatatagcacaagatacattaaactttaaagaatataccgacccgtttacgggtgagccggtaaaataggcaaaataaaagcccccgagtagggggcagccagtggtaatagagtggttgtcagatcattcaaagccctctttagagggccaccactagagaaagacccttatagggtcagagcaaaccacccgttcaacgggtggttatgatttaggaggtacttatatagttgaaattttttagtacctatgataagatatcttagtaaaagtgatgcaaaggacatgattctcatatccctgtgtaccagagagaggcagatgctggaaatgccttacacatatatttgagttaccccctttaaactgatttgtcgaacctaagtaggcaaatacggccgccaccgttatcgggcttaatgaagtgaatgaactgtatccttgtgatgcggtgaattaactagggtggaaccgcgaatgatcttcgtcccttgttttgtagggatagggggtctttttttattacaaaaatccagtctatcctagataataaattggaggaaattaaaatggcagatgtaaaaatcattttacctgatggtagtgcaaaggaatacgctgctggcactactcttggggaagcagtaaaacaactatctaacagcttggctaaaaaagtactagctgctaacgtaaacggtgaattaacagaccttcgtgaagaacttgtagatggttctgaagtagctttcttaacatttgaagaagatggcggtaaacatactttacgtcacacagcttctcatgttatggcacaagcagttaaacgcttatggccagaagcaaaattggctatcggtcctgctatcgataaaggtttctactatgatatcgatatggaacatactttgactcctgaagatttgactaaaatcgaaaaggaaatgagccgtattgtgaaagaaaacttgcctattactaaatctgtaatgtctcgtcaagaagctatcgagttcttcaaatctaaaaacgaagattacaaggtagaattgatcgaagaccttcctgaagatgctgtgatttcttgctatgcacaaggcgattttgttgacctttgtgcaggccctcacgttgcatctactggtaaggtgaaagctttcaaattacaaagcattgcaggtgcatactggcgtggcgatgaaaagaacaaaatgttgcaacgtatctacggtacagcatttgaaaagaaagaagaactagatgcataccttcacatgcttgaagaagcggctaaacgcgaccaccgtaaacttggtaaagaacttggtttgttcgtaatcaaagaagaaggtcctggcttcccattcttcttgccaaaaggcatggctcttcgcaacgaattggaaaacttctggcgcgaagtacatcatgatttcgaatatgatgaaatccgtacaccaatcatcttgaataaacatttgtgggaaacatctggtcactgggatcattaccgtgaaaatatgtatactacaatcattgatgacgaagaatatgcaattaaacctatgaactgcccaggcggtatcttagtttaccaaaacgaaatgcattcctaccgtgacttgccacttcgttatgcagaacttggcctagttcaccgtcatgaattatctggcgcattacacggcttgttccgcgttcgtgctttcacacaagacgatgcgcacgtatttatgttgcctgaacaaatgcaatccgaattgatgaaagttatcgaattgttcgatcgtatctatagccaattcggtttgaaataccatgttgaattgtctactaaaccagacaatgcaatgggtgatgatgcaatttgggaagcagctacagaagcattgcgtaacgctatcgaagcaaaaggcattgattatgttatcaaccctggcgatggcgcgttctatggtcctaaactcgattaccatatcgaagattccttgggccgtacatggcaatgtggtactatccaattggatatgaacttgcctgaacgcttcaacgtagaatatatcggtgaagatggtcaaaaacatcgtactatcatgattcaccgtgcatgctttggctctatggaacgtttcatcggtatcttgactgaacactatgctggtgcattcccaacttggatggcgcctgttcaagtgaaagtattgcctatctccgaaaaacacgtggaatacgctaaccaattggcaaaacaaatgcgccatgactacgttcgcgtagaagtagacgatcgcaacgaaaaaattggttacaaaattcgccaagcacaaatggaaaaagttccttacatgctcgttgttggcgataaagaaatggaagaaaattccgttaacgtacgtaaacacggcggcgacgaattgggtacagttccattcgacgaattcttcaattccattaaaattgaaattaaagaacgcaactaattatataattgttgatatatctgattatttatctatcattttttgatggatttaacgatatttggtcaataataatttagtataaaaaatcctcttatatactggacagttatctttagattttataatctaatagtagcagttcatatataaggggatttttcttttattatggtagcgggagaaattataatgaacatcttattatgattaggtggtgaccttgtgtggagaagtcaagtttagcttcaattttgcaacgtaaaaagaataaaaatcttacgctcgctcatcgtcaattatgggggatgattgacttggtttataaagatttctatgataaagaatctaaaatctatgatgctggcaatgtaacacgtgaagaattttctattattaaacatgtatataaaactaggcatgtagtaaattatacggaaatcaaagccttgttaaataacaaacaccttagtcatgtggggtgggttataaaaaatcttgagaaaaaaggtttagttaccactgtaaaacattggagcgaccaacgatctcgggatgttatgctaacaaagaaaggaattcgtacctatgaacgcatatcatcaacgcataataaggtaatgggggccttgttttctcaaatacctaaagaacaacgagaacaaacaacaagactattaattcatatacataatagaatggcaaagaaacctatagctaactttattgattcggattatatccaataaaaataaatagaacaggcctgtactaatttgggaaaggtgtgaatgtgcatctttagaaatagaacaggcctgttctaattttaggaaggtgtgaatgtgcgcctctaaaaatagaacaggcctgtactaatttggggaaggtgtgtatatgcgtctctagaaaaagaacaggcctgttctgttcttaggaaggtgtattaacggtcccaagaaatgatacaggcctgtagtattttaggcaatccctatccagtgccagtatgtaagtgcaaatacgagcatcattacatagccgatgatggtcaaaggaatacctgttgtcataaatgtttttacgtcgaatgtgtctgtaccgtaagccaccataccttgtggtgagtttactggtagtactagaccaaagcagatggcgtattgcatgatcatggttacgccaattggattgagtccttctgcattatgacctacaacgatggagatgacgattggtatcatcgctgatgaaagggcggtagcagaggcaaatcctagatggattacgatgaggaatgcagccatgatggcaatcaacaagaacaccgtagcggattctaaagagaatgcgttaacgaatacttgagcgagccatgtggctgcttttgttttaagtaaaactgtaccgagaccgataccagcaccaaacataacgatggaaccccagtcgatgtttggttgtgcgaatttccaatccataataccaattttagggaagaagaatatggcaatcgctatgattgtagtagttgtagtatcgatggaatgtaatttaccacctgtagcccacaatgcgagtaaaccgatggagatgcataagagtttcttttcatcggtgctcataggaccgatttctttacgcatcttagcgagttgaacatcgccgccaacgagttctttgaactctggtttaattaatgcttgtgttaagaagtaggcaataattaccatgatgatggaaaatggagcggcggcagtgagccagtcaatccagctaacagatgtattcatctgtgtttgcataaatcctacggctacaaggttttgggcggccgccgtttgaatcatgatgttccagaatgtatcagcctgtacagcgcccaccatgagaagggccgcaacgcggcttttacgttcaatacctaagttttcaacaataccgatgataatcggagcgaggcaagcaatacgggctgttgcacttggtacaaagaaggctaggatgaggcccgtaataataacgcctaggtaaatgcgacttaccttggtgccgacgctagataaaacgagcatggcgatgcgtcggtcgaggcccgttttacgcatggccaccgagataaacatggctgcaccaacgaggatcatagcaggtgatgaaaaaccagaaatgatgagctttaatgcgttagcggtgcccatcattttagcaggggcctcaggatttggggagaaaccgagtaataaggccgtaagagctgtgatcatggtcgcactgaccggataggatacggccgatgtcatccataagatgatggcaaaggcgaggacaccaatcatgcgatggccaccagtggataatgtttcaggcgttggtaataataaaatgacgcctaaaacaataaatgcgagaataagtccgatattttgtgctgtcgtacgacccttgggaggagccgcagtatgctgtgttgtgttagtactacttactgtactcataataaacactcctttctgtagctattattatacagtatttcataaataaatatgtgataatatataagaatatataagaatattgtatacatactggggtatccttatgatacaaaagagagatatataatacttacgaaggaatctttatggggccaaaattgggccaaacgcgatgtatgtacctatacgaaattcacaaactttgttatactataggagttgtaataataaatatataggaaagtacaagattagtgttgactttcaccagtcaatttgttattataattaagtaatttatgaagcagaggccatccgccactcacctaataccatgaagtatgaggttacatatagagaactctatttggatggtgtatgccatccgtttttttattctcttggaggtgaaagctattagcaaggatacaccacgcattaatgaagagattcgtgctcgtgaacttcgtgtcgtaggtcctgaaaacgaacaaatcggcattatgtctggccgtgaggcgttggcattggctgaggaaaagcatcttgatcttgtggaaattgcacctaacgctaaaccaccagtagctcgcattatgaactacggtaaatatcgttatgaacaacaaaaacgcgagaaagaagcgaagaagaaacaaaaaatcgtaactttaaaagaagttaagttacgtccacatattgaagaccatgacttttatgtaaaaatgaaaaacgcatccaaattcttgggtgaaggtaataaagtaaaagtaaccatcatgttccgcggtcgtgaactttctcaccctgaacttggcatggcagtgttgacacgtttcgctgaagaactcaaagaaacggcgtctattgaaaaagcagctaaattagaaggtcgtaatatgaccatgattttagtaagtaaataggatattgggaggattataattatgccaaaaattaaaactcgtcgcgcagcggctaaacgtttcgcagtaactggtactggtgaattcaagcgtgcaaaagctttcaaaagccacattcttgagaaaaaatctccagctcgtaaacgtaatttacgtaaagctacattggttgctaaatctgactacaaacgcgtagttaaatgcttaccatacgcttaatcgctaactattagattgatatatcgtaatttaggaggaatatacaatggcaagagtgaaaaagggcgttacagctcatgcacgtcataaaaagattttgaaattagctaaaggttaccgcggtactcgttctcgtttgttcaaaaaagctaacgaaacagtaatgaaagcgttgtactacgctcgtcgtgaccgtcgtgcgaaaaaacgcgaattccgtcaattgtggattgctcgtatcaacgcagcagctcgcatcaatggcacaacttacagccgtttcatcgctggtttgactaaagcaggcgttgaagttaaccgtaaaatgttggctgacttggcagttaacgatgcagcagcattcgctaaacttgttgaagtagctaaaaacgcttaatagcataccataacaaattaaggactctctttggagggtccttttttgtatggtgaaagcctcctctagtacgatggtacagaaacaataaaaaggagatttactagttcatggcgaaatactcagtatagatatttcgttaacaaatctcagatagaggagggattagtatgaacgtattaaagaaagctttagttttaggggccgtaggtgctatgttagctgtaccaggttatgcaaaagttgtaactggtagccaatcagatgccaatttagatttaaaatatcctttggtatatactgattctgcttatgctcaacaagcgattaatacagatattgcaaactatgtgctagaagcaaaggatatgtattacaaccaacatatttataaggtggctcaaaattataaggtaacctatgaagatagccaagttgtttccattctattgacgacctatcattactatgccggtgccgttcatggtatgactaataccagaggacttgtatataataaaataacaggtcaacgtgttcctctatacaattatgtaaaaatcgctaatgcagaacagctggacagaggattacgatcttatgtattagattactacacaggttcccatacaaagagccgtattcctcaaggctggagtgtaaaatatgtaactgataactactgcctacgcggtaaggggaacatcgatctagtttaccaaccatatgaattaggaccttattctaatggcactacctatattggatttacaccgcaatctattgaatactttaaccgcatgaactcgtaataaaggtggcgttatattgtttgttttcggactgatgattcccctaggactgttgttactcgtactgagcattaagcatactgtgaaagtgtatacggtaacggccatacatgatatgccttatagaacagacaaagggatatttactatacaaacagctggtcgctatggtatatggcttaatggtaatcggtttaaaaaagctccgttagggctgtttggactacagcttattaactgtgaaacggaaaaggaagtcccattaagagctaacttgatacccgttagtgtaactaaagtaatcgacgtacgactcgagctctatacattttatgctaatccggggacgtaccagctattatttaacgataagcctagtcggatagcaaagatatttggtacgattcgtcgatacctaattagtagtgatgataattatagtacgtattctattagagtctatccacattattctatggtccatttattccttagtatatggggatttatatttggcgttatggccgtgatgtgggggatagcgggactagttatacgttgataaatttaagataatttgaattttgtatttttgctatataacgtaaagtatgttatattataaatataaagagagccatcaacgtgtagctagcgttaggcccatctacaaaattgcaaatttagaatgcgcctaacgtgtaagcactgcgaatgcttttatacgttaggcgtttttcttactctattttaaaataaaagtaagaatggatactgctagagacaatatagcaatgatgagcattactttttcataattgttcatagcatcaccacctttcggtgatgagcctaactcacgttgatgactctagattcagtataaataagtgtcgacaatttgtcgacacttatttaatcttgtttatgttaatgttctatagagttatgtatacttatagatgataaaagcctatagcacaaaaatcgtactataggcttctgtcatgtttaatatattatcttctatatccgccacatcctctagtattagaatttggaccgcaatagttttggttgttattgttacatggtgcatagttagcattgttattgcagttgtattgtgtgttagtattgcaattgtactgagaattattgcatacataatcataagcaaatcctgtggacactacagcagtcacggctaaagcagtcataatgagtatacgtttagtaaatttcatagtaatcacctcctagtttttatacttatattatactactataagtcaaacgaaatatgatattctatacatatatattatttgagagaatttatttgaaaggacgagtttgtatgatgaaacgtatattgatggctacgctctgtttaggttgtgttacattgggtggtcatgcaattgatattaatatacctggcgcagatccaactgtatcaaaggatgcgtatcagaattatcgcaagactgatgcggatgcgcaacagatggaacgggatgttgaaaaggatataaaaacatatatgcccaaacaagtggtaggtaatggcgaatttgatttaaatgatatcatttattcaaatcgtgagttgaaccatgcattggactattcttcatccgtatttattttgaaagaggatggagccaatgtaaaattcaccatgccttactcgagtcgatatgggaatactgagaagattgcagatggtacacctgctttcagaaatgcaatgattatgagccccgacggcatgatggcttatgaattgcgtcatcaaccagcaggcaataattgggaggatagtaagattccttatagcaaattgactgttgatgatatgaaagctatcgcagagaaaacagctggcgtatttcgtggtgatgaccattcattatatgctggtaaatttacgtatcctacggttgaaaaagcgacatgggatgtcacgtatgctaaggatgcaccaatggtggggagccttaattttacgatgaagaatacaccgatgatttcgtatcatgtgggttataattttatgcctagaaaacagtttagcgtgttaaaagcacaaggcgttgataaggctaaagacataataatgtccccgttggttaactatgtattaccatccattgaaccagcgaaggatatactttcaaaaagtaaatcattaagaattaatgattttacattcttaacgctaaaaacaagtaaaatgatacgggaagataagaatgattcgtacatgtatgtatacgatagcgatcagtatagagaaggtatcatggttatgccagttgaggctgaagatatacaacatccagagaagattttcccaaaagccgtacgcagtattatcctaaatgacaagtattcgatgcaccaaccaatccaatttgctaccgtatggaatgatgctatgtcatccgtatatatgcaaattaagcgtcctaaaacaacgatttatatgttaatatctcatgataagcaatacgtatacaatcactttattatgatctataatactagttctttggtcgaaaaagatttgcgagatattgtgcaatatgtagacactaataacaataaggattattataacacattccaaagtggacttggggctaagatgccaaaagatatggcgacggttgatattaagaatacgaaataatagataatgtaaggaatttaaaaataccttgtgaagtgactctcaccataggttagattttttcatgtaactataggctctctattgtgaggtatataccttgtgatagagggctttttgtgtgtgatgaaagttaaaaaagatttctatttttctagaaaatatctttatttcttatgctaaaaggcgtatactatagataataacatagaacatatatttgtgtttaaagagaggaggaagatgtatgagtgatgatgtaaagatatttgaaggtagtcaaattcgttctgtgtgggataatgaaagggaagagtggtattttagtgtagttgatgtgataggttctctgactgaaagcaataatccgcgtgactattggtatcgtgtgaaaaaacgtatgtcagaagaagaacgaagtgagttgtcgacattttgtcgacaactgaaacttaagtcgacagatggtaagtcatataagactgatgtagctgatatgcaaggtattttccgtatcatacaatctgttccatcacctaaggcagaaccttttaaaatgtggttagcagaggttggtaaagaacgtattgatgaaatcattgatccggaactcacgattgatagggctttagaatcatatgcgcgtaagggctatagccgagaatggattaatcaacgattacaggccattcaggttcgtaaagaattaaccgatacttggcaagatcatggtgttaaagctggtaatgaatatgctatcctaacgaatgaaatctctaaagcttggtctggaatgacgactagagaatataaggactttaagggtctaaaaaaagaaaatctacgagataatatgtctactacagaacttatcttaaatatgttagccgaaacggctacaaaggatattgcggaggcaactaatcctcaaggattagacgagaataaacaagttgctcaagatggtggttctattgctggtgatgcacgtaaatcgattgaagctagaactggtaaacctgttattacatctaaaaatgctatagacttggggcgactaattagtgatgtggtgaaacatgatagatgaacgacttgaacgaatgaaacgaaaacgtaattgtagagtgcattttgatgcagattcttttcagatatctgattgtactgtagcgccagtacacgatatacctgatgtaatatatgaaaatcaggagtttgatttttatattgagtctacctatgatgtgtatctgcttcgcattatacatagtcctgattgtattgttagtatttatccggcaaatgctgatggaatcatatatatcgtaagctctatacctgtatctaaaaataatattaaagagactattcaaaagattttacatgcgttggagaaatatagttttccgaaattgaagaatcctaaaagtattattacatttaatatatagtgatgaaatagatcgtaaagaaaataataccacatcatatagagcattttgggttctgaatgatgtggtattttatttgtataatattatatattatggtgtattataaatgactgactgattaggcgtgtattaataagtttatagctagttattttaatggatattattaggataaaaattatgttattatgaaagaaacatgtaatctatttataggggaatgcatatgataactggtgaaattaaaaataaagtagataagatatgggaaaatgtctgggctgcaggcttaactaatcctttatctgtaattgagcaaattacatatttaatgtttatacgtgcattagatgatcaagaaattaataatatacggaataagactttacttggtgcagatgtggaattgatttttcctgaatcggatattggccaagctatgcgttggagtaattttaaattcagaaatgctgatgaaatctataatattgtttctaattttgtattcccagctattaaggctatgaagcatgggaaattgccagattttgatgaatatggaaagttaataccaattcctgatactgatgaaacaaaggatggttttgatttctttgctaaacatatgtcgaccgctacttttatagttccgactgcacaagtacttgaaaaaattattactggattagatgatttatatactcatgacattgcaaatttagatatgcaaggtgacttgtatgaatatatgctttcaaaattatctacagctggaacgaatggccaatttagaacaccaaagcatatacgtgaaatgatggttaagttattaaagcctacaccaaaggatataatttgtgatcctgcttgtggtacagctggatttttagtatctgctgccgaatatgttagagctaaccatagtaaaaaaatggataaagatgactggaaacattatgaaagtaatatgtttaatggatttgatacagatacaacgatgcttcgtatatctgccatgaacttaatgttacattccatcaaatatcctcaggttgattataaagatagtttatcgaaacaaaatactatacatgatgcatatactatttgtttagctaatccgccatttaaaggtagtttagataaagaaacaattaatgatgaattgcgtagcattacaaataacacaaaaaaaacagagcttttatttttggccctatttttaagaattttgaaaaagggtggtacttgtgcctgtattgtaccagatggggttctatttggttcatctaaagcacatgtagctctacgaaaagaaattattgagaatcatcatttgcgtgctattatatctatgccttctggggtttttaaaccttatgcaggagtgtctacagcgattatgatttttactaaaactcaagctggcggaaccgataatgtttggttttatgatatgaaagcagatggttttagtttagatgataaacgacaacctattgaagataatgacattgctgatattattgatcgttttgagcatattgatagtgaaagtgaacggaagcgtattgaacaaagcttcttagtaactaaacaagaaatcgtggataatggatatgatttatctattaataaatataaagagattgaatatatcccggtcgaatatcctccaactagcgaaatattagctaatattaaagctttaaatgaacaaatcatggctgatacagctgagctagaacgattattaaatgaataaattcatatttggtgagatgaatggaatttatagaattggctgaattatgtgataaaggatcatcaaatttagctcaaaaagatttagtgtttgatagtggtatttatccagtatatggtgcacctggtgaaataactaaagttgacttttttcatcaaagcaagccttatttaggtcttattaaagatggcgctggtgtaggtcgggttatgcaattgcctgcaaattcgtctgttattggtaccattcaatatatatttcccaaagaaaatgttgatttaaagtatttgtattatcttattaaatatttagatttaggtaaagctaatacaggagcaacaattccacatatatattttaaagattataaaaaaagaaaagttaaagtacgagaatatagtgagcaaaaacatattggacaaatattagagttgattgatagccatttaaggacatataaaaaagttttagaacaatatgatttacttatcaaatcccgatttgatgaattcaataagaataataacaatgtaaaagttttaaaattagaagccctttgtacttcagttgttagaggaccttttggaagtgctttaaaagtagaaaattttgtaaaaaaatcagatacaagtgtgaaagtttatgagcagtcaaatgctatacaaagatctgcagctataggaagtagatatatttcaagagagcattatgaagcattaagacgttttaagtgtaagcctggggatataataatgagttgctctggaacaataggtaagttgtttatattacctaatgatgcagaggaaggagttattaaccaagctctatgtaaatttacattggggaaagagttattgccagaagtatttttactttatatggatatcttgattggcaatattgaaacaaaaggctctggaattaagaatatttctgcagttaaatttattaagaatcttgaaataccggttccgccaattggaatacagagtaagttactatttgagttaaatcaaatcaacaaattgaaatctgatgtacaaaagtctatagatgagactcaacttttaatggattcattaatgcaagaatattttggttaatattcatttggtatactaatataaaaagaaaagaggtatagctatgcaacaattaattaatgatatattacatgatatgagtgaagttttgtctgctaaagaattatatactttacagcttgttttacaaaagaaattaaatacacaaaataatcaaacatatccatatactaatattgagtatatggatatgtttatttctgctaaaaggattgaaggttgttcagaacgaactttagcttattataaaattacaattgaacatatgcttagtataatagttacgccattacgtcaggttcaaactgatgagttaagagcttatttagcagaatatcaattaattaataattgtagtaaaaccactgtagataacattagaagaaatctttcaagttttttctcatggcttgaagcggaggattatataattaaaagtccgattagacggattcataaaataagaactggtagtaaagttaaagaaactttatcagaagaatgtattgaaaaacttcgagattcatgcttacatattcgtgatttagcaatgatagatcttctatactcaacaggtatccgagtaggcgaattagtaaaccttaatataaatgatattaattttgaagaaagagaatgtattgtttatggtaaaggaaacaaacaacgtaaggtttattttgatgctaaaactaaggttcatcttaaacgatacttggaacaaagaaatgattataatgaagccttatttgttaccttagatagtccttttgaaagattaaaaattagtggtgtagaaataagacttagaaagttaggtcgattagctttattagatcagagggtacatcctcataagtttagacggtctatggcaacaagggctattgataaaggcatgcctattgaacaagtacagaagttattagggcatcaacaaattgataccacaatgcattatgcaatggttaatcaatccaatgtaaaaatatctcatagaaaatttattggataatcaaattcatatttggtgagataatatgtatttaaaagacctcgttgatattcaaatgggacaatctcctgactctaagttttataacaatgataaaataggacttcctttttatcaggggaaagctgattttggtagaataaatcctatacctaaaatatggtgtagtaaatctaaaaaagaggcaaaaccaaatgatatcttaatctctgttagggcacctgtcggagatctaaatataaataatgagcaaagctgtattggcagaggcttagcggcaataacatgtaaatctgatgttgatatgatgtacttatattatcatttaaagtatttgaaacctcaattaagacatatatcaacaggaagtacatttgagtctattaatcgaagtcaattagaaaatttaatcattgactataaaccttattcggaacaaattaagattagtaatatcttacaagttgtgcaacgacaaatagaggttagagagaagttattaagattatacgatttacttattaaatcccgatttgttgaaatgtttggtgatataagagaaagcggacgatttaaagtaaagaagtggaaagatgtagtagatatttttaatggtaaggattataaaactgtacaagttgatataggtggatacccagtatatggaagtggaggcattattgcacgtgctagtgaatatatttgtccagctaaaacgataattatcggacgtaagggctctataaataaccctatactggtaaatgaaaagttttggaatgttgatacagcatttggtattgtaccaagagaaacaattgacacaaattatttattttatttttgtaaacaatataattttaaccatctaaataaagccaccactttgccaagcttaactaaacgtgatttattagaaattgagataaatattcctagttttgaagagcaagaaacgttttctaggtttgttggtcaaatcaacaaattgaaatttgccaaaatagtgtataattaaactaagtattatatagaacagatgaagttacatgtataggggattatatatggctaattttgattttcttaaggagatagttgaatataaagtttttgcagatgcagctattgaggcggagcgtgtatttcactcatcaccatctatgtgcgcgattggatgtcgtaaggcgttagaattagctgtaaaatgggtatatacagcggacactagcatgattatgccttataaagataaccttcaatcacttttacatgctaaatcgtttaaagatgagttgcctgaatctttgtggcgtgaattacagccaattgtaaaaatgggtaatttagctgttcattctgatgctaagattttgccaagaaccgctattatctcattgcaagcattattcaattttattgaatggatagattattgttatggttataattatatagagcgtatatttgatgagaatgcaattcctaaggccgtagttcctgtagatgttaagaaaatcaaagagcaagaaagtttgattgctcaaaatgctcaacaaattaacaatctatatttagaaattgaaaagctttcaaaattattatcttccgcaaaatctgagcatgttttaatgcgcagtttacctaaagtaccagaaacagaggctgaaacacgtagatatataattgatgtcgatcttaaattaatggggtggacttttgacggctctaataaaaatgtgtttgaagagtttaaagtttcaaacccatatgttccaggtggcccaaatcttagtgttgattatgtattaatggggcgtgatggcaaacctctcgcattaattgaggctaagaaaacaagtcgcaatataaatgatggtaagacacaagctttagcttatgcagatgcattagaacgtgagtatgggcaacgtccaattattttcctttctaatggatatgaaacgcatatgtgggatgatcttgaatggaatatgcggcgtgtaagtagtgtatacggtgaaagtgatttagaacgtcttattgtacgaagaaaattagataagcctattttgagtactattccaattaatgatgatatttcagcacgctattatcaaaaggaagctattagggccgtttgtcagaatcttgaaaacaagattagaagaagcttacttgttatggcgactggtacagggaaaaccagaacttcagtaagcttagttgatgtgctttcccgtagtaaccaagtgacgaatgtattgtttttagcagatagaattgcattagttagtcaagcgaaggatgcatttcgagaacatttaccatctgcatcgttatgtaatctatgtgaaagtaaagatgataaaaatgctcgaatagttttttcaacatatcctacaatattaaatgcgattgaaaaatcattagatggagaaggtaaacgcttatttactcctggtcattttgatttaataattgtagatgaaagtcatcgtagtatttttaaaaaatatagagctatatttgaatattttgatgctattcttgttggtttgactgctacacctaaagctgaggtggatagaaatacatttgacttctttgaggttcaaaatggagttcctacatatgcatatagctatgatgaggctattaaagataattacttagtgccatattataactttgagatggaatcaaagtttttatctgatggtattgtttatgatgaactttcaaaagaagaccaggatagattggaagatgaagctttagagtaggcaggagaatttcaaggtgattattctgcaacggaagtaaactctattatttatagtacagatacaatagatcatgttctcagagagctagatcagaatggtataaagactcataatggagattctttaggaaaaacgattatatttgctcaaaataaaaagcatgcttatctaattgaagagagatttaatttattataccgttcttcaaaaggaaaaaaagcacgtgttattgttagctctgatcaacatgcattacatttaattgaccagttcaaattctcagatggtgaaccggatatagccatttcagtagatatgttagatacgggaattgatgtaccggcatgtgttaatttggtattttttaaacgtataaaatcaaagacaaaattctggcaaatgataggtcgtggtactcggctctgcccaaatgtggaattttttgataaaaataatggtgattatgtaggtaagaagtacttctatatttttgattactgtaaaaattttgagtattttagaaatcaaaaaaatacggtagaagtaaaaggtaatagtgccaccttaggtgaaaggatctttgctaagcgtgctcaaattattgcacgactacaaactgaaaaatatggcagtgaagaatatcaaagctggcgttcagaacttgtagatgagtgctataaagaaattactgatttagacgtgacaaaaccggttgttcgtttacagttaaaatatgtggataaatatagcgtaaaaacgtcatttgattatttatcaaatattgatgaacatgatttaattacttttatagcacctttaatttgtgctgatgttgatgaaaatttggcacgaggatttgacaactttgtatatgaaggaattttgaatttctttaatggtcaatctcttgactactttaagaaacgtgtaataaatctttcgaatactttattacaaaaaattagtatcgaacaaattagaaaaaaacaagatttcttgaagttaataaatgaagatacatattggcaaattgttgatgcattacagctaaatcatctaagaaaagaactcagagatttaattcagtttcttgatgttgcagagcgtagagttattataacaacaattacggactcagtattattaactagagaaggcgatactcttatgcctgaagtttttgagagctatcaagaaaaagttgagtcgtatttcttaacacatcaagatcatccagcaattcaaaaacttattaataatgagccgattgatgaatcagattataaagccttggaacacatttttactcatgaattaggaagtcctaaggattatgaagaccattttgaagataaagagtttggattagttgtccgcgatattgtaaaaatgagaccagaagctgctgaaaaagccttttcggatttgattaatagtaaatctatgaatattaatcagattaactatctaaaacaagtcattaactatattgctgttaatggatatatggaatctcctaaaatactctctgaagcaccatttgatagaccgtttgatatatggaaactttttgatcaagttgaagtggtagaaatcgccaatatagtaaagcagataaaaaataatgcctgcataaaataagaattttattagccatatataaggggggactatatggatatacaaaaacatgcgagtgatttttctgcagaaaatttacgtaaaagttatatcaataatattcttaatagaaatactcatattcataattttatctcaatgttattaaatattgagaagggtggcgttatagctatagatggggaatggggtagtggaaagacatattttgttcatcaggtaaaatggctttttgattctgctaatgaaaatattgatagtgatattaaaaatgtattaaatagtacatctccaaaattagataatattatagagcataaatataaagtgttttattatgatgcttggaaacatgataagtctaataatcctttttttactttactaagatctatgatacttacttttggtgggattgatcattttaaagaagagatgggtttcataaaatctctattcaaaggtgcatcacatatcgcaaagggcgtcactccgattgacgtggagtcggtttttaagggcactaaaaccttatgtggaattaatgatacggaccggttctcagaattagagtttattgaacaaatggatagtcaagttcactcttttttagactatatatgtgaggggcaatatgataaattagttatatttatagatgaacttgaccgatgtaaaccaagttttgctgttgaattactagagataataaaacattattttaatcatgataaagtgatttttgttttatctacaaatctaagtgaatttcaatactgtataaagcaatattatggagatggcttcaatggttggaagtatttagatcgatttatagatttaagacttacagtaccaactatttctacagatgaatattataaatacctatggcagaaaacagggacagaccgtattgatgatatttctatagcatgtgccaaatattttgaatttaatctaagagatattcaacgttataatcaacaggttaatatagcctttcatagctatataaatactatatatcaaaataatgatttttctgaggaattagactctttatatgccgtttttacccctatattattagctttaaagctttattctgtggaagaatttaaagattttatttcgggaaagaaacatgagattataaaaggactattaaaaaaagatagatttataagaagtgcattgtttttcattttatcagcaaatcaagatttatcttctgaacgagaagagttattagagagagcactagagtattgttacaacgaattatttaatcccgaaattaattacttatctagtaagaacagtatagataatttgatgttaaattgttttaatattgacagtaatacaagaagtaatcttttaaatattattaatctattctcaggaaaagctaaatttgatgtttgaatatttatttagataggcttttgttgtatcagggttataataaattttatattttattttagactaattttgtaggagtctctttaaggtgtaaatgatactctaagaatgtataaaaatgatgatataagaatgtacatttcgattatgtgtttaaaagggaaaaatatgaaagaggaagtgcaatacagaatagataatgcattagagttagatgatctattaagcttaacacatggctctcaggtagcccgataggagtaaatagtatgtctacatggtccggaatacgacataagttagaaacagaatatttagcacctagtttgcgaggccatattcaatattttgctacctcgtatagtaaatcacctgatcatgagggcagggcggctattagatataatgggaaggaaattataaagggtaattattggaatcaatatgtgaaagcgcatctatttcctaaagatgatacatatgaacagagaatgcatgaaggatttccgtttatagacaatacagcattagaattaggtgtatttgatcagcggtgtttttatcaggcttttgatgaatttgataaccaaagtattgataaaagcctacctagtgacaatctaattgtacgtatttttgccattttagatagacgtgtaggaaaacgtagactcctttctatgagagaacttatgaagaatcaaccttctgtatttcaagagttttatgctattcgtatgcaccatgaaggtttataaatgaaaacacggaagagaattgtctaattcccttccgtgtttagatatgatataatttatatcaaagtgaggcataaatggtttggacgccagacttcgcttctgatttttaaaattgaagaaacggtctgactctcaatgtcgggccttttttcatgccacgaatagcaaaggctggacccatttagaggcctcaagcccaatatagtcttgttaatgacaaaagtaaatatattagaggttcctaatagtccccccggtgactattaggaacctcttttgttatcattttattactatataagtacattacaatatacaaaatatagttagtgtgtattgaggaaatcttatgtttagaaaatctttgttattcggtggtctgattgctgtgttgtgtttgagtggttgcagcaatgctaatgagttgcctgggtataatgcaaaagttaagcattctagtgctgatttttataagaatgatttgatggatagtattcttaatgaaaaaatctataatgctactagtgttgcggaggttagtgatgcggctagattactatatcgtgttgatgagatgaatgctgagcagcgtagaaatttaaattattctatgtggcgtgcccaatataatgctgtaaccgaagtccatatgcatactgataagggcgggctttcctatacactgccgtttccagctttcaaaggtggcacacaatctgcccctattccgaatgtgaaagatactaatacattggtgtatacatttaaccatccttttatttatactagtttagttgtggataatcatccgtatgagcaaagtgctcagtatttgggcaaaccctataatgaattaaagcaaggctatgtgcgttctgcattgcaggaacaatggtcacatatgaatcaagatcagtttgatatatccagtattgatggtagtactttcaaaggagaaagggttattaatggccgctggagcaccatgaaaactaaaggcgatcctacctttgtggcaaatgatatttcttttgccttacataatgagcctgatacgcaatatgtacttaccttgatggttagagaagatggcgagcgaggtattggtaaacgaggcatcgaggatattatcgctaattacattgtgcctaatattacttcattagaacggttaaataaggatagtcattttgaaagctttaataactataattatcgtgtgttaaatgatgccgttgaggaagcatccggtaatgagcatattaaaatatataaggatcctacaggtatttcgcagatgatagaagtatatcctgttgagcataagggggaaatctgggctaatcttgttgacattgtcacaatttctgaagcacagttaaaaactagaaagaatatgcgtagtggtagccatacgtatatatggaatgatggtgttcctggcgtgctggtaacatttgaatatgaagatggtactagtgaatggcgatttagcacgcaagatgcacataatctttatatacatacaatccattataaatatgatgcgaatcgaaagagtttgccagcactagcaggaatcgcctctgatgcgaagatttcaaacttgggtgatacatataagggcgaagtagattttttatgatataattgatagcaaagtgaggtataaatggttcggatgccagacttcgcttctaataagaaaaattgaagaaatggtctgactctactgtcgggccttttttcatgtttacatgtagatgtcagctgtgaaggttttcttgccgtacatttttaagactatagcaattattgtatttaatacaaataaacctgcaaagcacactaaagccatggaatacccatatcctgcttcgtgaaagtacgatacaatcatgggaccagcgatgcctgctaagccccaagctgttaggatacggccgtgaatggtagagagttggcgtataccataaaggtctgcaagatatgctggcatacaagagaagcctccaccgtaacaggtgataatgaggagtattaaaatctggaatgttaatgcactattggtttgggatagtaaatagaaggcaatgatttccatgataaagaataatatataagtttgtgctcgtccaaggaaatcagagattgtagaccatacaatgcgaccaccaccattgaaaatgccaataataccgactagagaggccgcagctgctggtgtcatgctaatggtttcttgtgccattggggatgctagagataggagcccaataccgcaggtaatattaacaaagaagacccaccatagagcactgaattgccacgttttcatagcatcattagctagcataccgtgattatgtacgtacatggtagatttatcttgattagagcgtgtcggttcttttggcgtaggtgctttcaaataaagggaagaagcactcataactataagatagatgataccaaggataatgaaattatttactaagcccaccaaaataacatggcgaggaggccgctttttttaggaccaattttctctgcaaaggatccaagaaaacctgcagatagaccaagcattagaatggctagtgaaaatgtccatgtagtttgtgataaggtatatcccgtatctaccatgatagggcgcgtgagcacactccatgcatacacgctaccgatggatatgtgcagtccaatagctgcaagtgcgataagccaacgatttctcataaaaaaactcctttcatatacgtgagattatcaaaaattgataaagaagcatttgctatgagatggcaataaaaaaagaccatctgaacaaaagcttgcccagacggtcggctattacacgatgtgtgctactgtgcatgtagtcaattctacgtatccgtcagcccagtaggaagatgaaataaatataccaattgacaatatactttgtcggtgatataagtcactatgttactaaactattacagaatgctttaatttacatgaatttgttataaggttatattacttataagtgtgttttttgattcgtggtggttttatatgttttacaattacgatagatatagcaattgtaaaagctatcaaaaaggattcttttgcgaagctaatggcaatagtttcttgtcccattagcatataataaatggatcgataaaagctgagccctggtagtaaagggaataagctagtcattaggaaaactatagcagggcatttccgtttaacagccaatattcttgatgctatggcgatgataaaaccactgataaatatggagagcataacattagactgtagtgaagataatgttaagaacaagaaccatgagatgaatcctaatattgtacaatcgataaaatgttgtttagctacacggaataagattgcaaatgctgtcgtaccaataccagccattatactacgcataaacatagaggttaaggaattagtatctaaattagaggtataaagaggaatcatttgtgtgttgaagagtagtgattgtactactgcgacccctacagccatggaaatacaggtaagtaacgcgcccatcataagggttattcctgtattatagttattctggctatactctctaatagcattgacgaaaggaactccgggaacaatgtcaatcatggctcctagtaatataactgataggttggagcctaattcaaagtggataaagagattacccaataaggctattagaatactacctaaaatggtaatcaatacatcagagctaagtatgcgtttaatcgtacacatatagacgcctaatattaagcctataatacctgcaattatagagtctgttatagaactaccaattgcatagctaaagcccgaagctcctaacgtataagctactaatctccaaaaaaaagaatagtctgacatggtatcaatttgattaagttcactttcaatctcctcaatagtaatatttttttgtgtgatacgtcgggagagagcattaacagattcaattttactgaggttaatatcgacttctggaacgttataaatacgagtaatttcagttccatcagctttcttagcagttgcaaaaatacctctattggatacgtaggcttctaaatatttaaaattcatagctcgtgctatgtagttcatagtatcctctgtacgactgatttcggcgccactgctaagtagtatttttccagcttttagtataatttctaattccacacctgtcattatttcctcgttattcattttacttcactgttatttatattggactttttgataggtctatctttagaagattcagttgattttgattcttcctgttgttcttgtagaatattgatattttgatgtataacttcttcgtctattgagagatgctcttctacatagtcttttagctcttgaactgtttccgtatttgaaagtatttcttttgcttcattatgaatatcttctttaagagattttgtatctgcttgactaatatcacctaatgtatggaatagttcgcgttctttttctgaaagatttttgtgaggactatgtttttttaatgataaatggagcatctttcttcggaagagtttttccataatgatatctttacgatcacggagccagccataaataagaataattaggagtaatagtcccatataaccgagaattgggtagaggatactaatcaaatctttaaaaccaaagaaactacatatatatcctatgattactacagaaataataacaattctcattctttttgtgctgccgttggcaaaacgtctagcaatagaataaaaaagagagaatgctgtattaaaaataagtgaaaagactgtgattgcatatatatatgctagccaaggatgaatttgattggcaatagcaagaatcggcaaatctgcatcttttactgtatctagatttgcaaaaatagagatagcagctataaaaacaactaatccgactaataggccgccacgagtgccacctttttcagcaataccaatacgaacaacagaaccacctaaaataaaggccatagaaacagctgtcatagcacatagagaataataattaatgacagaaaaccatacattgcttgtggctggtttgattgtgtgggctatagcatctaatgtagtccaatcatgacttttaccaataaaagagtagcctgtaatgatgaatatcataacaatcatgataggagtaaaaacacctaaaacattggttattttgtcaaagttcataaatgatacggttatgattaaaagtgagcaaattaatccgccaatccaaaaaggaagtccaaattgttgttctaagtttgagcctgcaccggctatcataacgaagcccataataaaactaccagcgattagtacaaaatcaagtattcttgtaataataggatgggaaatctgtgtaaaaacttcttcatgattgtctgcacgatagtagctccccaaagaaagcatgattttaccaaatgcggcatttaatagacctagtaatagaacaccaataagacctatttggccaaaacttataaaatattgtagaagatcttgtccactcgagagtcctgcacctacaataacacctatgtaggcaaatgcaattttccatgattgttgcattatatttttctcctttcaaatacataacttaataatctaatattatatcatactaatgattcaattgaaggaaatcttactgccaatctctataagattagctaagactggaccatttataggccttaagttcaatatagcgatgtcaaacgtagaaatttaaactattctatatctagagcccaatataatgctgtaaccgaggtacatatgcatactcctgaagggggctgtcttatacattaccatttacagctttcaaaagagagaatattataaatggtcgttgcagcactatgaaaacaaaggagaaactaagttttgtggccaatgatatttcttttgctttgccgaatgagcctaatacacaatatgtaattacgttattggttagagaagatggtgaacgagggattattgcatagtattatttcagatgctaagattgcaaacttaggagatacctataagggtgaagtagatttactatgatacaataatagtaatatgaaatgtactaagtcccaatgaagttgatgcggttcgttataaactagattatcaagaggactatgagcaggattatccttttaagtaatgtgtatatttgtttcgtgtgttgaggtgtgaatcctatggctacgtggtctggaatacggaataagttagaaacagaatatcttgctatcagcttgcgagggcatattcaatattttgttaccacttatagtaaatcgcctgatcatgaggggcgggctgctatacgatataatggtaaggaaattataaaaggcaattattggaatcaatatgtgaaggcccatctgtttcctaaagatgatacctatgaacgaagaatgcatgaaggtttgtaaacaaaacacggaaggaaattgttcaattcccttccgtgcttagatatgatataatttatatcaaagtgaggcataaatggtttggtcgccagacttcgcttctatattgatttaattgaagaaacggtctgacttcacagtcgggccttttttcatgccacgattagcaaagactggacccatttagaggcctcaagttcaatataatgccgtcaattataaaagtaaatagattagaggttcctaatagtcacctaggtgattaataggaacctctttcgttttgtaattattttcataaatatattcttattatgatacaatacagttaaaattattattttatggagagatgtatatgttaaaacgattattattaagtgttatggtgttgagcgctgttagtatatctagttacgctgttgatgtgaatattcccggtgcagatccaactattgctaagggtgcttatgaacaaggaatttataggactgagaaaattaagagtgcttatgatgtagaaactcgaaagattatagactcaattatttcaaaagagggaatacctaaaaagtttggtacggatgttaatgatgctgaagttgaatcttttaaaaatgagttatattctattaagcgtcgtcaatttgacggtaatacaattgtgaatttacataataatgatggtggactatcagttacacttccatttagtgcaatacagaaagaggctataactgattttcctaattcaaatgctcattatttagtagaatccccaatgattgctgcaggtattattgaaaataaaacatcaaatactactgaaaaaactgatattgtatttaaatatgatggcttaagtaaaagttctttaagaaagacaacacttagaggggcagttgagatggagattattggtttaaaaattgaactgagtaaacatccaaatcaagagtataatgttatcctttatccgcgtgcaacgaagctagtcacatccaatgatattaataaaataatggctaattatgtattgccttcaattcattctcttcaagagttagatgactatagcaaggttgagacatataaaacgtattcctttagagtacctaaaacagctgtaaaagataaaaagccaaatgaaagagtagacggtgttagctttacaattaataaagatataaatcaacagattcgtattgaacctaataatgaatctgaaaaaggattatttagtacagttgatgagattcgtatattaaataagattgataataagtcagcagagctttttggtatctctggagcaaaaatgataactaagggattccatacttatgtttggaatgatggcataccagggttattactagatattgagctagataatcaacagggtatattgatgtttataacttatgatgagaaccataagtatataaacacaatccaatacccgctagataatggtgtatatagtaaagcgcaattacgtagattaattactgatgtaaaattatcgtctactggtaatctatatgcaggtgatgtttggattgtttagttaaaactatttataaatgaaataaggaaaggaatccttcgattcctttccctgtttagatatgatataatttatatcaaagtgaggcataaatggtttggtcgccagctctcgcttctcgaattttaatattgaagaaacggtctgacttctctgtcgggccttttttcataccgcgattagaaagctagattttatctagaggtcaatcattttgctgccatgataatggtcgctacaagtatgccaaaggaaatcattaatgataacactttgtatgtactcatattgatcaccgccaatcctcgagttgattagcaaaggctggacccattcagaggcctcaagttcaatatagtgctgtcaatcatagaagtaaatagattagaggttcctaatagtcacctaggtgactaataggaaccttttttacttgacttttttaatttgtatacctcaatatgttacaattattaatatagtagtcgtgttgtaggagagacctatgttgtatttagtcattgccgtcatcgtcattgcacttattgcaaaatctagatcattgaataatcaaacagatagtgatgcggatatagagaaacagaattgcatattagacgaaattaatcgtacatacggaaatattgaatcatatgaactacaattagaaccttcagatatagagggaatatattttaatgaatttcgtgaatatgtcgatgctgaaggtcgtgtgttgactccagcagagattgatgaaatccggtataaagatgattatagagaggatattgaacaggattatccgtatcatcgataatcgtggagggcgtagagatgaaacgaattatatatgctatcagccttggggtattgctagcgataccagtgctttcacaagcaattgatacaacaccaatgatacgtgttacgaatgtgtataatggtcaaagtgatgaatcgttagatactttcacagaaacaaaattcttcggaccatatcaattccgcgtattaaaggatgctattgaaacgcagggcgaaacaaaagatattgatggtagggtgtttagaacctctgatggggtatttatgcatgttaaggctaaatctattgatgatagtagtatgtccttggataatgagattaagaatcttgttaaagatagaacgattcctgaaccgactgttaagatggtattgcccattaagaatagtgtaatagaggttaataatgatggtgtgcgcagtttactagctgaatttatgtatggctggccattaaagaataggacggacatggtattagttactgattatgaaggaactagatactattataaattgcagttctatagagatagattgccaaacggtgttcgcattgagcaactgcgagaaatgattatggatgcgcagtttagctataaataatatgaatatattatgttcgagagagggtacattgtgttaaagcatatagtattagctatgactattagcgtagctatcattacgcctgctcaggctatagacattaatatacctggtgccgataagactgttcctgtagaggcgtataagaattataattatacgaatgaaagtttagaaaaggcgttatcagataaggaagaacatgtagctaagaaattaagatcttaccattatcgagattatgaaattagtaaacaagttcaatatagtaagaatagtttacgtgccgtgctagcacatagtacaatcattcgtctacattctgatacggatagtatgcgattagtaatgccattttcaagccagtatggtatgtatactcagaaacaggatggacagactttagaaatcaataatcagaaaattgatttttctattatggcagatacaacacagtatttaaatcaattaaataagaaaaatcgtgatttacatcgtgacattaaaaaattctctaatccattcataggatctgctttgtggtttaaggaaaagcaacaatctaaagacaataacgaaatatatacgacaggtattcagtttaaaaatcctaagaataagtcaaaatcctatcggttggcatttacttataatgggggcggttctgaaggtgtattgactgatcgtcatgtagaaaatatgattgctaattatttagtgccatctattcagcttttacctgatacagattcatattctgaaagcaaagagttatatggatttacttataagatgcctataggttcacatcaggagattggatatgacataaataatgatgaaattcatgtatataaaacagttgggtacgaacagtgtgtgtttgtgaatcgtagtcaacttggtgataaaagcatggctgctcagtatactaaaatgttagagtttatgactaatattggtgtaaatttaggtgttaaagaaccgcaatatgctattgtttggaatgatggtattccatcagctttaattgatatatataatccagatggggagtctttaatcgttgtatttacatatgatgatagcaatagaatgcttacaaattggattgcttataatttaaaagaaagcaaacttagtcatgatgaaatacgtaatatagcagaatctgttaagataaaagataaagtttcgcttacgaatcaaaagatacaacctttatctgaggcgtttttcataatttaaagtttcttattaataaaatatgtaatgaaaaaggtctatatattacaactcagtaatatatagacctttaacttgtatcatctagtcttcaatcaattataggatgcttttacccatagggaatacagttttgccaaataccttgtttacaagtacggcaccagaaccgtagaagcccaagagggagatgaataattcagaccatgctgcaagagcaaagaagcctgttttgccacctaagaataggtctgttgcaagacccaagaataggaagcagatcaagaacatgatagcgaatacaactttgtttgttttcaaagatgcgatgataccaaagatagagaagattaagaagcccacatttaagtcctttatttatgatatactacatataaagtatgtaggaggttatatggtttttcttacttcattacaaagcatcatgcctatcgttttgctcatatcgcttgggtatttcctaaaagggcggggcatgtttaatgatacatttagctcaaatctatcgaggctcatcatgtccgtcattttgccggtcggcgtatttatgtccgtgctacacaatgtgcaaacgtcggatttgtgggacttgcggtatggattactcgtcgtgatgatgacctatgtagtatcgtacatcatagcgtttattatgatgaaaattgtacatgtcccacggggacgccgcggtatttttatcaatatggtagttaacgataattgtttatttattggactacctgtacagattgcattgtttgggcctgatgcattaccgtttttcttgctgtattatattggtaataccatatctgtatggatgtttggtgtattccttattgaggctgatccgttgcctacgaatggtgctagccatggtgaaagcttccgcaccttggtacgcaagttttcttggaaaaaattgttgccgcctcctttactaggatttttcttggcactggtatttttgtatgctcagattccattgcctacggtattacataatacgttaaactatatagggaatatggtaacaccattatccttgctatatattggtatcgtattacatgatgcgggccttaaaagcatgcgtttaaataaggattccatcggtggtatcattggccgttttgccgtagccccatttattatgttctgcgttatctatgctaccaaatacctcatgggcattacattagattccgttgcggtcgtcacattcatcgttcaatccgcaggaccggtaatcgccgtattgccaatcgtagcgaatgaagcaggttctgatttgccatttgccacaggactcgtaaccattagctccgtattattcgtattcgttataccagttattatggaaatattaacactgtttgggatgtaaagcttaattattaccacattataagaagattttatttttataatgtggtatttttatttgaattttaaacgtatgttagtttgatgtataatggaataaataaggagtaacagttgacctataatatttaaagaagctattattaaattaatagggatatattattaaattagaaaagaggtgatttcatggcgtttgttccaaagataacagtatccgaatttgtagagcgtgaaattagtattcgttataaacgtttacctatagttaattttgttaatttaataaaatcaggtgtagaattaggaaaatttgagagatatgtgattgaattctttagagaggtaaaaccagaaaatagacgtaaatttatggtagaacaaaatattacaccattcgaaatggaacaattatataacaaagtaaagcatatcccggctgttagtactgtagaaggatcgatttatggagagtgaacgaattcgtacagaattgcttttggaaaaagccattaaaatcttagagtatgctaatattgataatagtcaatggtccatgggtggtggaactattttaatgcttaactatcatcatcgtttaagtaaggacgtagacatatttgtttcgaatacacaatattttaatggactatctccaaagttaaatgatgtagccgaagatgctgatttttatcaagaaggagaacgatttatttctttatcttatccagaaggaaaaattgattttgtaaaggcgtttcaggtaagtgattacttacccacattaaagcatgtatttaatcagaatatatttgtggatgatgatatagagattgtaactaagaaggttttctttagaggtgcatctttacatcctcgggatttatacgatttggctactgtttatttaggaccaaggagaagtgaattagttaatgctctaattaatatcccagaacagttacaagagtttcatgatgctttacaacgggtaggaccaggattttctttttctgaagattatggtttagatttagtattagatataccattagggcttaatggccgagaggtggatatttgtatagatttatgtaatgaggttcgtaaatctttagtttaattagatataatatcattaattttataagaaaacgactagtaccatatacatatgtatatggtactagtcgttttcttatgcattaagcgcttcgataatcgttacgatatcttctgcctttcgagcaatgtgtttgacgcctaaatttttatgtaattgttcgtctctaaagccccacgtaacgccgatgcatagtaggcctgagttatttgcagtagctacatcgacttcagaatcaccgatgtagatagattcactttgtgtggaatctaattcttttaatgcttgtaatatcatgtctggtgctggtttacgttgtaatccagggcgttcgccaatagctactggtaaacgatcaccaaagtattccttatttaatggagtaataccttcttggattttattagaaacaatggcgagtttatatcccttagcacgtaatgtgtctaatacatcaagcatgccaggatatggggctgtgtaatcctgtaaatgttcgccgtagtatgctttaaattcgtcgagataggtgttgaattcagcctccgaaatggaatctggtagcgattgacgcatcaaatgagctacgccattgccaagggctgctttcacctcaggaaccgaccgttctggcaaatcatgagcgcgcaatacataattcaccgcattgcgtaaatctgttaatgtgtctagcaatgtgccgtcacaatcgaatacaatagttgtatatttcatggggacctccaaaatctgtataatcttattccattatatgacatgaaccgagaattttaaattagtctatgatacaattagtatactagttgaaaatatttggaggattagtatgactgaaatacaatctttattattgatgaaagccacgttagaatccgcaaatcttcatggtgttgaagccatgctcgacgatgattgtgaatatgtttctacaggtcgtggtatcattgctcgtaataaacgtgaaagcttagaatttttaacggccatggttgattccatccaatctgaccatgtacctgttatctgtcgtgttatgcatattacagaggtatacgaagaaggcgccttatttcatgagggccgtcacggtttgaccgttgcttatgaagaaggcgaccaatatgcgtatatgttgtttgttgatatcaatgaagatggccgtattgatcgtatcgtttctagccaagaaaattatgcgtttgaatacgatgatcttcgtttatccttagatgaaacaccatatcgtttcccaattgtgccgcacactgtgaaagactggattgcggcccttagcatctggcttgaaactgataattttgatatcgatgatttttaccaattcattgatgaagataccaaggtagtgttccaaaaaggcgatgcagaatctattacactagaaaatggcctcgatgtagaggactactttgatcaacttatgaatcaacactttgctgccgtaccacatatcatccgtgatgaagaggataatcttattttagtctatggccctatgagccttatcgtgagccttaacgaacatggcgcattagctgttattagtatatacattgatacgcgtgacgaagaagaatccattgatgaatacggttatatcgaagaagatttgaccgaacctgtagaagaagaactttttacagattattgatcggtatatcatacatgtccataaaaattagaacaggcctgtactaattttaaagaggcaggagcgagctcctgcctcttttgtgtcttgaatttataatctaagtgcaactaaaaaaagattcatggctttctgataaaatagtgtttgcaaagacatctaaaaatcaggaggagccatgaatcattatactcattttacactaaaagagcgcgaaattctaaaacattttattgatataggaaaaaatcaaacagaaatttcaattttacttgggaaaaataaatcgtctatatcaagagaaatcaaaagaaatagtcaaaatggcgagtacataccttgtgaagcccatgacagatataaaaatagacgctttaattgtaaaccaagaaaaaagctagataatccaagtctatatgaatgtgtaaagaatttatttttgagacatcaatggtctccggaacagatctcctctcgattgaaatttgaaaattcaagcttcactattagttacaatacaatttacagggaaatatataatggtcgttttgatgaaaaagaattatcacatggaaatagaggagttgttcgcaaactacgacatcgtggtaaaagtcgtcatacaaaaaattatgaagaaagacgtggaaaaattcaaattagtaatttaattacagatagaccagctcctgcaaataatcgagaacgattaggtgattgggaggctgatacagttatggggcagactggtaaggcttgcttagtaacattaactgatcgaaaaagtaggtatctgctatgtaaaaaaattgcaaaaaagaatgcatttttagtcaaacaagcgatgattaagcttttaaaaaatcaacctctagaaacaataactccagatagagggaaagagttttctaaacatgcagaaattagtcaggagttgaatttagtagaattttattttccattaccatatcatccttggcaaagaggaacaaacgaaaacaccaatggattgcttagagaatatttcccgaaaactgtggatattaatcaatcagatagctatgttgaagcaaaaatgaaagaaataaatcttagaccgcgcaaatgcttaaattggaaaactccatacgaggtttatcattcagtagagttgcatttgacttgacaattcaaggtacaaaaatgtaattagatatcttctttttctttgattaagccagcttttttcttgcgccagtaccaaatgtagagcggaagaatgacgatacagccacctagaccccaaagtaattggtttgtttgggcttggcctagcatccaaagggatgtagcaatggcgatgattggaactgtgtaaccaccaggtattgtgtaggatcgttctttatctacccatttacgacggaatatgatgactgctaaacatgttggtaagtattgtgtaaaacgggataccgcactaatagcagcaagggttgtaaatgaaccggaccaggcgagtagtacgctggcaatagcggtgacaatcgctgctacatatggcgcattgtaacgattacgtttagctaaggcacttggaagcatgccatcttcggccatggatgttgcaatacgaggggcgtaataggcttcggcaaagttaataccgcccatggaaattaatgtgcccgccaatacaatgtacatgccaattggtcctaggattacgttgaaagcatcttgtaccggtgcttttgtgttagcaaggtcagatcctagaacaccaatagatacggcaagtatggccatatataggactgatacgagtagcatacacatgataatggcacgcggtaaattctttttaggattcttcatatcctctgcggcaatggcgataacctcaaatcctgtataagcaaagaagagaagcacggctgcttgtgcaaaggatccttctacataggtatcgtgtgggaatacaggtgaaaagttagcgccgttaataaagaatataccgatagcgataaatagggcgagaggtactaatttagagattgtaatcaagttattaacaaacttagacacgttaacaccaaatatgtttacgattgttaagcctacgattaatataaaggaaatgacatcctttgcaaaatcaccacttaaggctggcactgctgcacctaatgctgtggcaaagccaacggccatggcggcccaagcaataacggttacaatccatttaaggacgcctacctcaaatccccaaaagtcacctaatgcatgtttggcatatagataagggccaccattacgtgtgaaaaggctagccgcctctgcaaagcacaaggcaatacatcctgcaatgaccgcatcaaataaaaggacccctaaactggctgacccaataatggcataggccttattaggtaacaagaaaatcccagtaccaacgataccattgattccaaggagtacaatactccaaaatccaaatttacttttcttatccattagttgacctccttagtcgcatctacgaaggctttaaataatgtttttgcatgtacatcttttacatgcatcatttctggatggaattgagttgctacgaaccatggacgattcgtatcttctaatgcctctactgtaccgtccttggcacggcctgtaacaactaggctttcaccaatattccggcacgtttgatgatgatgagaatttgtaatccatgtagttgtgccgatgattttcgctaatttagaatcaggttcaatttccaccgtatgcgtaggtaatgcaggcgtttgattttggctgtgcttaattgtgcaattttcatcatatggcaaatcttggtacaaggaaccaccacgataaacattcacgatttggcaaccgcggcagatggcgaatacaggaatatttcgtgcctccgctgcagctagtaaggcaaaatcgaattgatcgcgttcagggaacacatcgccgatgcctcgcaatggttcttcaccataattgagcggatacacatcatgcccacctgtaagaaggaggccatcaacaatattgatggtttcctttgcttgctctaaattttctgtaaaaggaataataataggaatgccgccggcttcttcgatggagcggacataatcctgattcacataagaacggattaaatcgacataagcgccgctgttatcgcgtagcgtattgccggagattccgattaatggttttttcatactatcacctcaatgtgtaaaatactgtacatcaagtacagtataattataattcattttcctataatatactataacatattatgcaagtaggaattgcgtttgtgtaaatatagctaatattggatgattctaaaataaatttatagaaatttgataaaaaattaatacttaggtataatgtgttttagattgtatagtataaattgaggagagaatgtatgaactggaaacgtgtgatagcattaggtctattaggtattacattaggtgtggggcagtcgtatgggattgatattaatattccaggtgctgttccttctgcactagaagatgcatatcaacattatcggatagatcctaaagtaacgcgcttgatggaacagagtatagaaaaagaaatacctgctattcgagcaaatgatcctaattatgataaatcaaagttagagtctgatatttatgctactaaagaattaaataatgcggttatgtattcacggacagttgtaattttgcgtgataatggggcagatataaaatttacagctccttatgaaagtggtataggaattgcaaggttagataatacaaaagatatcgttagaatggggcgtattttttctcgaattgctcaattaggttatgaagttcgccctcaaccaaaggggaatctttgggagaataccaatattgaatacagtaagctgaatagtgagatattgcgtagagaatttgaagggagcaaaggggctatacatctggatggttctaagatgttaggtagtggcacttttgcatataaaggtatggagaaggcaacttgggatgtaatcaaatatgattcagataatataataggtacattaaattttacactccctacatcacctaccagaagttatcacataggatatcagatgagtgatcgtttaaatcatgatgttttaaaagataatgaacaagaaatcatgaaatcaactatggcaccattagttaatacgattttgccttctatcaaacccgcatcagctattttagaaaatacgactccagtacgtgtagaaaactttactttccaagtatttaaaaatagtaagcatattggtcgtgagactcttaagaatgggggctatagggtaaattattcttctggaaatataaaagaagagatcattgttactcctttgtcatcaatagataatgttaaaaagcaaaatgttttatttaactatttaaatgattttgtttatactgaatcgttaagtaaagggaaacaaattcaatcggctactgtttggaatgatgctacaccaggtgtgtatttagaggttgaaggagataaatacacattgtttactatgacggtatatgacgaaaattatcgttatacatacctggtaaagaaacctcacgatattcatgtaagtaattataaaattagagatatgatacaatatgtggataataagagaaataaaacaaactataataagataaaactaggtctaggtgtaccacctgatgtttttgatgatacaaagattttcaataaatagtgtctatataggtagtataaaaagaggaccggctcaaacgagtcggtcctcttactatttgtatatgtaattatctaaagaatctaccaataagtggcatgctagcaccatcgtttttattaagcccttttaaaagaaccataataatgacgtagagcaacaagccttcgatacctgtgagtatgaagttagcccacattggtaaaatatctattaagtagtggtagctcaagaagatgagtatacccatgacaccggcactgaccacgtttttccagagaagggaaatatcgaggaagtagcctgtgtattttttgatgtaaatcaaattgagtaacgctgcaaagccaatatcagcaacggttgcccaggcagcaccaccgatgccgagccaagggatggcagtcaatgtccagttaaggataaccttgatgataagggaaatacccatgttgataactggaatgcgtggcttattaaggccttgtaaaatccctgttgtaacttggtgcacgccgaggaagaagatagagaacgcagtgatttgcgttgctagttctgccttaggagcattgtaaatcaatgtaacggttggggcagcgagtacatataatagtaccgtaaatggtacggttgccataaatgttaagcgcatagaaccagcagtgcgttcgtaaataccttcatgatctcgcttagcaaaagcatgagagatggctggtacgatgctcgtagcaagggccgctgtaataatggtagccaagttgatgagcggcactgccatacctgtaagataaccgaacagttctgttacttcattcatcgggaaattagcgtctaataggcgacgtggtacgatgagcaaatcaagattggccgttaatggtaacatgatgctggctaaggaaataggaatggacaacgataacagtcgcgataaaatttccttggccgattcgcgtggaccatcgtagctttcaccagtactactagccttaggcaatttgtagtaatagtacaagagcacgaggaaggcaccaaaggcaccgacgccagcgcctaggctagcaccgccagctgcagccggtaagccatatggcaataagatagccgctgcaccgagcataacgataacgcgcaatagttgttctacgatttggctgaccgccgttggggtcatcatttcataaccttggatatagccgcggaaacaggaaatccacgttacaaagaatactgccggagcaagtgcgatgattgagtagtaggcacggctttcagcaatgagaccgctagagataagccaatctgcgccaaagtacatggccaagctggcgataaagcccgtaatggtcagcattgtgaaagaaatattaaatactcgtttagcaccaccaaagtcgtgtaatgctaatcgttctgccgtcaaaatagagatggcaatcggcacacctgcgctcgaaatttgtaatagtaacaaatagataggaaaggccatctggtagatcccgatgccttccccgcccaagatacgggagagaagaatccagttgatactaccgatggctttcactacgaaaccggcaatggttaagattaaggttccttttacaaatccactagccatagattatagtttgtgagaagaacctaatacatctttaattttgtgagctaccatgcctttaatagcgtcacgagcaggtcctaaatatttgcgagggtcaaattcggatggattttgtgccaagtattcgcgtacagatgcagtcatagcaaggcgaaggtctgtatcgatgttgattttgcaaaccgccatttgcgctgctttgcgaagcatttcttcaggtacgccttgtgcgccagggatattgccaccaaattcgttacattttgctacgaattcaggcaatacggaggaagcaccatgcaatacgatagggaagttaggcaataatttaccaaccttttccaaacgttcaaagtcgaggtatggtgtgcctttgaatttgtaagcaccatggcttgtaccgatagcgatagccaaggaatcaacgcctgttaatgctacgaattcagcagcttgttctgggtctgtgaagcgagcatctgcatcggatacgttaacgtcatcttcgacaccagctaaacgaccaagttctgcttctactacaacaccgtgcgcatgagcgtattcaacaacttgttttgtaatttttacgttttcgtcgaaatcgtgatgagatgcgtcaatcataacggatgtgaagccgccgtctacgcaatctttacagatttcaaaagaatcaccgtggtcaaggtgaagagcgattggtaaattgctatcttccaatgctgcttccactagttttacaagataaatatgtttagcatatttgcgagcacctgcagatacttgcaaaataagaggggattgttcctcttttgctgcatcgacgataccttgtacgatttccatattgttaacgttaaaagcacctactgcgtagccgccttcataagcttttttgaacatttccgtagtcgttactaatggcatgttgtcctccttggctttatagccgattgtatgtattttgaaagtattgtcatcaacttatgatgatacatatctattcattgttagtatatcaagaaacgatataaagcaccacaattttataaggttttctagatgaatctgttagagatatagtaaatctttcatatccgttggcagaggtgctcgtagttctacgtattcttgtgtcataggatgggtaaaagctaggtacccagcgtgtaatgcttgccgacggatatgatctaaatgaccgccatataaatcatcaccagctaaaggaaaacctaaatgggataggtgaacgcgaatttgatgggtccggcccgtatgcaatacacattgcacatgagtcagaacctgttgcgtgctcaaatttttatccatttgtacaggctgggaaacaatgtggcgtgccaataccgtcacatcagtacgagccggtttgccaattgatgtgcaacaccgttcgatgatgctacccggtttacgtccgatgggataattaatggttagcgattgacttggcatagtaccttcaacgatggcgtcgtagaccttttgaaattttgtgcgttgcttatcaaaggcgtgttgtactaccgatgttttagcgatgatgacgatgcccgatgtgtccttatcgaggcgatggacggggtgaaagtcataagcctgctcagtttcgtcataataatagagcacgccatttgccaatgttccatcgcgtaccgtcgaggtagggtgcataagaacaccggaggctttatttacagcgaggatgtgttcgtcttcgtatacgatttccagattcattggagtgcgtgaaaattcttgttcaggtgctaatttcataagtagatgatcaccgccatgaacaagggtatcccatgtagccggttgtccgttaatggtaatgataccatcattttttagacgccggcgcatgcgctgtgaaatatgctgttgttttataatatgattcattgattgcgtgtgtatattagcatctacaatcaagtcgattatggttgctgttttcataggtcctattatagcaaaaaaataatggatgaagaatttttcataatttattgtatatatataggttcgtatagtataatttatattaatatttgtttataaaatttttatatctagagtcctttgagtaataagaggagaggcctatgaaactcaacagaaaatctttattagtcgcatgtgtgttggcggctatgtctacgagtgctttcgcagcatctagtacaacatccactagtagtacaacagtaacaaatcatgatacaccaacatctacaagtacgcgtgtaacacgtgaacaacatagtgcatccacatctactactaatatttctacaactgaaaaggtatctactaaatcaagtggtacaactgtatctgttggtgtagggcaattaggtgattatgtagccgtaccaattattggagccactcaaaaattagcaccagaagcatttaagtctctccaagcaaacattgatgatgctactgaaagtaatagtgcttttattaaactgggtcaattagctaaggttaagcaaaatggtaaatggggacttgtaggaactaatggtcaagttttgcttgatccacaatataaagagttggatccatcttatgctgaggacggaacatacttcgtaaagttaaagaaaattttagaacatattaaagtagatggtaccgttttatcaagtggtaaagatgccttagatgaacaggttaaacaaattattaatcatcatgatgagactgtaaacaagaatcaaaattcgttaaaccataaggaaacctatgcaagtgattcttatacggccgtttctgtaaaaggaaaatggggctttactgatgcatcaggtaatactgtaatcgcaccacaatttaaagaagtatatacgaaatttagtgaagatcgtgcttttgtaaaagatgctaaaggtaaaaatgtagcaattgatggcacaggtaagactgtatttgaagcaccatctaatgatattgacgcatatgatgatggattggcagaattccgacgccatataagcaagtttaatcttggaggcttgttgagtatggctgtaggaataacccttagtaatcatggcggaatctattatggtgatgcatggaaccctgtatatgatggtgtaaagcgcggttatattaatcgtgatggtaaaattgttatcgatagtaaaaatgatgcagtttggccaattactgcttacggtacacttgtgaaaaatcaaggtcttattgggttcgtaaatcgtgaaggtaattatattattcaaccaggtaattatgatttaggcgaatttagtgatattaatggattgttagtacttatcaataaagataataaaaaagcgggtgtatttgacgtggatacaggtaaacaagttattccgtttacctatgattctattagatttgtaagcctaactaatatggttgtcgtgagtggtgataatcaacagttaatcgatatgacaactggaaatgtcattttgactacctccaaagatatggggataaacaaatttagtggaccatatacttgggtacataagacttctagtgattataagcttattgatgataatggcaaagtattatttagtgataacacaatcacttctacaatgcctgttaaacatggttttgctccggtaaaatctcaaggtaagtggggaattgtaaatcttcgtggtgagtgggttgtacaaccacagtatgaggatattgagattttatagatagattgtattataataaaagtttttgtattagttatcctagtatattatgttgtttaactacaaatgaaggaattcattaatttttcataatatgctatactgtagttataaattgtcttgtgaatttatttgcttttggaggaatatatgaaaacatctaaagcattattaaaacttttggttgtaggttgtcttagtgtttcttgtgcattaccactgactgcttcagcagaagatacaagtgcaccaagtgcgatgcaagaatctgtagttaagacagaattaccatctggagttaatcgtattcagttgttaaagagtggtgaaactacggcaactgtaaagacatcatctgttgctgctggacatgcgtatattcctaaagatacaaatataaatttagaattaatcgatcctattagttctaagaaaagtaaagaaggaaatacctttagattaaagaccatagaaaatttactaattaatgatgtagttgttattccagcaaaccaagaggtattagggacaattacaaaagcaagaaagaatggtatgcttggtcgaaaaggccgattggaatttaaaattgatagcattaagactattaatggtgtaaatgttccattaactgcagaagttaaaggtaagggccattctgataatggagcagttgccgttgctgctgcagtaagtttggttggtggcttgttcatgaaagggactaatatttactatgaacctggccaaaaatttgtagctgttgtatctactgatacagatttaaatacaacagtggaagatttgcctaatgctatgaatccaagtaaacctactggtcaaaatattgttttaccaattaaataaaatataagtagtattaatacccaatagtgataaatttaaaaatattgctattgggtattttagttgattatataaagataataggatacgaagataattattgtatttagattaatgaaaaatcatcataatctaattatttgaattcctagtaaatatagataatttacgatataattatatagatgtattccattcaatgaatacgtggatgatgatgaaaataatgcgtgaaccccatgcccaacgggttcaggtgtaggaggtataaaatggctaaagattgttcctttgacgttgtatccgaagtggatatgcaagaggtagataatgcggtaaaccaagcgaagaaagagattggtacgcgttatgatttccgcggttctaaagctgaaattagccttgacggtgataccattaaaatcatcggtgatgacgaatataaattgaacgctattatcgatgtattaaaaggcaaaatggttaaacgtaatgtagcggttaagaaccttgattatggtaaggttgagcctgctgctggtgccactgtacgccaagtgattactattaaaaaaggcattacaaaagaaaatgctaaagaagtagtaaaggcaatcaaaaatatgaagcttaaggtacaagcgtctatccaagaggatcaagtgcgcgtatctggcaaggataaggatgatttgcaagcggttattcagatgttaaaacaattggacgtaccggttgaattgcaattcgttaacttccgttcctaattatataagcataagagatagggttagattgattccagtgaatcgctaaccctatcggtgtaggaggcgctatgagagtagaggacatgaagggtggttatacgaccggttcatgtgctacggcaggcatgaaagcaggtttattggccctcttagaacacgatattgtggacaaggttgtcattgagaatccgcaaggtcaattcattgaggtacctattaaatctgtggaaatcatatccgaaacagaggcaaaggcgactgtgatgaaggatggcggtgacgatccagatgtgacccatggcaatgatgtggaaacgacggtaacccttgatgacacaggcaagctacgttttcgagctggctttggtgtcggtacggttacaaaacccggtcttgccatgccccctggacaaccggccattaatccgggccctagagcgatgatgaaactcgtatttgaagagttttgtacgcaaggtcaaggtgtgacggtaacagtaagcgttcctaatggtaaggtgttagctaagaagacgttgaaccatacgctgggtatcgaaggtggtatatctattatcggtacaacgggtatcgttaagccgatgagtgaagaagggtttaagaattctctcgtgcctcagttaaaggtaatgaaagccaatggctgcgaaacggcagttctcgtaccagggcgtatcggtcaagatttagcggaacaagtgctcggtatccataagaaccaaatggctgaaaccagcaacttcatcggatttatgcttgagcaagccgttcatattggctttaaacgtatcttgatcatcggtcatatcggtaagctcattaagcttgctagcggaagtttccatacccataatcgcatgagcgatggtcgtatggaaagtattgtagcctatgcagctcttgaaggagcatcccaagcggtgtgtgaagagttatttaattgccaaactacagaatctacgttccctatattagaacgagaaggccttaccggtgtatatcaacgtgtagtagaccgcgcatctatgcgcagtgaacgatatattgccaatgaggctgaagtaggtattattattaccacattaaagggtgagattttggctatggataagcatgcaaaagagataggagagctagaacattggcacataccttgtatatcgtaggcattggtccgggcaatcctgattatgtggtgcctaaaggccttaatttaattaaacatgctaccgttttggtaggtagtgaacgctccttggaggattttaaggaacctggacagattacgtatcctgtaacggggaaactaagttggttatccgaacaaatcgagcgtgaacttcacgaccatgatgttgtggttatggtcagtggtgatacgggctactatagcttgttaccgtatttgaaaaagaaatttcctaccacacgcattgacgtggtgccaggcattagttccatgacatttgcctttgcacgccttaacgaagtgtggcatgatgcggatttaatgagctttcacggacgccaaccagcgcctgaaagactcgtatatgaagcggggaaaaagatgggattcttaacggatcctgaatataatccagcgcatattgcgcgtattttaatagatgcaggatggccaaaagaaacgagagcagcagccttagagcgcttgagttacgatgatgaaaaaatcgtagattctacactagaggtattaactgagctcgaaggctttggacattctgttatggtggtactaggatgagacattttttcggaattcctgatgaggaatttatacgcggtgacgtgccgatgacgaaatgcgagattcgcaaagccgttatgaatgaggcgcgcatcgaagaagatagcatcgttcttgatgtgggggcaggtacgggttcgatttctatcgaagctgccttagcggcacctaaaggtcatgtatatgctattgaacgttttgataaaggcattgagttgattcatgaaaatatgaagaaattcaatgtaaataatatgactgttataaaatccaaagctccggagggtatggaagatttacctgagcttgatgcggttattatcggcggcagtgctggcggtatgacgggcattatggatgaagcacaacggttgttaaaggtaggcggtcgccttgttgtaacggcggtaacgatggaaacgggctataccattttaaaagagttgaaaggtcgtcctttcacatatgaagggtaccaaatgtccattagccgctatcgtaaggctggtccatatcatttgttggatccattgagcccaatttttattgtatctgcaacgcgtatcgcagaaggagagtaatatggttgacgtgcatattgtaggcgcaggccctggggatccagagcttattacgcgaaaaggctatcgtttagtgcaagaggccgacgttgtcatctatgccggttccttggtaaaccctgctattttagaggcttgtaaaccaggttgtgaaattcataacagtgccactatgaaccttgatgaggtattggctgttatgaaagctgccgtagcagacggcaaaaaggttgttcgtttgcacaccggtgaccctgctatttatggtgccattcaagaacaaatggatgccttggctggcatgggtattacctatgaagtggtacctggcgtaagttcgttccttgctactgcagcagcattaaaacaagagtatacattgccaaatgtatctcaaaccgtaattattacgcgcatggaaggccgtacaccaatgcctccaaaggaaaaattgcgcatgttggcggctcatgaagcgaccatgtgtatcttccttagcgttcaaatgctagataaggtagtagctgaactcatcgaaggcggttatgataaaacaacacctgtagctatcgtagtgaaagcttcttggccagatcaacgcatcatccgcggtacattggaaaccattgcggatatcgtggctgaagaaggcgtattacgccaagctatgatcgttgttagtcatgtactagacagcgaatacgaattatctaagctttacgataagggctttgctcacatgtatcgtagtgctaaggactagtgtgatgaaagaactagaatctgattcacctatgacaggagcaaagaagaatagaaccgctattctttctgtgtctgagcgtggtgctaggctggggcaacgcatcaaatctttggtggcccctcatgcggattgttatgaaaaggaaaaccgtccctctggtggtgaggctatctattttgattctctcaaacatcacatagggcagatttttaaggattatgaccaagtattatgcattatggcactcggtattgtagtgcgcatgattgcaccgtatattgaacataaatccaaggatcctgccatcgttgtaatggatgaggccggtcatcatgttatcagtttgttatctggtcaccttgggggcgccaacgaatggacgcagtccatttcgctggccatcgatgcggaccctgttattacaacggcgacggatgttaatggattgccagcgcctgacgtgttggcgcgccacgagcatctgttggtcgacgattttcacacattagtggatgttaattccgctgttgtggctggtgaaagcgtcaactattacatcgatgaaaccttagtcgatgctaatcggttacgcgatgctgctgcattacatatcggtacgcatggcactgttcaggtggtagatgtatttacattgcctgagactgatggcattcgtcgcgtagtgataacagataagatgatttgtgagtatccagagcaactcatcttacgccctcgtacgtatacgatgggcatcggttgtcgccgagatacgccaaaggagctcatactggatgccattacacaatctctacagacgcataagctttcaccaaaaagcatcgtcacagctgcatcggttattgtgaaacaagatgaagtcggtctattagaggccgtaaacgaattagggtgggctattcatttctacacacaagaagagatagcacccgttatagaagaacaggatttaaaagaatccacatttgtaaaaggaacaataggagtaggaaacgtatgcgagacaacagcattactagcggccaagagccaaatattaatacagcacaaaacggtgtatcccaaaacaacggtagccattgcacaggtaacatcaaagtaatcggcattggacctggggacgctgaatttatgacaccacaagcacgggaagcgattttagcggcagatcgtgtagtcggttatttaacatatcttgatttgattaaagaccttatcgcaggtaaacaaacggtaggtacagcgatgatgcaagaagtggatcgttgtcaacaagccgttgatttggctgtagaaggtcaccaagtagtagttgtatcctctggtgactccggcgtgtacggcatggctggtcttgtattggaattggctaataaagtaccagcagacaaacgcccttccgtggatatcgttccaggtcttagtgctgtcaacgtagcagcatctgtattgggtgcacctttgatgcatgactttgccgttatttctcttagcgatttgatgacaccttgggatttaattaaaaaacgtgctgacctttgtgcacaaggggatatggttatttccttatataacccacgcagtaaaaaacgcgtaactcatttagatgaagtacgtgaaatcgttctaaaataccgcgaccctaaaacacctgtaggcatcgtgcaaaaagcaggtcgtccaggtcaacatatggtaatttctgatctagaaaacttcacaaaagaagaagtggatatgcaaacacttgttatcattggtaacagccaaacttatgttgaaaatggtcgtatgattacacctcgaggctataaattatgatttgggtcattgctggtaccttggatggtcgaaccttagcggtagatatccaagaacgaaccggtgaagaggttctcgtgacagtagtgagccaatatggggcggaattggcagctcatgaaggcattacagttcatacaggacgcctcgatcaagaggctatgcaacagttgattaaggagcataatgtgcgcctactcattgatgcaagccatccgtatgcggctattgtgactgcaacggcacaagatgcagctaaggcggtgggcattccttttgttcggtttgaacgaaaagaggtaccattgccagactatgataagttgcatatcgtcgtggatgaaatagaagcagctgatttagctggcaagctggctaaggaaaataacaatcatgtatatttgactactggtagtaagacgatgcacatctttgctaagtctgaggccttacaagactgtgaagtgtggacacgtattttgccaactgctgaggtgttgcaaatgatggaagacctcaatgtgagtcctaaacgtatcgttgccgtacaaggtccattttcttacgatatgaatcgtattatgttccacgatacaaaggcgagcgttgtggttatgaaaaactctggcctcgtaggtggtgctgatacgaaattacaggctgccatcgaccttggcatccacgttattgttatcgatcgtccacgggtgaaactagaatgccctgtggtatcatcgaatgatgaatttttcaaattatgggaggacactaatggattacgttaaaaatcctaaagccattgaagataaaagtatggaaatcatttacgattatgtaaaggatttaggtttaaccgatgatgaagtacgcgttgtatctcgtacagttcacgcatctggtgacgttgaatatgctcaactcgtaaaaatgagccctgacgctgttcaaaaaggtatcgaagcattagataatggtgcagatatttacactgacgtagaaatggttcgcacaggtatttctaaaccggctcttaaacttcgtggtaatgaagtacattgcttaatcaaagatgaaaatgtagctaaaatggctaaagaattgggcgtaacacgttctatcgctgctatgcgcacatttggcaaacaattagaaggccaaatcgttgctatcggtaatgcaccaactgcattgtacgaagtattgcgtcttgctcttgaagaaggtattaaaccagctcttatcatcggtattcctgtaggctttgttggcgctgctgaatccaaagattatttgatggaagtatccccagttccttatatcactgtaaaaggtaacaagggtggtagcccaattgcagcatccgtatgtaatgcattactttacacagatgtaaaacgcaacgatatgctcttcgtagaaggcaaagaatctaaataaaaagtaacccgaatcgttgcatactgctggcgattcgggttttactgtatctattatgaggtttatatgtataatacgggtgctgatagcaccatgtattggtgaaaggagaggttactgtggactctctgaatgaacgaaaactatttcgtatatcagttattattgtcttggttattgctgtcatagctagcatgattatctcactgatttggggctccacaccggtgtcactatcggagatttggcacacattgtgggctagtgagctaacagatacagcatcgcaaatcatttggaatattaggttgcctcgtaatattgttgctgcattagttggtgcttgtttagccgtatcgggtgccattttacaggcggttatgaagaaccctttggcagatcctcaaatcgttggcgtttcctccggtgctggacttgccggtgttattatatttattcttttccctggctatgatcatattgtgcctctcgtcgcctttataggtgctatggctgcggcgttgatggtatatgctcttgcttggaagaatggtgtacgcccaagccgtatcatcttggctggtgttgcggtggctgcttttttaggctctggtatttctgcactacttgtattctatggagatcgtgtgcaaggcgccttactttggatggtaggtggcttggctgcacgcagttggccacaagtagaggttctgttcccatacgcgttagtcggtcttatttttgcttgtttaggtgccaaacgtcttactattttaagtttaggtgatgaaacagcaaaggggctaggccttaaggtagaacaaacgcggtttattatgactgctgttgcggctttattagcagcaggtgccgttagtattgcgggcttaatcggtttcgtaggcctcgttatacctcatatgttacgacttatcatcggtaatgattatgcgtatttacttcccggctctgcattattaggggcactcgtcctcgttgttagtgatacggtagggcgtgttatgtggagtccaattgaggtaccggttggcattatcatggcattcttcggggcgccattcttcttatatctattgaggagggataactaatgaatacggctattgatgtaaatcagttatccgtcactctcggaaatcgtcatattttacatgatattaatgtatctgtccctgttggtaaaataacgactttaatcgggcctaatggttgtggtaaaagtacactcttacggtctatgattggatatattcatagtcctcgtgaatgtgtgactattttaggtaaaccattacagtcatattcacaaaatgaattagcacgtcaaatggcgtttctgccacaggtgcctaatatgccaaaggatatgaccgtagaagaattggtatattgtggacgctatccataccaaatgtggtggaagaatacggctaaagaggaccgagaaatcgttgattatgcattaggaattacaaaaacgaatcatttacggaatcaattaattccatccttatctggtggtgaacggcaacgggtatggattgctatggcgttagcacaacaacccaaattattagtgttagacgaaccaacaacatacttagatattaaccatcaactagaaatcatggaattgttaaaacgattaaacgatgaacaagggttaaccgtattgatggtactccatgaattgacgcaagctgtacaatattctcattatatggctattataaaagatggtcatttagtgacagctggagacacgaaagaaatcgtatcggatgaactatttagagatgtattttccgtagatgttcaaatcgatacctttgatgataaacaatatgtacgcgtaaaaggtttagttgagtagatggctagactaatagtgaaagagggcattcccgaaatggggaatgccctctttagtatgttaggatatgttaaaatgtaacatcaatgccatatgcttctttcactaaacgagccatagcctcaggtgtttgtagacctgggttaagtaggaatagtttagatggtaagtagatgacacggttgttttgtacagccttaagattagcccatgcaggattatctgtcatagctttcttcatggcctttgtaatttcttcttctttacccatggtaacgacgaagataatatcagggttatcagcggttaatgtttcaagagaatacggtaccgttttatctttggttgtaccatctaggtgagatgttacaacatttgtcatacctaattctttgaccatagatgcagttaccgcttcgtcggtttcggctgtcacacctttaccggtagcacgcaatacggcaatacgtgcaggttgttgatttttaatggcatccttaaccttttgaatattactttcataggtggcaataacggatttagccttatcttgatggtttgttaactctccaaggaatgttagcattggcacattatccttgataccatcgtaattgaaaagtacggctggaatattgttagattgtaattgggattcatattttttatgttggttttccaaacccaataccacatctggttttaaacctaacaattgttccatatttatgttagccgtttgacctaatgcaggtaatgcttctaattctggcgctagtttatctgttgtgctagctcgggaaattgccttgccatctactgcgtatagcatggacaatacagaatttgaaagaacggcgatgcgttgtggatcctttggtacagtgtaggtttcaccattaaaggtaagttccttcgtagtagcagaagagctggatgtggacttaccacacccagctattgctagtacgatcatgaccaaagcaagactacagagtagtagttttttcatgatgtactcctatgtacgttatataacgatactagttaaattgtagattgattatttttgtaatgcgtcccaagattcgttagcacgttcaacgaataagttacggatgttaggattttcacctaagccatggatgtaagtgtcaactttgaagccttctttttcaagaatggatttatgggattctggttctgcaccagccatgtcattatttgcatggtcgccagctaccatcatgaatggcatcaatgtaacgtgtttaataccatgtaatttcaattgagggataacttgttcaagatttggagtaccttctacagtgtagataaatacatttttcataccaagagtatggatacggtcttgaattacagaatagtaagcattggaaggatctggagtaccatgagccatgataagaagaccgtcttctttgcctaatttagggaattgagattgaacagcttttaatgtttcaataacttggtcagtttggttttcttgacccatccagtacataagagatgtaccaagtgtcatttttttgaaattatctttgtacaaattatatactgctgcatcgtagttgtattccataccaggaattacatcaagggatgctaatgcaacgcgagtgtaaccgtcttttttaagttcagccaatgcttcttcaggagttgggtaagtaataccttctttttgttggatacgatcacgaataatatggcttgtgaaagctgtaattacttttgtgtttggatgagctgctttaatagcatctacagttgcatcgattgttttcgcacgagtatctttataagttgtaccaaagctcataacaaccatagcatctttgtttggcaagttttgtaaagcttcagtattgtgtgtacgaacaccaattgcagcagcttcttttaatgctggagtaggatcttttacttcatcattcaattggtatgcagcgtggccgagtacaggagcaccaaatgtcaatgcgaaagccgccaatgcagcagaaactgttaatgcacgtttttttacactaatcataagtgaatcacctcattaaacaacatcatctgactatgcagacataactataatctatgaattaatcgtagcaacctaggggatggatgtcaataaaccccatacctgtacacgtataaataatacgattgttttttataaaaaatcataataaatgaggaaaaatcttatgttttataaaaatattcttattggttatgacggtataattataagtaattcaatgtttatgataggatttatcattctgttttgttaaaatgattaattgtataagatgttaaattaatagagaggattttattttctgtggagagacaattattaagatttttaaatgaccaacgttttagatgggtttcatcgttaattttactggtcggcttctttatgggtagtttgcaagatgttaattatgagttctctatagcagttttagaaggtatgtttcctgcatttttatatgcttgtattttcttaatacctgtatatagaagatgaaaactgtataagcttatatataatcgagcaataagaatatgtggatcaaaaagaaaagtatttttatatattctattaggactgcatggtaagttactgggaatcaatatagcccataaaaataagttcaaatgggcagtcatcatacttgcgtatattatttttgtggggtggtcgatacaaagtgagatgccatttattttaaaattactagttatacttatagcgacatatagatttgtagttgctataaactcgtaaagagagagaagtctgttggagaatagtgagatatttgcatctttctgaccataaggagtcgtaaataatgataaagagtaattttactaatgaggctatttactctaaatactttcaatcctaagattattaaagttactattgattaaggctggaaggatattacaaaatatgatcttgaaagatattataagcagaaagacaataaatgatgagttgtttttattaaaaactaacattaaatctttaattttatcatggcgaattactcgtactccttacttgatttctataatattagtatatttttcttatattgctatgccaggactaacatttaactccttaccagaatatgaagagagtatagtgtctttaattggatatgctaatttaggaatatcgttactaattttttccgtactagcaattagacgaattttagacgtcgagcaaaaatggatttcaggatttgttatagtagccggtatatatacgttgtatactaattatttaaattattcaccacctatattagcggtatcatatacagaggattcattgattacaagtatgtcagttaatttaaacatatgggtagtagggttattaatattatctttgtttcctagtaatgaatgcgataatgactatggtttatcaaattgtattgaaaaggttggctctaattttataagaattgagtttggcggatttgaacaatttttagatgagttttccttatataaaatcgtaccgatttttaaaaaggttttgtcgttggacttatttaactggcgggggcgtatatcaagaggtgaattgatatattattatatggtatatcaaattatggttctgttacttgtaatattaatttattcaatagggactattttatctaaaatatcattagaacatatatttttgatttttattgtgtctatttttttgatttggtgctttatatacgtattaagagtattaattcagcgattacatgattcttatagtagtgcattttgggtatttggtttgtttataccttatgtaaatgtttatgtaatatatttattactagtaaaaggatcatggcaatatatagaatcttcaaaatgattatatgataatatttctcattgactttcatacgctaatcttgtattattagtacatagtagttgataataattttcatttatgaaaattatttcatatatatgggtatatggaggtcacatatgaaaggtataatcattgcatcctttggatcaatttataaagaagcagtggaatcatccattggcactatagagtctaaagttcgttccttatacagagatgtagaggtacgacgtgtatttttgtctgatgcattagtggaaaagtggaatgaaaaatatgatgatacgattgcttctttcaccgacgtcatgcaagaatttagccgcaagggaattgatgaggtatatattcaaccgattactctcgtagcggatcaatgctatcaacaaatgcgtaagcaagcacttaagttcttacatagcagtgaatataatttctctcaagttaatatcggtaaacctttattaacatcgttaggtgttaaaaattacgctgatgattatgaagctacattagatggcatcatgcgtcatattaatactaaatctcttaataaatccattttattgatggcaaatggtcaaaatcaattggaattttccacattacaattgaaagctatgtatggttctgctcctaatgtagctgtatttaccacaaatggtttccctacatttaagcaggccttaacattggtagatagaatgggtcataaagatgtactcgttgtaccattggctttgattggttccactcatttaatggattatcttggcggtgatcgttccgattctatttatgcacttttgacagaacaagggtacaacgtagatatttggaatgaaggcctaggtgaaaatccatatgtacaagatttattcttgaaacatttgggtcaagcgattcgtatgtctgacagaaaacgtagctctcaacgcgaatcatatcaaactgttattcgaccttcccgtatagaagcacaaggaatgatttcctaattacttctggtaaggttgtatataaactctctcataaatacacactatcttcaaaaagcatccacctttaagggcggatgctttttgttattgtacgccgaataggcatgactaaacccccagttaaactgggggtcggtaaaaaattcttagagaaaaggaaagaacctcctagtggtaaaatgaagttggtctggcaaccacaacatttcaacataggaggttcaatgtcaatgaatgacgtaaaaagcttatcacatagtaaatggagatgtaaatatcatattgtttttgcaccaaagtatagaaggcaaataatttatggacggataaaagctgatgtaggtaaaattttaagagatttatgtaatagaaaaaatgtagagattatagaggcagaatgctgtccggatcatattcatatgttagtaactattccaccacatttaagtgtatcaagttttatgggatatttaaaaagcaaaagtagcctcatgatattcgataaacacgcaaatttaaaatataagtatggaaatagacatttctggtgtagaggatattatgtggatacagtgggaagatacgaaggagcgataaaagagtatattcgcaatcaattacaagaagatatagcacaagatacattaaactttaaagaatataccgacccgtttacgggtgagccggtaaaataggcaaaataaaagcccccgagtagggggcagccagtggtaatagagtggttgtcagatcattcaaagccctctttagagggccaccactagagaaagacccttatagggtcagagcaaaccacccgttcaacgggtggttatgattcatctatatgggtatgaaagttaattataatattacctttatacggggtacggtatccaactatagtaatgcgtgtggtatgatgaatagtgaattatatttgataaggagaccgttatgaaacaagctatattagtagtggcctttggctcaacagttgattccgctcgtgaacatcaaattgatgctgttgtaaaccgtattaaagagaaatatacagattatgaagtgcgtttagccttttcatcgcgtatcattgtaaagcgtttacgagaccgtggtattgaaattcctacagagcaaggcgcattagatgctctcattggtgaaggatatacagatatttatgtacaaccattgcacttcactggtggtgaagaatttgataagttgaaacataatattttaaatcacgaacgggcacaagaacttaatacattgcgagtaggcagaccattggtatactatatgggccaagaagaacacccgaatgattatcaaattttaatcgacacatttgttacatccttatccgtcagcaatgaagatggtttattattagttggtcatggtggtttaggctctggtaattctgcatatgggtatttgcaatatcaattgattcgcagtggccttaatcatgttcgtgtagccactttggaaaatgctccttatgtagacgatgtggccgtaccttgggaatggcttgatggtaagaaacctaataagatttatgtgcacccattgctcctggtgcttggcgatcatgcgcttaatgatttatttggcgatgaagaggatagtgtagtcaatgtattgaaagaggctggttatgaagtagaagaaatgcatcatgccctcggtgaatatacagaaattcaagatatctattgccaacatattcaagattgtatcgatgatatatacggtaagcgcagcagtcatagaccggcgattccgaatgtgaaataagagtagactttcacaaacattttgaatatatttaataaattaggtataatagtaatgttaatcatattgaaatatagaataggagaatcatcatgaaaggtaaattatatggcataggtgttggtcctggggactctgaattaatgactgtgaaagctgcgcgtattgtaggcgaagcagacgttatcattacacctaaaacagaaaagaaagatggttctgtagcccttaatattgcgaaaccatacattcaagaacatactgaaatcgttccagttgtattcccaatggtgctcgatgatgctacacaacaagaaggttgggaagaggctaagcgcgttatcgtatcttatttagaacaaggtaaaaatgttgttttcttaacacttggcgatccaatgttctatagtacatatatgtacgtatatcgtttgattgaaaatacaggctttgaaattgaaacaattcctggtatcactgcattctgtgccattggttcccatcttggctatccaatcgtagaaaaagaagaggttttggctatcgttccagccactgcacctaaggaaaaaattgatgctgttatggctgttgccgatgatgcagttatcatgaaggtgtataaaaactttgacgaagtgcaagaagtattgttgaaacacaatatggcagatgatgctgttatgatttctcgcgttggcttgcctgatgaacaagttttcgtaggtcttgataatatgcctaaggacaagaaattaaactatttgtccacaattttggcaaaacgtaaagatcgttaattgactatactttgatatctgaatgcttttagtgaaaaccgtatagatagtattaataagaggtaatacatatgaatactgtacccattccacgtgttgttatagctggtaccaattccggtgtcggtaaaacgactattgttgcgggccttctcgcagcgtatcgagcaagtggccatggggtgcaatcctttaaagtaggcccggattatattgatccgggctttcataaaattgcatcgggccgtgaaagttacaatttagattcttggttagttccaccggatacattgccatcattttttgcatccatggcgggtgatgcagacctagccattattgaaggtgttatgggcctctatgatggtggccgtgagggcgtgagcagtacggctcaaatcgctaagcaattaggcgctcctgttgtgcttgttatcgattgtaaggccatgggtgaaagcgcagccgccattgccatgggctttagagattatgataaggatgtggactttaaaggggtcattttaaatcgtttaggttccgataaccatgaacgaatggttcgtgaaggtatggaaaaaataggcgttcctgttattggggctatacgtcgtgatgatcgtatgcattctcctgaacgccatctcggtttgacgccggttacagaaattgaccctacagaggctattgctacaattcagcatgctgtggaatctatggtggatttagaggcactttataaggtggcagccagtgccgcacctatgcctgcaccgattgatgcaaccaagggtgttacaaaacgaacaaaaattggcgttgcttatgatgaagctttttcattctactatccagcaagtttgtcggccttagaagcgcagggggcggaactagtttactttagtccattaaaagatagcgctattcccgatgtagatggcctcgtatttggcggtggtttccctgaaatgttcttacaggctttatccgaaaatacggctatgaaggaatcaatccttaaagccaatcaacgtcatatgcctatctatgctgaatgcggtgggcttatgtacctatgtgaacacattcacgattttgacggtaatgtgtttgatactgttggtgttgtgcctgccaattgcgtgatgcaacaaaaactgcaaaaggtaggctatgtaacagcaacagctaaacgcaacacattacttggcaataccggaacaactttgcatggtcatgaattccatttctccaccatggaaccaaccattgaagactttccatgggcctttcacttagaagggggccgcaaacctcagtcctatgatggaggatatgctaccgataatgtgttggcatcctatctacatcttaactttgcgggttctcttgaaggggccaagcattttgtagacatgtgtgaaacctttggtcatactaaataaatctattatattagtattaaatcttcatattaacaatagatgcagccctacatagtgtgacataaataataggagtataaaaatgagcgaacgtggtttaattctcgtcaatacaggcaatggtaaaggaaaaacaacagccgctttaggtgtcgttttacgcgctgtaggacaaggcttaaaagttttgattctacaattcatcaaaagcggccatggctacggtgaactagaaggcctaaaaaaactgggggatacggttactatcaaatctatgggcaaaggatttatctattacaatcgagataaggtaactgtagaagaactagaaaaacacaaagcagcagcccaagaagcatggaaaacactagtagaagaagtcaactccgacaaatgggatctcatcgttatggacgaaatcaacaatgccattaactatgaactcatcgatgttaactccgttgtagatatgcttaaacacaaaccagagcgactacatgtcatcctaacaggccgctatgcaaaacctgaaatcatcgacatcgctgatacagtgactgaaatgaacgttgtaaaacacgcttacgaaaaaggcataaaagcagcaaaaggaattgagttttaaatatagaaaattttcgaaaaagtccttgattaaactatatcgaaaatgtataatatagtcataagcacaaggtgctagtattctaagacattaagtatgtatataactataaccaggaggttaactatggctgtacatgattacattaaatctggcgatttcgctactgaaaaacacgttcctgttatcgaagctgctgacaaagtaaaagctggtgaagcatttgacgtaaaattatccgttggtaaagacattgctcatccaaacactgtagaacatcacattgaatggattaaattgtacttcgtagctgaaggtactcaattgccttacgaagttggtgaattatccttcaacgtacacggtgacggtgcaacagcaaacgaaggccctgtacatgcagtttccgcaggtacattggcagtatccttgaataaatctggtaaattgattgctgtatcttactgcaatatccatggtttatgggaatctgaaaaagctatcgtagttgaataatagattgtatttgactgtaaaaggccagccttagggctggtcttttttttaggctctataataaatgttggggtgacaccactacggtgtcacttccaacattatttttttgcaaaaaataagcatataaggctcacatgctttacaataaaagtgtcaaagtcctaaagaaaggatgtgagcttatatgcctactactgattatactgaatttttacataatgtaaaacaagaatatattacaaatagctatgaattagacggaatatttatttttgacatagaattaccagcaacatcacatatttgcccaaagtgtggagaaaccacaaagcatattaaggattaccgcatacgtactgtaaagtttggaaaagtacaacgaggtccactaattggaaaatacagacagcgtcggtatatttgtccgcattgtggtcattcttttgctgaaagcaatccatttgtacgaaaacatatgcaactaagtgtaactaatattagaatgctatttgataaacttactgaaagtgtaacctatacagctattgctaacgagtgtgatacatctattactacagtattacgttattgctctatgatcactatacctaagcccaagaccttacccactgtgattggtattgatgagtttaaaggaaatgcagaaggctaccaataccaagttaatttaactaatccagatacacatgaaatattagatattttaccgaaacgtgatacgcaagcattaatccactattttgcatcatttaaacataaggatcgcctacaagttaagtttattgtaatggatatgtccatacaatttaagcgcatcatggaggcgctatttccacatgcgcatattatctgtgatcgataccatgtatgtcgacttgtagattgggcggtagagcgagttagaaagcgtgagcaacataaactggctgcttattcacgtatgttaaaacagaatcgacgtgtactaatgaagcatccagaccatttaacggaagccgaacatattaaactatgtgaaatactcagaatatctgatgatttacgaaaagcatatgctttaaaactttcttttagaaaaatcttttcaatctatggtaaacaaagaatagctgcacatttaacgcattggttggaattagtaaaagcatctggcttaaatgaatttaataacttctttacatcatttcctgcatggatgacgcaattaactaatgcattcttacttccatattctaatggatacacagaaggaactaacaacaaaattaaagtattaaaacggataagctatggacttcgccactttggtagatttagagtacgtattctacttttgagcaaaaagaatggcaccaaccataactatgattggtgccaaagaagactcgtagggtgaataccccaacatttgacagagagcctttttttatgaagagtatgacacgtcacgaacattaactactgattataaatataatgtatgtccgctataaaaagaattttgtatttttatagtggaaaaatacctgtgtatacctttacagtgcggtttgttttgtggtaaagtatatgcatgttattttttagtacaatgataaatgagggataatagtggcattaatcgtcaaaaagtttggtggcagttctgttgcaacacctgaaaaaatatttaatatcgttgatcgtgtccttcatgaaaagaaagaggacgatcgcattgtaatagttgtatccgctatgggcgatacaacagatgacttggtagctttggcaaaacaagtaacatctaaaccatatggtcgtgaaatggaccgtttgttatctactggtgaacaagtaacaattgcattgatggctatggcgtttaatgaacgcggtcaaaaggctgtttctttgactggtgatcaagcaggtattacaagtagtgataactttaataagggtcgtattttaggtgttgatcctaaccgtgtattcgaagcattagatgcaggaaatatcgttgttgttgccggtttccaaggtattactgaatacggtgatatggtaacattgggccgcggtggttctgatacaacagcggttgctttagcaggcgctatgaacgccgatgtatgtgaaatctttacagatgtagaaggtgtatactctactgaccctcgcgtagcaaaggaagcttttaaactagaagaagttacgtatggcgaaatgcttgaaatggcacgtttaggtgcaggcgtaatgcaaccgcgtgctgttgaaatgggtttccgttatggtgtaccaattcatgttcgttctacattcagtaataatacaggcacaattattcgggaggattataccgtggaatctaataaacacgtaattacaggcgtagccgatgatacaaatacagcaaaagtagctcttgtgggcgttgaaaataaacctggtattgcagcaaaagtattcaaagcattagcagaaaaaaatgttgatgtggatatgattgttcaatctattcgttccgtaggtgaacctaaaactgaccttatctttacaattgctcttgatgatgtggtattggcacgtgaagtgttgaaagaattacaacaaactgttgatatcgaagctgttaatattgacgaaaatatggcaaaagtatctatcattggcgctggtatgttggggcaacctggcgtagctgctcaaatgtttgatatccttagtaaagaaggtatcaatattgaaatcatcagtacttctgaaatcagtatttcttgcttggttgcacaaaaccgcgtaaaagatgcagttcgtgttattcataatggtcttttgttaaacgaacgaggctaatatacatgatggatagtctacgcacatttatggatgaaatgctcgatgatcaagggcgtaaggaaggttttattagcgatttattagcgaatttaaaaacacaacctatccccacattagagcaagcacagacaggctatacaacagtgagcaatttacatggtatattttataattatgatgcgtcagaggtaaccatatcttataaggtagtaccagatatgtatgctccctatacaatgagttttcgccaatttgaggttgttctcgaagggcttttgacaagtcgacgcaatcaaaaatggcaaatcaaacaagataaataataaaatcaggacactcctataagggtgtcctaatttattttgttattatatgcgatatttatatctcataaataagaataagttatagataatccttgtaatttgataataattcttgaaaattcgtgtaaatcttcgtaatgtggtataatagatagtcaataatagattaagattttacatatatatatacattataaacaaattagaaagaagggtatctatggaactgaataaaatatattctggttttcgccttgatcgcatagaacgtattgatgaaatcaatggcacagcctatgaaatgaaacatgaaaaatctggtgctcgtcttatttatattgactcaccagacactaataaagtatttaatattgcttttagaacaactcctcaagatagtacaggtgtcgctcatatcatggagcattccgtgctctgcggttctcgtaaatttccattaaaagagccatttgtagaacttgtaaaaggttccttgaatacatttttaaatgccatgacctatccagataagacgatgtatcctgtggcaagtaagaatgacaaggatttccataatttgatggatgtataccttgatgctgttttctatccacgtgccgcaaaggattcagaaatcatgatgcaagaaggttggcattatgagcttgactctgctgatgatgaattgacgtataagggcgttgtatttaatgagatgaaaggcgtttactcctctccagattccgtactagaacgcgaattgatgcattctttgttccctgatacaacatatggcgtagactccggtggtaatccagataatattacggatttgacctatgaaaaattcaaaaaattctatgatgtgtattatcacccatcgaacagctatattttcctatatggcacaatggatatcgaagaacaattgcgctttattaacgatgaatatttgagccatttcgatgctatcgaaatcgacactgaggtgactgagcaggctccatttaaggaaggtaaagtgattacgtatccttatagtgtggggtctgatgaaagcacggataaccgtacgttacatgctttctcctatgtattgccagacgtgacaccagaacaaagccttgcttttgaggtgttaacacatgctttattgacatctcctgcagcgcctttaaaacaagcgttggtgaaagcaggcattggttctgatgtatctggttactacctagatagcatccgtcaaccaatttgggttgttcaagctagcggctctaacatggataaacaaggtcaattacaagaaattgtagaatctacattacaacaattgtgtaaggatggcatcgacaaggaattgttagaggcttctcttaatagcattgagtttacccttcgtgaaagtgactttgggggccgtccaatcggtttagcatatgtcatccgaatgatggataattggctatatggcaaagatccaattgagttattacactacgaagaagcattagctaatattcgtaaaggtttgcaaggttcttattttgaagatttaattcgtcactctattttagataacaaccataaatctctcgtatccttataccctgaacaaggtttgcaagataaaaaggatgcagaggttaaagaacagttagcagctatcaaagcttctatgtcacaagatgagctagaaggtatcgttgaacaaacaaaacgccttaaacttcgtcaagagacaccagatagtgaagaagcgctagctactattccacttttagaattatctgatttgagtccagaagtggaagatgtggaacgtcgtgaaagcacgattggtcatacaaaacttcattttgttcctactttcacaaagggcatcaactatgtggcttactattttaagctagattgcctcactgaggacgaattattctatgcagatatcttaagtgatatcatcggccgcgtagatacatccaaacgttcttatgaagatttggcaaaattaatcaatctaaatcttggtggtttgagtgctgatattacaggcattagtaaagcaggaaaacgagatgaattcgtaccactcatggttgtacgtagtaaggtattgcatgctaaattacctgaattgtgcaatatcgtaaatgaagttattcacgatgctcaatatactgatgtaacgcgtttaacagaacttgtacaagaaggcaaagctatttgggataatgaggcgttccgtagagggaatactatcgttagtcaacgtgtaatggctaaggtatcaaaggttggtaaattccgcgatgatggtaatttaggctattatcaaaaaattagtgagttagcaactaatcctgcggcattaccattattgccagaaaaattggccgatgtagctcgcaagattttccgttctaataatgtagaaattttattcgtaggtgaagaacaagaattagcaccatttacagagttaatgaaaccattgctcagtacttggaatgcagaggcgttgccaaataatgtgttatccatagaacatacaacgagcaatgaaggtattgtcacagctggtaaggttcaatatgtggcacaaggtggtaatttcattgatcatggatttactcatgttggtgctatgagcgtattagaaacgatcttgcgttatgaatacttatggattcgcattcgcgtacaaggtggggcctatggcgcatttgctaatttctacgacgatggcaatatgattttctgtagttatcgagatccaaatcttgtggaaacacttaatgtgtataaagaattgcctgaatatctacgtcaatttacattaacagaccgagaaatgcgtaaatatattatcggtactatgagtggacttgatttaccgatgacacctgcattgcgtggacctcgtgctatggggttatacttcagcggtgccaatattgaagataaggtagcatttagaaaacaagtcattgcttgtaagccagaagacatcgtagctcttgcagatgttgtagaacctgtgttacaggataatcatatttgctccatgggtaacgaacaaaaaatcaaagatgctggtgtttttgatagtatcgtatcccttggctaatatatagtttgtaaactgaggtcatcctcaccatgtgttaatataataatgtattaatataatagtatattattagagtgccatataaggagatactatttatgaaaggacgattcgcacctagcccaacggggtatatccacctagggaatgtgtggatcgcccttttgtcgtatatatctacccgcaatcagcatggtatctatgtggtacgcatggaggatattgatttacaacgatctaagcgctctttaggggaggctttgttagacgatttagaatggcttggctttgaatgggatgaaggccctcgtgtggggggaccagaaccatcatattggcagagtgaacggttaccaatgtatgatgagattttgcaacgattagaagatacagatttaatctatccttgcttttgtaatcgtactcgcttacaatcaattgcttccgcacctcatcgaggtgaagtcgttcatcactatgacgggcattgtcgtaatttggatagtgctacggtacagctaaaaaaacttgaaaagaatccgtctatgcgtattaaggtaactgattctactatggagttcaacgacatataccaaggtctacagcattttgtactgcgtcaaggtgttgatgattttgtgttgcgccgtggagatgggatgtatgcctataatttagcggtcgttctagatgatatatccatgggggttacagaaatcattcgcggtcatgatttactggaaactacggctcaacaaatgtatttatatagtatgttacaggctgagccaccatgctatggccatgcaccgctgctcattgataatgacggacataggctttcaaaacggcagaaaagtataactgtaaaagaattgagagataacggatggtcagcagagcgtattttaggtgaattagccgtattagcaggattgatacctaaatgtgatgcaccaagtatctcattagaagcattactagaacatacagcgcgaactgaagaattacgttgtgaacatattgttttaaaaaaatcgatataatatattgacagttttcgatattaatatataatagtatataagaggtggtaagaatgactattaaagatgcgttagctgaaaaagtttgggctgtaataggtgccactcataaaaccgataagtttgggtataagatttataagtgcttaaaagagcatggatatgaagtctatccggttaatccaaatgtagagagtatcgatggtgatacttgttatccgagtctatctgcgttgccagttgttcctagcgttgttgattttgtagtaccagaagcagcagggcttgcagcaattgatgaatgtaaacagttgggcattaagatgatctggttacaaccaggtgcggataaacccgcagtcttggctaaggctcaagaggtaggtttggattacattcaagattgtgtattagttcaattgccttaggaggaaataatgagcgaattaaaagagttaaaaacagcagaatatcaagatcttcttaatcaaggtggcgtaacagttattgatttctgggcaccatggtgtggctattgtgtacgtatgatgccagttatcgaagaaatcgctggtgaattagaaggcaaagcaaactttgtaaaagttaatgctgatgaagaacctagcttggctcgtgatttacaagtagaagtattacctacatttgtaattttgaaagatggcgaagtggtagatcgtaaaattggtttcttgccaaaaggtgatttacaaggcgctatcgaatctaaattctaattagattaatatatactaaaatatataaggcctattaatgtatacatatacattgataggccttttttatctgtgtaaataaaaatacaagtaaaactataaattagatataaaatgaagaggaatatttctatatcggaaaaatttgataaacaaggctttttcaagattgttgccatataaaacgatgagtaaaatatgaagcataagtttaacttattaaaaaaacgctttaattttaaaatatcttgtgctagtatttaattagatattgtgaatatttagtgaagtatattccagtatttttcatttatttcatctgtgcggggtgagagccgcataagttgggagggaacttaatatgaataaggtattcaaagtagtatggagtgcgactaagaatgcatatgtagtaacatctgagttagctaagtcgcatcaaaaaacagcaactacaattgtagctgcaattttgttaagtgccagtttgggtggaggcattgcttctgcatccacacctgcagattggtatagaactgatcttattggtagtcaaaaatggttaacacctggccaaggtagtcaagcagttgagcaacaaccaattgatttacatcaacaagatcaacaagatcaacaagatcaacaacaatggcaacaaagccaacaaaatcaacaacaaggtcaacaatggcaacaacaagaccaacaacaatggggccaacaatctcaaaaacaaggctctggtaaggttattgttgatttaactaatattaaaaatcaagttaaccaaaatacttacaatattagcgtattgaaaggtaatgttaactgccttaatagtaaattctattgtttagctgataaggtatctaaaaatacattagcgattaataatcttaatgtaaaagttgatacacttaataacagtgtgaaaaacattgaaaacaaagttacaaataatgtaactaaaaatgttatcaacaaggttactaacaatgttattaatcaagtaaacaatactgtaaacgcaaaaattgatgttaaaattgaagaaaataataagaatattattaatcaagtaaataacaacatcaaaaaagaaattcaaaataataacactactatcatcaatcaagtaaatcaaaatattgatcaaacgattaataataagattgaaaataacaatacaacaatcattaataaagtagaccaaaatattgatgctaagattgaaaagaataatacgtctatcatcaatacagtaaacaaaactattaatgaaaatattcaaaacaacaatactgttattaatagcaacattaaaaacgaaatcaatgctaacaatgtagaaattaacaagactattaagaatgaaattaatgctaataacactgttattaacaataatatcaaaaatagcattgaagcgaataatgttgaaattaacaaaacaattgttaataagattgacgaaaataatgtaaaaatcaatcaaaatattgctaatgttaaaaacgaattacaagcgaatattaacaaggtagatgtaaaggtagatgctaatagtaaagctatcaataacttgactgttaacgttaacaataacagcaagtctattgctgacttgtctaaacaagttaacgaaaacactaaaaatatcactttcaacaatactattgcgatagaaaaccgtaaacttatcggcgataacaaaaaagacatcaatgataataaaaaagctatcgaagagttgaaaggtaaagttggtactactatcaacaacatcaacacaacaattgataataagattaatgaaaacaacactaagattattaatcaaatcaataaagatgtagacattaaaattgataatagtaaaacaaatattatcaatacagtaaacactaatattgataataaaatcaacgctaataacaccattattaacgctaacattgataatagcattaaacaaaataatgttgaaattaacaagacaattaaaaatgaaattaacgctaataacacagttattaacgctaacattgataatagcattaaacaaaataatgtcgaaatcaataagacaatcaaaaatgaaattaatgctaacaacacaactattatcaataaagtgaatgctgatattgatgctaagattaataatgttaacactacaattaacaatgtaaacactaaggttgatggcaatacaactaaaattgtagataatagcaaacgcattgctgctaatgaagtaaatattgcgaataatactacaaacattaataaaaatgcgacagctattacaaacttaactaatacagttaatagtaataacaaccgtattaacaacgtacttgaagctatgagcaaccatgaaggtcgtttacaagctgtagaaaatgatgttaagaatatcaagactgatttgagcaatactacaaatcaagtcaatatcaatacaaaggatattgctgatttgaagggtaaagttggtcaaaatattggcaacgttcaagtagatattaacaatattaaaaatgatattacaaacatcaataaaaagattgatcaaaacgacattgctatcaatacaaaagtagataataaagttaatgaaatcaatactaagattgataataaggttacagaaatcaatactaagattgacaataaagtaattgctattgatcaaaaaattgataacaaagtaactgaaatcaatgcgaatattgataataatgtaaatattattaacaagaaaatcgataataatgtaaatattattaacaagaaaatcgataacaatgtaaatgttatcaatacaaaaattgataataataatattactatcaacaaaaaagttgataataaagtaaacgaaatcaatactaagattgataacaaggttaacgaaattaatgctaagattgataagaacgatgtaactatcaatacaaaggtagataataaagttaatgaaatcaatactaagattgataacaaagtaactgaaatcaacacaaagattgataataatgttatcgacttgagtaagaaaatcgatgctaatatcgttgatgttaacaagaaaattgatgctaatacaacagcaatcaataatgttaatgtccgtgtagatggtgttaaaggtgatgtagctggtcttactaaacgcgtagatcgtcatgacgaacgtttagactacttgcaaggtaatattgtagataactccacacgtattagtgctaatgaagatgatatcaagaaattgaaaggccaaattggcactacaatcactaatgtagaaaacacaatcaatgctaagattgaagctaacaatacagtgattagaaatgatatcaaaactgcaatcactaataacaacactgttatcaataagaacatcgatgtaaaaatcaacgaaaataacaaacaaatcaacaatacaatcaatactaagattggtgaagtgaacgttaagattgatggcgttaaaggtgatttaaatggtcttaaaggcgacttggatggtctcaaaggtcgcgtggatcgtcacgatcaacgtttagaatacttagcagacaatattgtagataactctacacgcattagtgctgttgaagataatgtaaatgttaatactactaacattgcaaacaatactaagaatatcaatatcaatgctaaagctatcgatgaattgaaaggtcaagtaggtcaatcctctactgttatcaacgatattaaaaatcaaatcactaatatcaacggtaaggtagaaaataacactactaatatcacaaataatactaagaacatcgctgtaaacgcacaagctattgtagataatagtaaacgcatcaatgaaacaaatgttaaggtagaaaataacactactaacattgcaaacaatactaagaacatcgctgttaatgcacaatctatcgtagataatagtaaacgcatcaatgaaacaaatgttaaggtagaaaataacactactaacattgcgaacaatactaagaatatcgctgttaatgcacaagctatcgtagataatagtaaacgtatcaacgaaacaaatgttaaagtagatgctaatacaacagctattaataatgtgaatgtaaaagttgctggtattaaaggcgatttagatggcttaactaaacgggtagatcaaaatacaaaagatattaatgtagctggcacaattgctcttgaaaaccgtaagtttatcggcgacaacaaggttgctattgaaaataatactaagaatatcaatatcaacgctaaagctattgatgaattgaaaggcaaagtaggtcaatcctctacagttatcaacgacattaaaactcaaatcactaatatcaatggtaaggtagaaaataacactactaacatcacaaacaatactaagaacatcgctgtaaacgcacaagctattgtagataatagcaaacgcatcaacgaaacgaatgttaaggtagaaaacaatactactaacattgcaaacaatactaagaatatcgctgttaatgcacaagctatcgtagataatagcaaacgtattgatgcaacaaatgtaaaagttgatgctaatgcaactaatattgcaaagaatacaacagctattaacaatataaatgtaaaagttgatggtgttaaaggtgatgtagcaggtcttactaaacgtgtagaccgtcatgatcaacgtttggattacttacaagataacatcgcagatcattctacacgtatcagtgttgtagaagatggtgtgaaatccaatactaaagctattgatgaattaaaaggccatattggtactcaaatcacaaatatcgaaaacactattactaacaaaattaatgaaaataatgtagttattaataagtctatcgataacaagattactgaaaataacactacaattcttaacaaggttgataaaaatattgatgtaaaaatcaatgaaaacaacaaacaaattaacaacacaattaatacgaagattggtgatgtaaatgttaagattgatggcgttaaaggtgatgtagcaggtcttaaagctcgcgtagatcgtcatgatcaacgtcttgattacattgatggcaacattattcatcattctgaacgtatctctgctaatgaagatgctatcaagaaattgaatggtaaaattggtacaacaatcacaaatgtagaaaatacaatcaatactaagattgaagccaataatacagtgattagaaacgatatcaagaccgcaatttctaataacaacacaactattattaacaaagttgataaaaatatcgatgcgaagattgttgaaaacaatacgaagattgatagtaagatcaacaatgtaaatgtaaaagttgatgcgaatgcaaaagctattgaaaacaatagcaaatctattacagctattcaaaataatgtagctaatattaatagtaaagttgatgtgaatacagcagatattaaagcaattcgcactgatgtaactaataatacaacagctattgctagtgtaactaaacaagtagcaggtaacacagcaaacatcgcagatgtttctgctaaggtaaatgctaactccactcgtatcgatgcaaatgcagcagctattggtaacttgaatggtaaagttgattctaatgcgaaagctattgaatccttgaaaggtcaagtaggtaaaggcaacactacaatcgttaatgttgaaaagaaagttgaaaatattacaaacaacattaaagctcaaaatagtgtaatcaatgctaatactgtaaatattcaaaataacacttctaacattaacaatattaaagctaatgtagtaaacgttgaaaagaatgttaacaatatcaaagctgatgtaactatcgtgaagaatgatattactaacatcaatgcgaagattgatgcgaagattaatattgtgaacaataatgttgaaaacatcaagaatgatgtgaagactatcaataatcaagttacaaatattaagaatgatgtgactagcatcaaatctgatgtaactagcattaaatcagatgtaacaagtgtgaatgcaaaagttgaaaacaatattaagattatcaacggtattcaaacagatgtatctggcttgaaagatcaagttggcaaaaatacacaagcaattaaagacttgcaaaatgtaagtgctgatgtatctaaggtgaaagaacaagttaatgcgaatacaatcaaagctaatgctaacgaagaacgcattaaaaatgttcaaagccaagtagaagttaatactgatagaattaaacacaatactgaaaatatcaatattaacaaagctgctatcaagcaaaatgcagaagcaattcaaaatactaacgttactgttcaaaaagtaatcaacaaggttgatgaacatactgcagcaattaatagtgtatctgctcaagttaataaaaatactaataatattgcgactatcaatgcatccgttattgaaaatacaaacaatattacaaaagtaaataaccaagtaacagcaaatactactaacattgctaaagtatctaatcaagttactacgaatatcaataatatcaatgtaaatgctaagaatattagtgtgaatacagaaaatattaaaaacattgatagccgtgtatcaactaatgcaaatgctattgttggtattactgaatctgtgaaagctaatgctactaatattaacactgttaataaccgtgtaacagaagtatctaaacaagttaatacaaatacacaaagcattgctactgtaacaaatcaagttaatgacaatactaaattaactaaggcagtaggtgcgattgcattggaaaacaatgaacgtatcaatgtaatgggtttacaagttaacaagaatactgcagatattagtacattagctgaagctgcaaattacagcttgcgtgcaagtgcattaacaatgcaagatcatgaaactattgaacaacatacagcacaaattcaagataactctcgtcgcattagcagtgtagaacgtgaagttaaaacagtaggtgcatctgcagccgcattggcagcattgaaacctattgaataccatgaaggccaaaaagctcaaatcatggcagctgttggtacatacaaaggtaaaacagcaactgcattaggtgttgctcattatgcaaatcctgatttgttattccacgctggtgctgcttatgatggtgataatggtgtaatggcaaatgctggtgtaactatcggtattggctccgctcctacagcaccttccaaacctgcatctcctgcaactgtaaaagttctagaagataaggttgctagcttagaagcacaaaataaagaaattaaagaagtgcttgaaaaagtattagctgctaatcctcaagtagctaaaaagacaactaaataagatacctcccaaaaggtaggcactgaatacctgtctatctaaggtatgtataaccgcgtagtacactcgtgctacgcggttttcttttgatttgaagatgaaggaaaattcataatttcaccaatttttatgttttatttattgtaacgagtgggggattgtggtaaaatttaccatatagtggtgaatgaggattgtaaggcggtgatgttagatgttcatgggtgaatataatcacactatagatgcaaaaggacggttgattatacctgccaaaatacgtgaacaactaggtgatcactgtgtactttcaaaaggcctcgataagtgcatcgctatatatactgccgaaagttgggagcaactttcaaaaacattacaatcattaccatctaataaagcaaatgcgcgtgctatcaaacggttttactttggtagtgccgcagaacttgaatttgataaacaaggccgaatcttagtgccaagcgcccttcgtgagcatgctgagctacaaaaggatgcggttattattggtactggtgataaggttgaaatttggagccgcgaacgctttaatgcatatgatgcggaagtggctgacagcgtagagtccttggctgaaggattagaaggcattgtgttgtaggaggctatcgtggaatttaatcatgtcagtgtgctgttgaatgaaacggtggattctgttgttaccaatcctgatggtatctatgttgactgtaccttaggtggcgctggtcacgctcatgccgtaggtgaacgattgagttcacaaggcatgattatcggtttagatcaagatgaagatgccttagcggtagcaagacaacgcttgtctgatttaacttgtcaggttatgatgatacctacgaatttttcagatttaaaacatgctttagaagagcaaggtatttatgaagttgatggatttatattcgatttaggagtttctagttatcagctggatacaccggaacgcggtttttcgtatatgaatgatggacctcttgatatgcgtatggataaagaggcacctattactgcggaaatcgtcgtgaatgaatatgaatctgataaattattacagattatccgtgattacggtgaagaacgttgggctaaacgtattgttgaatttatcgtggcagcccgtaatgaaaagagaattaccactactggcgaactggtgtcaattataaaaaaagctataccagcaaaagcaagacaggatggtccacatcctgcaaaacgtacatttcaagcgatacgcattgaagtgaatcgagaacttgctattttgcatgatagttttgtagatgctgtgagtatgttgaagccaaaggggagaattggtgttattacattccattccttagaggatcgcatcacaaaacaaacatttaaagagctaagtacagcttgtatttgtccaccagaattaccagtatgtgtatgtcatcataaggctgttcttaaggctaaaaataaggccattgagcctagtgcaggggaagtagaaatgaatcctcgttctagaagtgcaaaacttagagtagggattaaattgtagtattggaaggggttattttaatgttagcgagaaaggctgttgtgggccacgttaaacgtgatgtgttgctaggtgtacaagcgagaaaagcgaaagctagtgttgtttttgatattagtccattgatgagacaaatcattcaaggtatagcaatccttgttggttttttgatgattatgatggctatgaacgcatatactacaaaattaggttatgaagtagttaaaacacaacaaactgtagtacaattagcaaaggataatgatacccttgatgtagaggtggcatccttaaaatctccagtacgcattcaaaaaattgcggaagaacaattagggatggttttgcctgattcctttgtgtatagcactaaaagtacgacttcagaacgcaatgtacaaacgaaacagcaaattatagattagcaggcaaaagcagctcttatgggctgctttaatttgcgtatacagaggagaatgtagtatgaaaaccttaaaagatattataagtacgttagatgcacaacaagtacaaggtgatcaaaatgtatctattcaagatataacagctgattccagagcagtaaaaccaaatagcttgttcatcgctcttgatggggctacagttgatggtcacaattacatcgataaagcggttgctgctggtgctgttgccgttatcgtatcaaaaccggttactgtacctgatgatgtgtgtgttatcaccgtttctgatacacgtcaagctatgatggcgtgtgttccatacttctttgattacccagctaatcgcatgcgtatggtcggtgttacaggcacaaatggtaagacgactacgacccatatgattcgtcatatccttaaggctcaaggtcacaaggtgggggttattggtactgtccatattatgattggtgatacgagttatccaattcataatacgacaccagatgttgttgatttacagcatattttgcatcaaatggttcaagaaaatgtggaatactgtgtaatggaagtatcttctcatgcattggcgctcggccgtgttagcggtgttgaatttgatacggccgtatttacgaatttgacgcaagatcatttggatttccacaaaacatttgaaaattacttggctgctaaatgtaaattgtttgaacaagttagtgcagctaatcaagaaaaagataataaaggtgctgttattaatatcgatgattcctatggtcatcgcgttatggaaaaaactacggccccaacgattacgtatagtacattaggcaagggcacattgaatgcatcagatgttcatatgtctactaagaatagccagtatactgtgaattataagggtgaaagctaccctgtatcgatgaatacaacaggactatttaatgtgtataatacattggctgctattggagcttgtttacaagaaggcatctccatggaagcgattgatacggcgttaaaaacctttagttccgttcctggacgttttgaattaatcgaagaagggcaagattttgccgttgttgtcgattatgctcatacaccggatgggttgcaaaatattttagaaactgcaaaggcaattaaagaaaatcgtatcatcatcgtatttggctgcggtggcgaccgcgatgctacaaaacgtccaattatgggccgtattgcagcagagtacggtgataagatttatgtaacatccgataatccgcgtaccgaagatcctgtacaaattgttaaggatgttgaagtgggtgtaaaagaagcacttcgcgatggtacttcttatgaggtaattgtcgatcgtagagaagcaattaatcatgcaattcatgatgcaaaagcaggtgatatcgttattatcgctggtaaaggtcatgaaaattatcaaatattaaaaaatgaaacaattcattttgatgaccgagaagaggctcgaaaagctcttaaggagatctaatatggcagaatttacattacaagaaataattgatgctactagtggcacatgtaagggcgatgtaagtttacaatttaaagatatatctacagatacgcgtacgattgaggcgggatatgtatttgtagccttgcgaggcgatacatttgatggtcatgattttattaatacggccattgaaaaaggggcaacagcagcaatcgttgaaaagggacgcagtgtagacggtattatttgtgttgaagtggaaaacacgctaaaggcataccaagacttggcgaactttcacagacgacgctatcaaattcctgtagtagccattactggctcatcaggtaagacgacgacaaaagaaatggtagctgcggttcttagtactgagtttaatgtattaaaaacagaaaagaattttaataatgaaattggtttaccaaaaacattgttgcaactttcaccagaacacgaagcctgtgttgtagaaatggggatgcgtggattaggtcaaattgaagaattagcccttattgcagaaccgacaattggcatcattacaaatgtaggaactagtcatattgaattgttgggttctcaagaagccattgctgaggcaaagggtgaattgattagatgtttaggccccgatagtgtggccattctaaatgaagatgatcatttcgtaaaggccatgagttccattgcaaaaggaaaaactgttacttacggtatttatagcaatgctacggtaattggcagtcatttacgctataaaaaggatggcattaagtttacctgcaaatgttatgacgaagtatttgacgtatttttgcctatgattggtgaacataatgtgtatgatgcattggctgctattgctgcaggtcgtgtgttaggcgttaaatctagtaagattaaaaaaggtcttagtgattttacaggcacacctatgcgtcaagaaattgtagcatttgaagatattgttattctcaatgatgcgtataatgccaatccttcttctatgagtgagtccatcaaagcattgggtcaattggaaggtaaacgtaaaattgctatgctcggcgatatgcttgaactaggtgattttacggaggaaggccatcgccaagttggcagactattggctgaagaaggctatagcgttgtattcacctttggtgaagcggcaaatttcattgctaaagaagcgaaattagcaggtttagaggtacatcgttgtaatagtcatctcgaaatggcaaatgcctacaatgacattcgtgaaaagggcgatgttattttggtaaaaggttccagaggtcttcgaatggaacgtgttgtagaggaattaaaagaacgtgaatagaggttataacggctagattcttctagccgtattggccgttattagagaataggggagtaatatgatttaccacattctattagcatttgtagtgacatttataattacattagtattgggcaagattggtattcctatgcttaaatcattgcatgctcaacaaagtatacgtgaggaaggtcctgaaagccatcaagctaaggctggtaccccaactatgggtggtgcatttatgatggtagctcttacgatcggtgtggctatttttgcaccatggaatgtggcgacaggtatgttgctattccttacacttggtcattgtttgctcggcttctttgatgactttgtaaaagctgttaaaaaacgtaatcttggcttaacagcaaaacaaaaattattgggccaattcattttagctgctgtattctgttattgtattactgaaattatggttattcctacaacattatggattcctgttatagatgcacatgttcaattgggatttgcctattatattttggctttcttgatcattgtaggtgctacgaatgcggtcaatctaacagatggtctagatggtttagcatctggtacatccgctgtagcagcgatagcgttttctgtaatcggcttgatgatttattccactgaaagttctgtggctgctgaaagcgttgctttctttggcgctattgtaaccgccgtatgtttaggcttcttggtatttaatattaatccagcaaaggtattcatgggcgatacagggtccttggctcttggtggcgcatttgcaggcatggctattttaactaaaacagaattattactcgtagtgattggcggtatttttgtaatggaagccttgtctgttatcattcaagtcatttcctttaaaacacgaggcgtgcgcgtatttaagatgagcccaattcaccatcattttgaattatccggatggtctgaacaaactgtagttaatcgtttctggtttggtggtgcagttctagctgtgttaggtgttatacttgcaactgtaactatttaatataaggaccttatatttgtaaattgatagttaaatacgtgaaaatacttaacttgaagggcatttaatggtattcttataagatgagataaaaaattttcgtgcttagtgatttaggtgatataaatggattatggagagaaaaatattcttgttctaggtgctggttccagtggaattggtgccgcatgggtattggcacagttacatgcaaatgtagttttaaatgattataaatcagtagactttgaaccatctacacgtaaacgattagacgatgctggtgtaaccatcattacgggacgacaagataatagcttacttgatggtgtagatcgtattatcatttctccgggcatcgccttatccattccaatcgtacaagaggctttgcatcgtaagattgatgtagtaagcgaagtagagcttgcttatgatgtttgcaaatctcctattttaggtgttactggcacaaatggtaagaccaccacaaccactctattaacgcaagttatggaatctactggccttcctatcaaggtgggcgggaatattggtgattccctaagtgaagctgcgtatcatatgccagaaggtggttatttagtagctgaactatctagctatcaattagaaacaatcaagtccttttgtccattaggggctattgtattaaatgtcacgcccgatcatttggcgcgccataagacaatggaaaactatgcagcggctaaagctcgtatttttatgaatcaaactgctggtaattttgttgtcctcaatgatgatgaccctattgtggcggctatgaaacaagatgctcacagtacaattcttagcattagccaacatcataaggttgatagtggtgcgtattttgaaggcaatacatgctatgctgtatcagatggcaaggctattcctgttattgatacagaacatatccatattaagggttctcataacattgaaaatatattggctgtaattgctttaacatatgctttaggtgtagaggtagagcatattaaacatactattgaagaatttcatggtgtagaacacagattggaacgggtcacaacattccatgatgtaacattctataatgactctaaggctactaatacagactctgtagtgaaagctttagatgcctttgataaacctgttattttattggccggtggtcatgataagatgacgccgttagaagacttcatgaatgttgtaaaagcacatactaaagaggtcatttttatgggggaagcagcagatcgatttgaatccgttgctgtgaaaatgggcgttcaaaatattcatcgtgcacagtctatgaaagaagctgttgcattaggctatcaattagcaaaagctggagatattgtattgctttcaccagcatgttctagctttgactggtatagttgctttgaagaacgaggcgacgattttaaaaactgtgttaaagaattagaggaaaggggctaagggcgtgaaacgaatcatcatttctggcggtggcacaggtggtcatatatacccagccattacgatatataaggaaattatgaaacagcaacctgatgctaaggtcctctatgtgggaacagaacatggtttagaagctgatctggtgccgaaggagaacattgattttgttacattacctgtacaaggtttgcagcgtaaactttcattaggtacgttggtaacaatggggaaaacagcgctttctcttgtaaaggccaattcgattatttcggattttaaaccagatgttgtgattggtacaggtggctatgtatgtggtcctattttaatggctgcagcattgcgtaatatccctacattaattcaagagcaaaatgttattgccggtattacgaataaaatcttgagccgttttgttgatattgtcgcggttggttataatgaagccgcaaaatcatttagcaaggcgaaacgcgtcgtatatacaggtaatccagtgcgtcctgatgtactcgtagattctcgtgcagaaggtcgacaattttttggactgtgtgatgatatttttacagtccttattgctggtggttctcgtggtgcccgtactattaatacggccatggtagatgtacataaacattttcaaggtaaaccgggtattaagttgatacatattacagggaatggggaatataatactgtattagagcaattaggaattgacgatggcactggtttgggtgaatcatcgttgattttgccatatttacatgatatgcctaaggcactagctgctacggatttggccgtatttagatctggtgctatcggtcttgccgaattagctgtacgtggtattccatctatattggtgccatatccttatgctgcagaagatcatcaaacgtataatgcgcgcattttcgtacaagaaggagctgcgcatatgattgtagataaggttttgacgagccatgatttgattggtgaaatcgaaatgtttatggcaaatcgtgaattgttagctcaaatgggggctagtgctttacgtttaggaaaaccaaatgcagctcatgatattgctgagttagcgttatctattgcgaaatagttaaggagagtaattatgttagaaggtatccataagattcatctcatcggtataggtggatctggtatgcgcgctattgcgaatattttaattcaaaaaggatatgaagtatctggttctgatgtcaaagaatctgatgtaattgaacgttttagacaaatgggcgctaccgttcatatcggtcataatgctgactatgtacaaggtgtagatgctgtagttcgttctacagccattcgtgaggataatccggaaatcgtagcagcaaaggaacaaggcatcactattttacatcgctctgacattgtaaaagccgtattggatgttacaaatggtattgccgtagctggtgctcatggtaaaacatctactacatcgatgattggtcaaattctcgtagaaggacaaatggagccaactgttattatcggtggcgaagttgattatctaaaggggagtagttgcttaggtaaaggtgaatactctgtcgtagaagctgatgaaagtgatggttctttcttaaaattaagacctaagacgattgttattacaaatatcgaagatgatcatatggatcattataagacgatggaaaatctattgaatgcattctgtcaattcgttgaaacactacctgtcgatggtaaagcagtcgtttgtggtgacaatgataatattcgttatgttatgggcaaagtggaacgtcaatttatcacatatggtttggaagagactaatgattatgtggcaaaaaatattcattatgaagacagttctcttgtctatgatgtagttcgtaaaggtgaaacgttaggtcgtgtatccttgcgtgtaccaggtaatcataatgtgttaaattctttagcatcttttattgtgactcatgaatgctgtcatgttccagtgccaactattgtgaaagctttaggtaaattcatcggtgctaaacgtcgttttgaaacaaagggccatgtagcaggtgtatgggtagtcgatgattatgctcatcatccaacagaaattaaagcgactttaaaagcggctaaggaattagaaaagcatcgtgttatctgcgtgttccaaccgcatcgctattctcgtacatccttgttgaaagacgaatttgctactgctttcacaagtgcagatgaaatctatatgacagatatatatagttctggagaagatcctattagcggtattgatggtcatacaattccaaatattattagtgaagtaacgcatcaacatgtaaattatgtggaagatgtaaatgatttgccagccgttcttgcgaaggtggtacgaccaaatgatttggttattactatgggggcaggatctattaatcaatatggtccaaagttattagcattattggaagaaggtttacaatgaaagataaacatatcatcgtattaatgggtggtccatctgctgaggctgaagtatctcgtagaactggcgcagccatcgcagaggctttaattagcaaggggtatcacgtttccacattagaactaaatcctcgcactgtattacaagatattgaaaacctaaagggcgatgttgtatttaatgcgattcatggacgttatggtgaagatggcgctttgcaaggtgcattagagatggctgaaatcccatatacaggatctggcattatggcacattctgtagggatgaataaaaaagtaagtaaagatgtgtttaaaggtgctcatattcctacggcagaatctatttcttacaatggtaatttacagtctaaagaagatattattaaagatattgaagcaaaattctccttgcctgttgtattgaaaccagcaacgcaaggctctagtattggcgttaccattgtaaaagaagaagatcaattggctaaggctgttgcagatgctcttacatatgacccaattcttgtggtggaacaatatctaaatggtcgtgagtttactgtttctgtattggatggtaaggcgttggctatcattgaaattagacctcattctggtgaatatgattacgctagtaaatatacggcaggcgctactgattatttagtaccagctccaatcagtgcagatatgacaaaagaaatgcaagctattggcgagcttgtgtatcgtgaagtacaagcgagtggggctattcgcgttgatgtcatgactgatgataaagacaatatgtatgtattggaatacaatacgattccaggtatgacggctacttctttggtgccaaaggctgctaaagaggtgggcatagattttcctgaattatgtgaaaaaatcttattaacagcaggttatgggaagttttaaatgctgtagtatgtaaggagagtagttatggatgattttaagcaacatccacccaactcaaatcagatagatgcggaacatgatagacccgattttcttcgtcctgaaactgagccaatccacaaggatgatggagattcaatacatcacagtgagcgtgaattagctcgtaaacgtaaacaagagaaagcggaggttagaaagaaatttctaaaaataggtggtgttgtagccatagtgttgttaggcttatttaatctacctattccgcttggttctattaaagttattggatctgataaggttactgtacaggatgtagaggttgctggtgatattggggaaccagtcaatgtacttcgtatcaatagagaaagcttgcgacaccgattatcaaaggatcttcgtattgaagatgctcaaattggttacgaattgccgttaacaatggtggttcgtgtagtcgagcgtaaggctattgctgtgataccagctcaatttgggtatttaaccttggataagaatgggcaagtgattgcatctgatagtgtcattgaagacacgacggtgcctatgatttctggtgttaagggtggtaatatactgctaggtgatatggttaccgataagccgattgtacaggctctcgattatctgcgtgccttagatgatgatacatttaagcaaattgcagaaattaatattggtgatcctaataatatgatggcgtataccgtatcaggtatacagattcgactaggcgatggcgaagatttgaaaagcaaagccgatttaacagcgtctatgctaaaagatttacctaagagtcaaggtaatgttcaatatatagatgttaatccgtcatctcctttcattaaaaccgataaggtaacggtgcaaccaaaatctaataaatctaagtcagacactagccaatctgagaaaaaggatacatcaaaacaaagtgctaatgtatcaaaatcaaaacaagattagttataagcacaaaaagggtggatgatgttgtgaaacacgaaagatgggctattggtcttgtcagctttgtattgggattcatggtcattactcagtacaagatgacacaagataatattcaagagaatatacggctacaacgaactggtgatttggtggctcagttaaaagatgcagaacatgaaaaggatgctttactgaagcaaattgagcaattaaaagccagtggttccggttctagtgcagatgaaacattacttcgcaaagccgcattgactaatgtcaaaggacctggggtgaccgttctaatagaggatagtgctaaaccaattcaagggggcgaaaatcctaacctatatgtaattcatgatgaagatattttacgtatcgtcaatgaattacgagctggtggtgctgaagcattggcaatcaatgatcaacgtttgattggtacgtccgaaattcgttgttcaggtcctacgattaccgtgaatggtaaggtgtatggcgctccatttacagttaaggccataggggatcctaaaacattgaattcagccctcactatgcgtggaggtattgtagactctttaaaacattggggcattaaggtgaccataaaagaggagccatccattgccattccggcatttaccggttcttatagagaagagcatttacaatcaaatgagttaggaggtaaagaatgaatatttatatctttgctatcattggactcatagtaggtgttgtggtaggatggtttacaccattacatattccagcaagctatgctaattatacttctgtagctgtgctagctgcattagatgcggtatttggtggcagtcgtgccgcattagagagactatttgatttaagtaattttatcagtggattcttctccaatgtaatacttgctgttgtattagtatatattggcgatttaattgggattaatttatactacgttgccttgattggttttgggttacgggtttttattaatttagctgctattcgaaagaacattatgactaaacgtttctaattatcaagattcgattatagttgtagtggaaagtttttaaattttagtgtaaaataaatgtaattgttataattaactcagtatataaatagatgtattcgcatttatattgacagaaatagataacgataagaggaggaagttcgatgtctgattttgcaaatattaaagttatcggtgtcggtggtggcggtaataacgctgttaaccgcatggttgaaagtgaactaaaaggggttcaattcttatccgttaacactgaaagccaagtacttgaattgtccaaggctgatgtaactattcaaatcggtgaaaaagttactaaaggtcttggtgctggtgctaacccacaaatcggtgaagcagctgctcaagaaagtcgcgaagatatcatcaaagctcttgaaggtgctgatatggtattcgtaactgctggtatgggtggtggtactggtactggtgctgctcctgtagttgctgaatgcgctaaagaagtaggcgcattgactgtaggcgttgtaacaaaaccttttgcatttgaaggtaaacgtcgtcgtgctgcagcagaaaaaggcattgaattcttgactcaaaaagttgatacaattatcgttattcctaatgataaattgttacaagttgtagataaaaaatgctccttgtctgatgcatttggtaaagctgatgatgttcttcgtcaaggtatcaaaggcatttccgatttgatccaaatccctggtttaatcaaccttgactttgcagacgttaaaactatcatgactgaacaaggcgaagctttgatgggtattggtgtagctactggtgaaaaccgcgctgcagacgctgctaagatggctatcaacagcccattgttggaaacttccatcgatggtgctaaaggcatcttgcttaatatttccggtagtgcaaacttgagcttgttcgaaattaacgaagcagctgaaattatttctgatgcagcagatcctgatgcaaatattatcttcggttctgttattgatgaaagcttgggcgatagtgttcaagttacagttgttgcaactggttttaactccagtactaagaatgttccagaattcggtaaaacaacaactgctgcacgtccagcaacaaatacatctgctccaacaagtggtatccctgatatccctgtattcatgaaacgctaatatttaatatatatacttatacaatattagaataaaagtaacttattaagacacatatttatgtgtgtataggaggtacaaatgaaaaaattagtattattatctttagctgcaacagtgattactggcagtgcattcgctgcatccgtgcctgtaactaaaatcagtgataattccacaaaaattcaagctgattatgcgttcaatcaacgcgtatctaatagcggtggcactaacaatgatggctttggcgtatctttagaacatgatttaagcaataaatctgctcttcaatactcttataacaaagtaaatgcaaaaaatggcgatattaaagatcaccaattggcatatgtttacaaagtacatcctaatgtaaatatttacggtgctggtacagctatccgtacacatgacactgagttaggtgttcaagctggtgtaattggtcacgtgcctttgactgacaaagttaacggctttgctaaagctggttggggcaacgatattaaacaatcctatcaagtaggtgctcaatatgaagttaaacctaacattgatttgaatgtttattatggttatgacaaatatagcgtaaacgataatgacaagacttccaaaggcttacatgctggtgtaggttacacattctaatcataatagagcaagtaaaaccactcatcatagatgggtggtttttttgtatgtattcatgtatacaatatttttcattaatactcattgtataaatgcttaactttaggtatgatattgatgtaatagttctttttagttaggatggtgtatgcgatgacaagtgtagcagcgaaacacgcaagaggaaaaaaattaaaagatgtaatctttgtaactgcaggacaggcggcggaagatacaaaattaaatggtcgtgaaaatgtagtaaatggtactttgggtgctatttatgatgaagaaggtaatttagtattcttaaaaactgtaaaagaagaatatttaaatttatctgacaccgaacatattggatatgcccctattgcagggattccacaatatttggaatgtgctgaaaaagaatgctttggcgattctcgtcctgacggctttattcgtagcatcgcaaccactggtggtacaggcggtattcatcatttggtacataactatactgaacctggtgatgaagtattaactgcagattggtactggggtgcataccgcattatttgcagtgataatggacgtacacttgttacatactctttatttgatgaacataataactttaatcatgatgcattccaacatcgtgttaaggaattagctgctaaacaaacaaatgttgttatcttatttaatacaccaggtaataatcctacaggatattctgtagaggataaggactgggattctattcttagtttcttgaaagaattagttgctattggtcgcaataacgtcatcattggtattgatgtggcttatttggattattctggtgaaaaagaagaagtccgcgcattctttaaaaagatggggcacttaccaaaggaaatcctagtttgtgtatgttatagcttatctaagggctttacaatgtatggtcaacgtgttggcgctatgattggtatttcttctgatgaagaaatcgccgatgaattcttagaagtgaataaatcgactagtcgtgcaacctggtctaatatttgtcgtccagcaatgcgcgctatggctaatatcgtttctgatcctgataaatttaaggcttatgaggacgaacgtaattgttattatcaattgattcgcgatcgtgcagatatctttaaacaagaggcagcacaagtgggcttacctatgttgccatatcgaggtggtttctttataactataccaactgattctggtaccgctatttgtgaagaacttaaaaaagaacatatatattgcattgccttaggcaatggtattcgtatcgctgcatgtggtattcctaaattccaaatgaagggattagctggaaaaatctatgatgcaatgaaacgattaggcaaattataaagaaatgaatttaaaaaggcacttcaaatttgaagtgccttttagtgttagtgaatatccttacgttctttaatttcttcatctgcctttaacgctaagttttcaagcgcttttttaggtgctgttcgttcacctgttttaggattaacaaattcaacgcgatctaaggtgtctgtgatttgtcctttaataaagcctaaatagatgttatatagctctttcttttcagctaattcttcaggtgttagttcttgaccagattttttcttagctgctagttcatttatacgttttaatgtatcgttaatattggtcataattgcctcctgtattctatattagaataacataatttattataacatagaacttaatgaatacgtatggtaagatataaattgtacgagttcgtactttcacaggtgagaaaggagtttatcgtgcgtgttacgaaagcaattaaggcagaacaattagcattattagaagagcattattttgatgctaaacctgctcttgaatacacaaatgaatttgaattattagtcgctgttgtgttatctgcacagtgcacagatgagagggttaacattgttacaaaacgattgttccctgtattaaatcatccggctaagatgctagaggttggtgttacaaaactagaaactcttatcaaggattgtggtttgtataaatcaaaggcgaagaatttgattgccacttgtcatatattggtagaacaatatcatggagaagtgccacgtgaatttgatcagctcgttgaattacccggtgtaggtcgaaaaacggcaaacgttgtggtatccgtattatttggaacaccagctattgcggtggatacacatgtgttccgtgtagcaaaccgattgaaattaggtattgcaaagacgccagaagaaatggaacaaaaattgcaaaaggctataccaaaagagaagtggtctgcagctcatcattggctgatttatcatggacgacgtgtttgtaaagctcgtaagcctctatgtgaaacttgttttttacatcatctttgtccgtcagcaggaaaggtttaatatgaaaaagaataatgaagaactaattgccctttgtgctcaatatggcatagaaggtattgatatcgtcaacgaattaatgcgttttaaagtattagatcaattgctttctagcaatgcgaattctcgtgaatggggtgttacaccagaggacttatatggattagctgagaaatctacggtggaatcctttggacctattccatatgatgtaaatacatttcgtgcattgtacggcccttcatttacggtagaactctttgattttattagtgatactggaattctagatggtcttgacgtaggaactatatgggaaacgcctgttcgtgaaagtatagaaagtcatagtaaaacaggagagctcgtcttatatgcgtatgtagaagaatacgctggcatgatagatgaaattttacaatcttatgaggataaaaaggttgtcctctatacagcatctcctgtatgctatagcattatctctcgattgtatccaatggctcagattattaatcaatggcctcatcgtagctattttgaccatatctttacaggtacggttggtatgttccaatcctctgaagatattgtagaagaggtagctaatggtttgcataatttggttccagaagggactgctcaattgttcttaccagcaacgatggcacaaaatcaattgggattgaataatatggcattacaattctttttgaaccaaaaacgtgttgaatctattcgtgaatggactccccttggggcttatgaaatcatttatggtaaatatgatgttaaaaagatgcgtgtaggccttcgtgaacgagttggtgatgactggaaagctattaattatattccattgcctcatggcgtctttgctcaattaccggtatttactgtattaaactacggtttgtcgttacgctctattttattgcctggcggtcaaactgatgtagctttaggtcaggatggcatttattgtatagatagtcgtgtttcagaactaggacgtgcggcacttcgtgaaaatggagcgtattacttagcttttacccgctatagtgaccatgtagaggtgtctatgggtacagaagcacctagtacgggtgtatattggatgttccctgatgtagaattggcatatatgtggtatacatatttttctagcacaattgggcaaaccttaatgcaagagatttctatgctcgttcaaacagaagaatccttcggctatatgcttagcagtgtacgtcgccgtgtactcgatgtaaatgatgaatcgctactagttaatgcggccaaaaatattgatgaagcgtataaagagactatcaaatctgcacgagcatcatggcaagaaaatatgaattctttgggtgctgacgtaatgcctccgacgacatccatcgatattgaagactacagtgactataaaaaataattgtcaatataggtaatttggtttacaatatatcgtatcgatttagaactacataatttgacacatagtgtacactgtaattaggtgaggagggaggtaacaatggctgttattaatttcgaaattttcaaagttatcggcacattatcagaagataaagatggctggaaaaaacaacttacatgcacaagctgggggaaatataatcctaaatttgatcttcgtgcttgggatagcgaatatacaagtatgaaaaaagggattactctttccttggaagaattgattgcattacgcgatcttttgaatgaaagtgatttagaaactatcttagcggaagcaattgaagaaaaacaggcttctaaagagtagtttcttgatttgtacgcattatcgtgctataatctataagaataatattgattgctggaaagaggtgtatagaatgaaacaaggtattcatccagactataaagaagctacagttacttgcggttgtggtaacacattcaaaactggctctgtaaaagaagaccttcgtgtagacgtttgctccaaatgccatccgttcttcactggtcaacaacgtgcggctcaagctcgtggtcgtatcgaacaatttaacaaacgttacggtaaataatagtttatgtagcgaaacaactattggcagggctttgggctctgcctctatttgtttatgaaaggaaatcctttggcaaaagaacgtattaagaagttcgttggtggacaagctgtcattgaaggcgtcatgatgcgtggcccaggatatacggcgacagctgtacgtgagccttccggttctatcgtggtgcaaaaggaagctactacgtccattcaagagcgatatcctatattaaagaaaccttttttacgaggctgtatagccttatatgaatctcttgttatcggtatgaaggccttgtccttctctgcgaaagcggctggtgatgaagaggaagaaatgtcgaatagtgaaattgccattaccatggtattttccacgctatttgcaatcgctttatttgtggcccttcctacatttgtagttaaatttattcctggtattcaagataatcactttattttgaacctggttgaaggtgctattcgattggctttgtttttgctctatatatggggtattggtcaaactaaggatatacaacgtgtattccaataccatggagcagagcataaaaccattcatgcttatgaaaatgatctacctttgacagtagaaaatgtgcgtgctcaatctcgtttacatccgagatgcgggactaattttctactcattgtaatggtagttagtatatttgtatttgcctttttaggttggcctaatttgctagagcgcattgtgtcacgtgttttactgatgcccgttgtagcaggtattgcctatgaatttattcgttttgcaggacgtagtgaaagctcctttgtaaaatctctcgttaaaccgggcttggcgttgcaatatatgacaacccgtgaaccagaagcagatcaaatcgaagtggctattcgtgctctagaagaggtgcgtcctccagaagaagatgcttatgaagatgaaacatattaagattgaggttatatatgttagtagataaattacaagttattgaagataaatttatggatctagagcaacgcatcagtgaccctgaagttattgcgcgtcaagatgaatggcgtaaactaacacgtcaacatgcccaattatctgaaactgtagaagcttttagagaatataaaaaggttttagctggtattgatgaagccatggaagtcattgaggacaaaacgatggatgaagaattccgtgaaatggctcaagaagaattgaaagaattaaaacctcaaaaagaggaattagaagaaaaattacaaattcttttattaccaaaagaccctaacgatgataaaaatattatcatcgaaattcgtggtggcgctggtggcgatgaagcggcattgtttgcaggcgacttattccgtatgtatacaaaatatgctgaaagccaagggtggcgttgtgaaattatcgatgctaatgaacctgaactaggcggttttaaagaggttgtattctctgtagatggtgagaatgtatattccaagatgaaatttgaatctggtgtacatcgtgtacaacgggttccagctacagaaacacaaggccgtgtacatacatctacggttactgtggcagtacttcctgaaatggaagatgttgatattgaaatcaatgataaggatttgaaaatcgatacatatcgcgccagtggtgccggtggtcagcatattaataaaacggaatctgctgtccgtattacccacttaccaacaggtattgtcgtggcttgtcaggatcaacgttctcagctacaaaacagagaaaaagcgatgcgcgtattgcgtgcaaaattgcaagataaagccgaacaagaggctacagctagcatggccgcagaccgcaagagccaagttggtacaggtgatcgtagtgaacgtattcgtacctataactacccacaaggtcgcgtaacagatcatcgtatcaatttaacattgtataaattggatgccattttaaatggtgatctcgatgaaattattcaagccttaaatgccgctgatcaagcagctaaaatgcaggaggctaatacaaatgtataaggagatttggacgattggtcgtattctccagtggacagagcagtactttcaaagcaaggggatggatacacctcgtcttgatggggaagtactgctttctcacgttttagggaagaatcgtatatatctatatacgaattatgatcaaccattagagcaagaagaactggatcgatttaggccgcttgtcattgaacgggctaaaggacattctgtagcatctttaacgggaacaaaagactttatgggattgacatttgctgtaaatgataaggtcctcattcctcgtcccgatacagaaacattagttgaatatgtgttacatacgtatcatcaacaagattctattcgaattcttgatatgtgtacgggccctggtactattttactaagcctcttgcattatctgcctacagcaacggggatgggccttgatatttctcgtgatgcacttgaaatagccacaaagaatcaagaagcatttaagctagagaatcgtagcgaatttcacgaatcggatatgttttcttatttagaagatcataatgagttgtttgatgtgattgtatctaatccgccgtatattcgattagaggataagaaaatcctgtctcctgatgtacttaatgagcctcatattgcattatttggtggtgaagatggacttgatttctatcgtcagttagctatgtattgcgtaaaatatcttaaacctcatggacttgtagcttttgaagtaggatatgatcaagctaaggctgtgaaatctttactggaggctgttggctcctatgtagatatatcttttgcagcagatttagcgggcattaatcgagttgtaacggctcgcgtgaaggggtgagaatgtggagactaaaatcattaccgaacttacaagagataatcttcaattagttgcacatgcgttgcgtcatggtgatgttgtagcaattcctacggaaaccgtatatggccttggtgctaatggcctcgatgcagatgcaatggataaaatctatgctgctaaaggtcgtccttcagataatccattgatattacatgtacccaatgcggaaagcattaaaccgcttgtgaaagaaatacctgaaacagcaaaggccttgattgaggctttttggccgggtcctttaacaattacattgcctaaatccgatctcgtgcctgaccgtgcaactggtgggttagctcgcgtggcattacgatgtccagatcatgctgtatgccgtaacatattagaattggccggtgtgcccattgcggcgcctagtgctaatatttcgggccgtccaagcccgactacggcacaatccgtttatgatgatatgaatggacgtattccttatattgtggatgctggaatctgtacgattggtgtggaatcaacggttgtagaggtgagagatgatggagtgaccatcttacggcccggtggtatcacaaaagaaatgttagaacaagttgtagataatgtgtcttatgatccgtttttatcgtctcaaaatgaagcgccaaaggctccgggtatgaagtataagcattatgctcccgatgcacctatgcgtgcatttataggtaatcccaaggatgtggcagaagctttcaataatgtaattcatgaacagggcactaagcgtggtgcattcttggttagtcaagaaacatatgatttgttaaaagatagtgtacacggtgaatttcatgtatatggacatagtggtgatgcggttgcattagctcacgatttttataagacattacatcattttaatgaatgtgatgtagactatattttagcagaaggtgttgagaatacaggcctcggcgtagcggttatgaatcgcatggaaaaggcgtgtgctggtcatattatctatttataagcaattaggtaatatttattatgtccattcataatagaaaaatgtctttacatattggatgtatttgctataatgtataaatagccacagaaattgtggcggtaaggatgtcattatgaatattttgtatgtatgtactggtaatacctgtcgtagcccaatggcagaaggtattacgcggaccttggcaatagagcttggtctagatgtgaatgtagtttctgctggattatttgctgcttatggtgccaagcctacagaagaagctgtgattgcgattcaatctatcgccgatatttctggccatgaatcaagacctcttacaatggagcttgtcaattcagcggatttgattattggtatgacacaagatcataaatctgtgttacttcgtcaatttccttttgaagtagctaaaattcaaacccttgctgaatgggggcatggtacaggagatgtggtagatcctttcggttcaaatcaagacgtgtataatcaatgtgctgagcaaatttataatttggtgaaagctggattagtagcatcaaaagaataggagatagagctatgaaaattgctattggttgtgatcatggtggattacatttaaaacaagaaattaaggaattattgtctacattaggccatgaagtggaagattttggtacacatagtacagaatcttgtgattatccggatattgctgaaccagtggcacatgccgttgtagatggtgcagcagatcgaggcatcttaatctgtggtacaggcattgggattggtattgcagccaacaaaattgcaggtgtacgtgcagcgctttgtcacgatacattttccgcacatgcaagtcgcgaacataataatgccaatattcttacgatgggggaacgcgttattggaccgggccttgcaaaggatattgttacaatttggcttaatacagaatttgaaggcggacgtcacgcgcgtcgcgtagaaaaaatttctgctcttgaaaaataatacatctttattcaattagttatcacattatatttacatatgtttcaaggaggattcccatgagtttcttagcaaaacaagaccctaatgttaaagcagttatcgatcaagaattaatgcgtcaacgcgataaattagaaatgatcgcttctgaaaatatcgtatcccaagccgttatggaagctcaaggtagtgtattgactaacaaatacgctgaaggctaccctggcaaacgttattatggtggttgcgaacatgtggacgtagtagaaacattggctattgaacgtgctaaacgtttatttggtgcagaacatgcaaatgtacaaccacattctgggtctcaagctaactttgctgtatattttgctatgttaaaacctggtgacactattgttggtatgaacttgtcccatggtggtcacttaacacatggttctcctgtaaacgtatctggtacatatttcaatgttgttccttacggtgttaatgccgaaactcaacaaatcgactatgatgaattccgcaaaatcgtattagaagcaaaacctaaattgatcattgctgggggcagtgcttacagccgtcaaatcgatttcaagaaaatggctgatgtagctcatgaagtaggcgcgattttcatggtagatatggctcactttgctggccttgtagctgctggcttacatccaaatccagtagaatatgcagatatcgttacaactacaacacataaaacattgcgtggccctcgtggcggtatgatattgtgcaaagaagaatatgcaaaagctattgataaagctgtattccctggtatccaaggtggtcctttgatgcatgttatcgctgcaaaagctgttgcattaggtgaagcattacaaccagaattcaaagaatacgctgaacaagttattaaaaatgcaaaagtattggctgctgaattgatagctaaaggcttgactatcgtttctggtggtacagatacacatgttatgcttgtagatgtgcgcaatacaggtttgactggtaaagaagcagaacatcttctcgatgaaatcggtatcacagctaataaaaatacaattccatttgatccagctagtccatttgtaactagtggtgttcgtttaggtacacctgcattgactacacgtggtcttaaagaagacgatatgaaagaaattgcagatattattgctacagtacttcaaaacccagaagatacagcaaaacatcaagatgctgcaaaacgcgtagctgcattatgtgaaaaatatcctttatatcctaacttataatttataggtattggtatagtaagaacccaaaagggtgagtaagagtttttcttgctcaccctttttatgttttagatgtcatatttatatggcaggatttgtaaatatgtgatagagtatgtatgaatagtaaaaggccgaaataatgatttcggattcggattgtttttatagggggcataatcatgaacgttaatgttatgacacatccattgattcatcataaggttacattgatgcgtgatgtacaaacaggttcaaaagatttccgcgaattattagatgaaattacattgttgatgggctatgaaattacacgtaatttgccattagaagatgtagaagtgcaaacaccattgactaagatgacaggtaaacgcattgccggtaagaaattaggtattattccaattttgcgtgctggtcttggcatggtaaatggcatgcttagcttgattccaacagctaaggttggtcatgtcggtttatatcgtgatccagaaacgttaaaaccagtagaatattattgcaaattacctagtgacgtaggcgaacgcgatttcatcgttacagatccaatgttagctactggtggtagtgcatctgcagcgattacgttgttgaaagaaaaaggtgctaagagtattaaattgatgtgcctcgtagcagctcctgaaggtgtggaggttgttaataaggaacatcctgatgtacctatttatgtagccgctcttgatgaaacattgaatgaacatggctatatcttgcctggtttaggtgatgcaggggaccgtattttcggtacaaaataatcacgacatatatctataaatacgatgtaaaagacgcccgaaagggcgttttttacttgaataaagttgtaataaggtataaaataatcatgtagaagtatttttttattctaggtgggactgattttgtttgtctgggacgaatatcgttatccttatcaaagggtaaaggaggaaccctatgaatgagttgttaatggtatgcgagcgtatagcaccggaattaataaccgtcttaaaggatcgctacaaattattgagccatctagcctatgaagaacctctcggccgtaggagtttagcactagctacggatatatcagaacgtgcagtacgatctcatgttgatgcattacgtggtaacggattagttgaaatctctaaacctggtatctatctaagtgctgaaggacgagaactagttcccaaattaagtagtattctttatgaatatgaacgtgttggcgaattagagcaacggttgaaagcggcattacatattgatgatgttattattacaccaagtgaaggatcattaatgttaaaacgcttaggttttactgctgcgaaagtggttcaacgtatggtaaccgatgagtctgttatagccgttagtggcggtagtaccatggcggcaatggctgatgaaatgcctagtagtgtgttgcatcccgtggttgtaccagcccgtggtggtgttggtgaagtcgtcgaatatcaagcgaatgtaatcgcctctgtattagcagaacgttggcatggctcatataagatgcttcatttaccagatgggctatctaaagattccctagatatgcttgtaacattagaaccacaaatcaaggagattagcgaattaatccatagaactgatatattagtttttggtattggtcaagcactccatatggccgatgtacgacatataccgaaggatgtgcgccgtcaactcgttgatggcgatgccgtaggtgaagcattaggtcagtattgctctatggatggttctatcgtctatgcgacgaacaacatagggctttcattaagggatatagtaaatataccgcatgtcgtagctgtagcaggtggctttgataaagctggtgctattatcagcgttatgaggtcttgtaaaaagggaatcctcataatagatgaccaagcagcagaaggtatgcgccaattactaaatattcctgcgttataatttagtttattatttttagtattatatagttcttttgaggaggacaaaacaatggcagttaaagttggtattaatggtttcggtcgtattggtaaatgtgtagtacgtgcggcaattaataatccagatgttgaagtagtagctattaatgcgactggtgataatgagggtactgcattattgttaaaatacgattccgtacatggcacaatccctaatgaagtaacatttgacgatgaaaatatttatgtagatggcaaaaaaattcgcgtattccatgaccgtgatgcttctaaattgccttggtctgaagaaggcgtagaaatcgttatggaatgtactggtaaataccgcgatgcagaggaagcaaaggttcatttgaatcaacctactgttaagaaagtattgatttctgcacctggtaaaaatgaagacttaacaatggttatgggcgttaaccaagatatgtacgatcctgcaaaacatcacattatctctaatgcatcttgtacaactaactgcttggctccatttgctaaagtattatgcgatgaatttggtatcaaacgcggcatgatgacaactattcattcctatactaatgaccaaaaaattcttgatgcacgtcataaagaccctcgccgtgctcgtgcagcagctatgtctattattcctacaacaactggtgcagcaaaggctgttgctaaagtattgcctcaattaaaaggtaaattagatggttttgcattgcgcgttcctacaccagatgtatccgctacagatcttgtttgcgaacttgaaaaacctgctacaaaagaagaaatcaatgaagcattccgcaaagcagcagctggtgaattaaaaggtatcttaggcgtatccgatgtgccattggtatcctgtgactttagttctgatcctcgtagttccattgttgatgctgatttgacaatggttatggatggtaacatggtgaaagttgtttcttggtacgataacgaatggggctattctgaacgccttatcgatatggcagctttcgtagctagtaaaggtctataatgggaggaaattctaggatgaaattaaccattttagatatgaatgtagataataaacgcgtttttgtacgcgtggatttcaatgtgcctatgaaggatggtgtcatcactgatgacactcgcattcgtggtgcactagatacaatcaaatatttaatcgaccacaatgctaaggtcattcttgcatctcactttggtcgtccaaagggtgaacgtaaaccggatatgacattggctccttgtgctaaacgtttatctgaacttatcaataaaccagtttcatttgtagatgattgcgttggtcctaaggttgaggcagctgttgaagcattacaacctggcgatgtattgatgcttgaaaacttgcgttaccacaatgaagaaactaaaaacgatcctgagtttgctaaacaattagcctctcttgctgatgtagctatcaatgatgcatttggtgtatctcatcgtaatgcagcatctgtagttggcattgctgattacatccctatgggtgcaggtttcttacttaaaaaagaaattgatgcactaagtgcagctgtagtacatccaaaaacacctatggctgccattatcggtggtgctaaggtaacagataagatttctgttatttccaatctattacctaaggtagatgttatgattatcggcggcggtatggcgaatgctttcattaaggctcaaggctgtaacatcggtagttctttatatgaagatggtcaagatgctatcgctacagatttagttatggaagcacgcgttgcaggtgctagattattgacacctatcgatgctgtagtggcagatgctttcagcaatgatgcgaacacaaaaatcgtggatgtcgataacatcgaagatggctggatgattttggatatcggtcctaaaacacgtgacctatatacagaagcattggctaatatgaaaactatcatttggaatggcccaatgggcgtatttgaaatggataattttgcagctggtacgaatgcagtagctaaagccgttgcagaatctgatgccatgactatcgttggtggtggtgattctgtagctgctattgaaaaaagcggcttagcagataaaatcagccatatttcgactggtggcggtgcatcccttgaattattggaaggtaaggttttgccaggcattgctgctttaacagaggcctaaaatgagaaaacaaattattgcaggaaactggaagatgaacggaaccattgcatctggttctatcttgattgaggcatttaccagttttctaggtgataaagatttggactgtgacgtagttgtatgtccgccctttactgcgcttgagagagctgtgtccttaacacgagatacacaggttggcgtaggggctcaaaatatggattatcatgatgctggtgcatttactggcgaagtttctccgttgatgttaacggaactcggtgtgtcctatgtcattattggccattccgaacgccgtgagtactatggtgaaacagatgctatggttaatgaaaagattaagagtgcatttcatcataatttgcaacctattgtctgtgttggtgaaagccttgctcagagagaggcaaatgaaacgatttctttcattcacggacaattacaatgtgcattacaagatattccagcggatcaagtggaacaattgattatcgcttatgaaccaatttgggctattggtacgggcaagactgcgactgctgatcaagcagaggaagtatgtaaatctatacgtgattatatagcggaactatatacctctgctgtagctgaatcagttcgaattcaatatggtggtagtgtaaaggctaataatgcgcgtgaaattttaagtgagcctaatattgatggagccctcgttggaggcgcttcgttaatcgtggatgaatttaatgaaatcatcatggcggctcaagacgtgagtaaataacatactagaggtataaatatggcaaaattacaggcacccgtaatgctagtcatcctagatggctttggtatgggggaccaaacagatacgacgaatgccgtagtacaagcaaaaccaagttattttaattatttgtgggatacatatcctcatacaacattacaagcttcaggtcttgcagtcggtttgccagaagggcaaatgggtaattcagaagttgggcatcttaaccttggttccggccgtattgtatatcaagacttaacgcgtattacgaaggatgtagagagtggcgagttttttcaaaagcctgtaatacaagagttatacaagcatgctaagcatggtaaattacaaattattggacttgtatctgatggcaatgtacattgttctttagagcatattaaggccgtaattgctggtgctaaacatgaaggcattaaagaggtatatgtgcatgcgcttctcgatggacgcgatgtgccaccacaatcagcattaacctatcttaaggacttagaatcctttatgtccgatataaactgcgggaaaattgctactgtaagtggccgttactatgggatggatcgcgataaccggtgggaccgtgaggagctagcctataatgctattgtcaatggtgttggtaataaggctaattctgcgtgtgacgccgttacacagtcctataatgatggtgtgaatgatgaattcgtagtgcctacagttatcgatccaaacgggatgatttctgatggagatgccgttatattctgtaactttagacctgatagagctcgtgaattgacgaaggctttaatattacctgattttgaaggttttaaacgagaacctatatctatctttatggcgacaatgactaagtatgaggatggattacctgttcatatcgtctatgaaaaggatacgttacatcatacattaggtgaggtccttgctgatggaggctatcgtcaattacgtattgctgaaacagagaagtacgcacatgtaacatatttctttaatggcggtaatgaggttccctttgaaggtgaagaccgtattcttgtgccttctccagcagtggcaacctacgatttacaacctgaaatgagtgctcctgaggtgacagctaaggtagttgatgccattcatagtggtcaatacgatatgattatcctaaattacgcaaatccagatatggtagggcatacaggagattttaaagctgcagtgaaagcaattcaaactgtggatgcaggattagaacgtattgcaaaggctatattagaggttggaggacagcttttagttaccgccgatcatggtaatgcagagcaaatggtcaatcatgagactggaaaacctcatacagcccatacaacgaatgttgtgccattgattttagtgggagctcaggatatacataaacaacttaaatcaggtaaattatgtgatattgcaccgacaatgttagcgttggctcatattgataagccaagtaatatgaccggtgaaagtttgttattagattaatttagtatataaataagaggtagtattatggcagtaattgaacaagtcgtagctcgtgaaattttggattctcgtggtaatcctacagtagaagtagaagtatgtttagaagatggtacaattgcaacagctgcagttccttctggtgcatctacggggatgtttgaagcagtagaacttcgcgatggcgataaaaaacgctatggtggcaaaggtgttttacaagctgtagacaatgtaaatgctaaaattggcccagctattatcggctatgatgcgactgaacaagtggcgattgataatttaatgcttaaacttgatggcacagataacaaagctaacttgggtgccaatgcaattttaggtgtatctatggctgtggcacgtgctgctgctgaatctttagatttgcctttgttcttatatctaggtggttttaatgctaaagaacttcctgttccaatgatgaacattctaaatggtggtgctcatgctgataataatgtagaccttcaagagtttatgattatgccagtaggggccaaaacatttagcgatgcattgcgtagctgtgcagaagtatatcatacattgaaatccgtgcttcacgataaaggtctcagcactgctgtaggcgatgaaggtggttttgcaccaaacttggcatctaatgaagaagcattagaagtaatctgcgaagctattaaacgtgcaggttatgaacttggtacagatttcaaattagctctcgatgtggcttccagtgaaatctataaagatggtaaatatcatctagaaggcgaaggcaaagtattgagcgctagcgaaatggttgacttctatgaatacttagtcgataaatatcctatcgtatctatcgaagatggccttgcagaagaagattgggatggttggaaagtattaactgaacgccttggtaagcgcgttcaacttgtaggtgatgatttattcgttactaatacaaaacgcctcgaaaagggtatcgaccttggcgtagctaattccattcttgtaaaagtaaatcaaattggcacattaacagaagcctttgatgctatggaaactgcaaaacgcgctggttacacatgcgtagtatctcaccgttccggtgaaacagaagatacatttattgcagatattgcagtagctgttaatgcgggtcaaattaaaacaggtgctcctgctcgttctgaacgtgttgctaaatataatcaattgcttcgcattgaagaaatgttatacgaaacagcacaatataaaggtgatgcagtattctataatttgaaaaaatagaacaatacattctgttttagaataacatactagataagagactcttttgagtagtgaaaactcaagagagtctctttttttgttgtttttttgcgtacctgtacacgcattgtggattatttagaaataaagaggagtttttcttgttgtacagaattacatagtgcaatgagcaaaggtgatgtataaacacaccgcaaggtatgaaggagggggtgacattgtatgtagatgttgcattggattcaatcattacgtatgccattacgattagtgctagtgatatacattttgatcctattccggatggtgtacaagtgcgattgagaattgatggattattaacggattatatgtttatcgatgctactgatgcggatatgattgtgaaccgcatcaaggtattcagtggcatggatattagcgaaaagagattgcctcaagatgggcgatgggaatggacagctaaatcgtatgctgtcaccatgcgtgtatctagtttgcctagtctatatggtgaggccattgtgtgtcgtctaatgggaaatgaaggagtgcataaaaatttattagaacttggtatgtcagtcaatttacaggagaagattaccgcattactaaaacgaccctatggtctcattaccatttgtggacctacgggaagtggtaaaacggctaccttatatgccatgttacgtatgttgaatttaaaagaaacaaaacttatatgtttagaggatcctgtagaagcggccattgatggagccattcaaatagggattaatgaaaagattggatttaccttttcgaaagggttacgcactgtattacggcaagatcctgactctattatgattggtgaaatacgagaccatgagacggcacagctagctgtaaaagccgctttaaccggacatcgtgtaattaccacggttcatacgaataccgcactaggtgttattggacgccttattgatatgggagttgaaccatatttattacatgctacgttaattggctcactatctcagcgcctcgtaagacgtattaatagcactacaaattcttatcaaggacgattaggtttgtttgaatatgtagagataccatctagtgatattgattggaatcatgttgatacatatctatatgtttcattgcaagattcggcgcagactgctattaattcgggcattacaacagtagaggaggtacatcgtgcaggcatcttattgtgattgtgtagtgacaaccgactcgatgataacaatagaagatgtaatttccttatcgttagagcatagtgctactgatatacatttagaggtgggaacaccgatttatattcgagctgctaatgggttggaatctatttcaagcatttgcactgtggatatgattaaagatgtattacaacgatgtggcgtcacacatgatgaatggcactctgtagataatgctttcaccagcaatggcattcgaattcgggctcatatttatagggctaatcatagaatttgtggaacattgagattactctgtcatgctaatttatcgcttgatacatctaaagatagtgatgtattaaaacaaatttgtgaatatcatgatgggttagtccttgttacaggccctacaggtagtggcaaatcatataccttagcttgttgcatagaatatataaataaaactatgaataaacacataataacgttagaagatcctgtggaatatgagttcataccattgcagtcaattattcatcagcgccaactcggaattgatgtggattcgatggcgcatgggatacgtgatgccttacgagaggatccagatgtcattatggtaggagagttgagagaccgagatacgttagaggccgcattacatgctgcggaaacaggtcatcttgtgcttgcaaccatgcatacacaacgagcagttatggccgtgcaacgcatgatatctttatttcctggtgaacaacaagatgaagtgcgcagtcaagtatcacaagtattgcgtgcggttatatgtcaacgtttgttacgatgggaaacctcgtttataacaatacgggatattctgttaaatacgaatgcagtggcaaatctaattagaaatcgaaaggaacctcaaattgtttcaatccaagaaacgcaggcccccatgaagacattagaaatggcagtgcgtgatgtaaaaacgcaatatggatcagttcaccaattacatgctttattggaacaacaattatcatagaggaattacatgaatgcttatgaatatacagcgataacaacagacaagaaaagaatacaaggcctattatgggccgattctgaggatgaggttagcactaaactcaagttagaaggatatgtcatttgtagtatagctagatcctctagcaaatcggtacgttggaatcataaacaagtgagtaccacagcatatcaactgggattactgctccaatcaggtatttcccttaggcgttcgctagaacttttaatggatggctcaaaaacgatgttatatcgctctttatacgagggtatacaacgaggccaacccttatcagaggctcttcgagaaaagggctttcctcctatagcattggcattacttgaaagtggtgaaatgtcagggaatgttggggaagctttgcagtatatagcttcttattatgaacgagaacgaaaataccaacaaaagatagtaagtgctatttcatatcctttattcttactggtgcttatgaatgtatttttcttggttactatattatttattattccatcgtttacccgcgtatttgctactatgcatatagaattaccatggatgacaaaaggtttatttgtattaggaacttcccttcgagaacatccattactgtatgttagtgggcatgtggtttttattggaatactcatatatgcttttaaacaatctgcaattcgatatagatttgatagatggttatggcagttggctcaacataatacatttttaacatctctatattacacgaatattttacatatttggtcattattgctagattcgggaatttcaattatcaatactatagacattacaaagcatatatggcgaaattcgtatggtgaatcctgtagtaatcaagtttatgacatgctttgtaaaggacattctttttgtgaaagtttaaaatcatcgtctgtagggaacccatttatatggcaaatggtcgctgttggagaagaaagtggtgaattggtagccatgttgaatcattgtagtcactattatgaatcgttgttaacacaatatatagcaagaatggagcgccttatggaacctatactcctcaccattatgggcgttggcattgcaatcctcgttatatccgtcatgtatccattatttacatcaatatcatctctaggtggtcaatgaaaggagactttttaaaatgcttatgtattgtagagaactattaatccgattagaacgattgttttttagatatattagtttgcgtcgcatgcaacgaactaaacaagatggatttacactggtagaacttatggtggtagtagctgttattgctattttggcagctattgcaatgcctcaatttatgtccgctgccgataaggcaaagaatgctaaacaagtggcagatatgcaaatcatacgtaatgcgacacaactctacatgattgataaaagtttagatacgccaccaacagtagaaaaattatatcaagaaggttacttaacagagcatgttaaaactacaaaaggtaaggaatatgttattacctatgaacaagttgctggtaatgccggtaagtctgtagtcgttacggcccctgaaacataaaggattttgcaatgaaagggagaaaggaatatatctgtttagttatatggatattgtcaattgtaattccattaatgtataggcattacacactatttgaaattatatgttatagcttcttttcactatttctcgtaataggtgctaccattgataagctatatttcatattacccgatgagggtgctatcgctcttacgattataggtatcctttatagcatcgttgaacagcatgcagttttcgacacctgtgtacatgttttgatcgttgctagtatcagtattgcattacgcatattgagtcgaggtggtcttggttggggcgatattaaatggatgagtgctatatccatatggctaacaaacatacaaattatagttatgatttacgtttcttgttttgctagtatcctctatctcgccagcttatatagtattcgtaatacaggtagacggtatattccttttggccctttcttgtgcattggtgcatggagtgctttgcattttgctaatgtatgggaggcgatatattggtcggtgataaaacacattattgtaatggctctatattagtagagtggcttgtggcgattaccattctactatccttgattggtataggcctaagtagtatcgttaccataccatcacgtcatgagttgaatagaagtactgaagaagtcgtattagctattaagaaggttcaactatgggctatgctaggacaccgggatgatcggatggcacagggtgagtttattttaaagaaacattcttattcaattcaagaaggtcttatgcagcatcatgtagagatagaattaccagaacatatagaaagtgctcatactatgaagcgcgtttatttttctgcttatggattgccttatgatgggacagaatttattttacaagacttacaaactggtgcgacaaatcgcatatggatctctgtacaaacagggcgtattcggtgggaatcattgtgattatgacatgtgtacaaataagaacgtatccaaactacaaacatagattacgaacagaacaatctggatttttatatggtgatgcacttatggcagtaaccttagtattactcatattgccgattatactttatgtcttgagtagtaccttatcgatagtaaagactacgtatactcatgactatatattgcaggattcattatcttatatagaagcagggaaagcggtatatgattctggtggtataccaacaacaggaactatctcatcatcaaatggacataatttatccaatataacatttaaacaaagtgttacagaagaagtggtaaatggtgtatctatattacgatttatcgtacaagctgttgataatggagttactgtttatgagatatctacgtttcttggatcgagtcatcattgaaaatcataggataaaatcattcaatggatttatattaccatctctacttattagcgttttgattagttctttcgtgattctcgtaatcatgacaatatgtatgacgtgttatatatggaccgagcgaattgatgatagcctggctatgttagaggatggccgttatacaagacgggctatcgtatctcatattatttggaatcattctatggtatccatcaatgatcagggagacctgttatctatcaatgatacaagccgtaccgcgtttaccgttactagaagggccttatatagaaaattaagtgatggtagcttacaacccttgagtggaagccgcatcataggcactgatgataagcgtaaactggatgctaccaaaccattttctatgaatcctaatagactagtgactcttaagtggtctataaataaccggtttaatagtcaaacagaatatgcaaaagggtatggaggcatagcaaattatgaggtggcaacggcggtatcaacacattcagattggtttaaaaaaacgaagcatctctgactattcttctggcatggttagctatgtagccatatatattatgctcattttattagtacttattttaggaatgaataggcttgcgacactgtcactaagtaatacaacagatgaaatgagacttattgcatctcattatgcagcagagcgtggtgcacgatggttctgtacgtattgcaataacggtggccattgggattatagcgaggctattgatgtggaaaaaaacgatactatctatatatatattaaggcagatccaaaggttactaatccaaaacatgtgatgagttgtgctgtattagatggtgtatcaagtcgtgttcacatatatgtaaaagaaaaagaaaatcatacattagaggttattagtgtaaaaccatattaaggaggacatcactatgaaagagaaaaaacagatacatacagggctttgtattacggatgatagaattgttgccactacagcacatattgaaaataaaacaatgattattactgatgcaatggagatgaaacggtctagcacaattgatgaagatatagctgaatttattaatacatatgatctagaagagggtgaatatagtattgttgcttgtatacctacggaaatgacgatggctagttttgatcctcatgattttgatgtaaaggaatttataaagtggaatatagaagatacatttaattttggcgaacatgaatttgaacttgatgcttgtcgtagagagtatccacgacataattattatttgtttttagccgccgtagaccggcatgaacttgaattactacgccaaggtatacgcgatacatgtgcacctgtcgatactattgattgttggccattaccagttacgtatggattgatgcatagaacaggaacggttacaggtatcgtagaaccagccggtatgcatttatgggcttggtggaaggatacttgtgtgaaggaatgtattgtaaagataaatggtgcagatattagttccgcattgattgaaatggaagaaatgttgcagcgatttggcgtagaagaaatacaaggtatacatttttataatactgatgatttaaatgaagagcagcgtatcgatataagcgcattacaagaggtatacggaaatacagaatatatacctatggtgtttcttggacgaggtcgcacgcgttgcacattaggtgaattagattgggatatggcgattggaatggctacgcgggggttacggtggattggacaaggatggtaatgaaagattaataaattttatgccccgttcattacgatggtatatttggctatgtaaatataagttgtatatatatgctactgcaggagtgattatattactcagtgctttttgtcttggtatgggggtctattcttataaaacttatactgaacaggtagcgaagtacgaacaaatacagatggatgaacaatctaagcaaatacgggatcaatatcatgctatggaggataccatgtcgcggttattacaacatggcgcacaattagacaatcaatattgtcttgttacattattggatggagctatgtcaacaagaggaaccattacgttacgacatatagaattttctgatggaggatttactgttgatggtaatgcaacaaatgatgaagcctatcattcgtatgttcaatatattcaagctcatatgaaacaggtgatttgtgatgggaaacaacaagtggaaaaagcagatggaccttgttcattccatttggatggacatacaaaacagcatgacaccaaacctaaggaggatattcctagcgtgtagtataagcattatgattgctttttcttcattatggatatatagatactatacagagcaatatgaagcgatggtagagaacattgaatattaccaattggaaacaacagtaaaagagcaatttttatcttctcatacatatgagttgatttcatccttattgctgcatgaatattgggtagatgatatatatcaaagtataaatagagaacctctaattataacgagtagttctcatcatgatgatatattagatctgactctggtcggaaccagtcagtcctttttatcttggtataatatggtgcaacagaagataaagtattgtcatatacagattatgtctattgatacaaaaggaaatagtatatcttttacatgcaaggttacgccattagtgatgtaaagaaaatgaacatacaataatgagtaataattctcattattgtatgttcatttttgtttttatgccaattttatagtaaaataaattttaacgtaagaataaggggcaatagtaacatgatagtaaaacgaaatattattctcattgggtccatgggaagtggaaaaagccattttggacgtaatctagcagatttaaaaggatggcaattcgtggataccgatcgagtattggaaggtcgttttgggttgcccattgcagaaatttataaaaagattggcgaaaaagcatttcgtcgtgctgaattagaggttctaaaaaaagtttccctatatcacgaggcggttattagtgtaggtggaaattttcctatagagcatagaacgcttagatcgcttaagaaattttcttttattataggtatacgagctgcacaataccgaattgtaagccgcgtcaatcgtcgtgtgggcaaacggccaacgatggattataccaatgtttctgcctttgttcataatatgattcaggcatggaagccagtatataaacagtgtgattatgtattggatacgactaacggacgtacctatgattttatgaaagcaattgagcgtcaattggatgctataggtgttcaatttaaggcgcgaagacaacccaaaacaactgaaattgtgtctaaagacatacaagctgaaccaaagcagcagaagggaaatagacatgaaaaaaatagcattactaacaagcggcggagacgcaccaggaatgaacgcagccattcgcgccatcacaagaaaagcaatccatgagggccttagcgtatatggtatagaacgaggatttgagggcattattaatagtgaaataagacccttacacgctcgtgatgtgggcggtattattaccactggcggtacaattcttagaacggctcgctatccagagtttaaaaatttagatgtgcagcaacgagcctatcgaatattacaagattttggtatcgatcatttaatcgttattggcggtgatggatcacaagctggtgcagaggctctgatgcggctcggtcaatctacgataaccattccttgtaccatagataacgatatgaatggcactcaatatacgattggttttgacaccgcacttaatactgtagttgatgcggtaggacgtattcgcgatacatcaaactctcatgaacgagtggctataatcgaagttatggggcgtcatgcgggacacattgcattacaagctgggttggcgagtggtgcagagcttgtattagtgcctgaatacccaatgccattagatgaggtatgtgaacatattaataagactcatcagttaggtaaagaatatagtattatactcgttgctgaaggggcctactctagtggtgaggttaaagagtatattaaacaacatacatactttgatccgagtttaacagttcttggttatttacaacgcggcggtgcaccatccgcattagatgccattttagctgctcgtatgagtgagttggcagtggattgcttagtacgtggagagcataattgtattactgggtatgttgatggtcagattcgagctataccctatgaaaacgctaaaacaatgaagtttggcattgataaaagtcagtatgaattaatctctatattgagtcattaatgtgggattgtaaaattatattgtataaacgataattttttagtacaatgtaatgcatgaaaatggaatgactcatttattaaggagtatatatgaaagaattatttcagaagcaccgtaaacgtattattggtggtgttattgctatctgtttattaggtggtggtggctattattatgttcatacaaatgatagtgcacagacccagcagaaatatacaaccggcaaggtagaaaagggcgatgtaaaaacgagtattagtgctacgggtaccattaatcctgttaattatgtggatgtatccacaaatgtggctggtaaacttgaaaaagtattggtcaaggaaaatgatcatgttacgcaaggtcaaattatcgcctatattgatacacgacaattacaagctcaggtcgataatgcaaaggctgctcttgataaagcacgcttagatatgaatcgttataaagcgctaatcgatcaaaatgccgtagcagcgcaaacttatgatgatgctgtgaccgcatatgaacaagctcaatctacatatgatagagtctctgctgacttaagtgatgctactattactgcacctatgtcgggtaccgtagtagggacacctcttaaggcaggccaaacgattagtaccggtatttcgacacaaatgatcattgcgaccattgcagatttgtctgatttagaaatttatttgacagttgatgaaactgatattggcaatgtaaaaaatggctctaaggtagaatttactgttgactctaagccaggtcaaactttcacaggctatgtatctgaaattgcaaaaggtactaaagggaatatgggtgttacaagtaatagcgtagtgtattatactgtgaaagtatcgattccagccgatatttcctcgaatttcttgccatctatgactgcacgtgccacaatctttggggatgatattaagaatactcttgttgtaccattaacagcggtacgtactgataaacaaggtgaatatgtatatgtcatcaaggatggtcaacctgttagaactgctgtatctacaggtgtgacgggtgatacaaatgttcaaatcttaagcggcgtttccgaaggtgatgaaattattgttagtggtgatgtaacgagccctaagaataactctcgtggaccattttaagcgtaggtgaactatgaatcagtcagttattgatattcaaggtattacaaagacctatgtaaatggtaagttaacggttcccgttctacatggtatagatttacaggtacaaaaaggtgatttcgtgtctatcatggggccttctggttctggtaagtctacctttatgaacattttaggttgcttagatagacctacatcgggatcctatcgcttgaatggtaatgaagtagctaatctcagtgacgatgagttagcatatgtacgaaataaagaaataggttttgtatttcaaagctttaatctattaacgaaattaacggctattgaaaatgtggccttgcccatggtttatgcaggcatcgataaaaaaacacgtactgctcgtgcagaggcgttgcttacatctgtaggcttgggtgaccgtatggatcatttaccagcagaactatctggtggtcaacgtcaacgtgtggcgattgctcgtgcattggccaatgaccctgctatcatcatggccgatgaaccgacagggaatttggattcgaaatcgacgattgatgttatgaacatctttagaggcctttatgatgaaggtcgtaccataattcttgttactcatgaacctgaaattgcaacctatgcaagtcgcaatgtagtgttacgggatggattaattgtagaagacaagaagaacttaaatatgactcctgttcaggaggtgacacatgtataaagaaagtttcttaatggcctgggcatcgttgattgccaataaaatgagatccattttaacgatgctaggtattattattggtgtagctgctgttattgcccttgtgtcaattgggaatggtgtaaagcaggatattcagaactccatttctagtttaggttccaatctattgatggttatgcctggtgctccacgtacaccgggtgtgcgtccatcgcaagggtcaatgaaatccttgaaggtttctgattatcaagctattagcaaattagatggcgtcaaggcagcaagtccatatacagctaattcttatgtaactatataccaaagtaagaactggactactactgttagtggtgtaagtagtaactttcaagatgtaaataattggaccatggctgaaggtcgatttatatctagcaagaatgtagaaaatcgtgaacgcgtagctgttgtgggacaaaccgtagttaagaacttatttgctggtgaggacccagtgggtaaggaaattcgtgttaaaaatattccgttccgagttatcggtgttcttaacagtaaagggaatggtactatggggaatgaccaagatgatgtcatttttattccctatacaacggctatggaacgtgtagaaggtgttgactatcttcgtatggtctacgtcgttgctagtgacgataatagtattgaccgtttacaatcggatatagaaaatctattgcgcgttcgtcatagtattaaagatacaaaccttgatgacttcaacattcagaatatgaaatcgattatggaaacaatggagcaaaccacaggaaccttgaccttgttcttaggtgctgtggctgctatttcccttgttgtaggcggcattgggattatgaatatcatgctcgtttccgttaccgaacggactcgtgaaattggtattcgtaaggccttaggtgctacatactttgtcattgttacacaattcttaatcgaagctgttgtaatcagtctcatgggggggctcataggcattgctctcggtataggtgcgtcaaaactgataggattggcatctggtatgagtacagttatttcggtacctactatcgtgttatcctttgcattctccatggctatcggtttggtttttggcatttatcctgcgcgtaaagcggctaaattaaatccaattgatgcgttacactatgaatagtattggtagatgcggatatttgggcaatctcacatttatataatgtaatagacatattcgcatacagtgcgttgcatgatacaattaagtatgatataacgcactatttttaatttagtgaggaaattatggcaacaacattattggaatattttaatgaattacgtacacagaatcctttttcctgggtgaaagattctgaggtgacaactgtagaaccgggtcatgcagaaatgacgttacaaacaaatgaaacagagtactgcaattttaggggccatttgcatggtgctgtttgtattggctttgcagatagcttgatgggaacggcatgctttacactaggaaaatcggtgagtaccattgatattaatggtaactatttgaaagctgtcaaaggcggcacagtattgcgtggtgtagcgaatgtggaacacagtggtaaaactacgatggtggctactgcgcgtatttataacgagttaggtgaagtggtacatatagcaagaggtacgttttttgtgatagaagagcgtcctttaccggatttaccttggagattcattgaagaagatgacccaaatttggtataatgggggttgaactttgtaatttaggaggacggttgtatggaacaagaattacaacgcattaaagaagaagctttatctgctattaaaagcgcttctgatgaacaagcgttgcaagacgtacgcgtaaaatatttaggtaaaaaaggtgaagtaacagcattgctaaaagggttggggaaactttccccagaggaacgccctaaaatgggggctcttgtcaatgcagttcgtcaagcattagaggaagaaatcgatgcattgaaaacttctatggaagtagcggctatgaacgctcgtttggaagaggaaaaaatcgatatcactctacctggtagagctcccaaaacaggacatattcatccgttgacaacagtaaacgaaatgattgaagatttcttcatgaaaatgggctataccgttgaagaaggtcctgaaatcgaacaagatcactttaactttgagtgtcttaatttaccaaaagatcatccagcacgcgatatgcaagactctttctatattacagaaaatttcttgcttagaactcatacatctcctgtacaagcacgtaccatgcaacgtcatgagccgaacagcccgattcgcatgattgcgcctggtaaggtatatcgctgggactatgatgctacgcattctccagtattccatcaagtagaaggcttgattattgatgaacacattacattcgctgatttgaaaggaaccattgaaacattcctacgccatatgtttggtgatgaaacaaaggtacgtttccgtacaagcttcttcccattcacagaaccatctgcagaggtagatatctcctgtgtaatgtgtggtggtgaaggctgtcgtgtatgctctcatacagggtggcttgaaatcttaggttgtggtatggtacatcctcgtgtacttgagcttaatggctatgatcctaataaggtgaaaggttttgcctttggtatgggcgtagaacgtattgctatgttgttatatggtattggcgatttacgtctattctttgaagatgatatccgtttcttggaacaattttaggaggtagaaatgaaagcaagcttacaatggatgaatgaatacgtacctcttgatctaaatcgtcctgcccaagaattagcggatgaattgacacaagcaggtattcctgtagaagaagtactttctatggatccaggtttgaaaaaaatctatactggtaaaatcgtagaaattacaaaacacccagatgcagataaattacaagtatgccaagtacaatgcttatctgaagatggggaagaaattactaagcaaatcgttaccgctgctacgaatgtggctgttggtcaaatcgtaccagttgcgtatcataaatctcgtttggcagatggtacagaaatcaaaaaaggtaaattacgtggtgttgtatcagaaggcatgttctgctccgttgctgaattcggtatttcctctgatctggtaagaccagaagaagcacaaggcatctatattttccctgaaggtacaccaattggtttagatattaaagaagcacttatgcttgatgatactgtatatgaatttgaattaacagctaatcgtgcagactgcttctctatggtaggtttgtcccgtgaattcggtatcatgacaaatcaaaaggctttattcccagttattatggtgaatgaaaatggtgagtctatcgaaggtaaagcatctgtagctatcgaagcacatgatctttgcacgcgatttacatcccgtcttgttacgaatgttaccatcgaaccatctccattgtggatgcaaaatcgtttgcgtaacagcggcattcgccctattaacaatgtagtggacgtaacaaactacgttatgcttgaattaggtcaaccaatgcatgcttatgattatgattgtgtagcggaccatacccttattgcacgtcgtgcaaaagctggtgaaacacttactacactagacggtaatgaacgtgaactcaatgagtccatgcttatcattgcagatacaaagggcccaatcggcgtagcaggcgttatgggtggtcttactagtgaagtaacagataaaactacaaacgtcttgttcgaagctgctgtatttaatggaccatctattcgtcgtacatccaaagcattaggtatgcgttccgaagcatctggtcgttttgaacgcggtgtaaaccataaatatacagcatatgctatcgatcgtgctgcacaattgttacaacaaatctgtccttcttgtaaggtgagtgttggcgttattgatgtatatccagaaccagtagaacaacgcactgtaactttcacagcagaacaaatcaatgactatcttggcacttctattgaaaaagatagaatggtagatattttaacgaagctcgagttcggcattacagaatctggcgatactattgaagcactcgttccaacatggcgtgatgatgtaactggtatgcctgatattgcggaagaagtggcgcgtatcgtaagctatgataatattgcgcctacaattcctgtagcgatactatcctccggcggtatgacacctaagaaagcgttaacaaaagaagtaacgcattacttagcacacgctggtcttagccaaatcattacatttagtttcatgcacaaagatggccttacgaatatgatgttaccagaaggtgacagtcgttatacggctattccaatcttaaatcctatttccgaagagttcccatatatgagaactacgttggtgccagctgttattgaagctgctaaacgcaatattgctcaacaaaataaggatttgtggttatttgaaacggctaatgtgtatgaaccaaaagcattgccattaacagaagtaccgcatgaacgccctatggcatgtggtattatgatggggaaggttacagaggccgcatggaaccaagcgcaacgggacactgatttctatgatgtaaaaggcgtagttgacggtttactagctaaattaggattgactcaatatgatattcaaccatctagtgaaagctattaccatccaggcgtaagtgcacattatacagtcaatggtgtaacgattgcaaactatggtgaattacatccacaagtggttaaaaactttgatttgtctggtaaagtatatatgtttgaaatcgatttggaagctgtattatccattacagtaccgccatttagatatcaatcattcagtaaattcccagggacaagtcgtgacttggctattgtagcaccagtatctgttacaagtggtgaaattgtagcccttattaaggaacatggcggagaatacttagaatccgtatctatcttcgatgtttacgaaggggaacatattgaagcaggctatcgtagcttagcttataacttacaatttagatcgatggaaggcacattaaatgatgaagacattgatggtgcaattcaagcgattattgatgcattagcaactaaaaattgtaaattacgataaatcatcgtgaaagggtttaccttatggtaaacccttttatgtctatctatcccctgttgtataatagaaggtataggtaatgagtcagaaaggatttattatggaattattagcaccagcgggtacgatggaaaattttatggccgccttagaatcgggggcagatgctatatatttagggggcaaggtctttaacgcacgggctcatgcagccaattttggtattgatgaattgcgtgaggctgtacggttagcacatattttagatgtgtctgtgtatgtaaccgttaatattttgattggcgatacggaactgaaggaccttgaacagtatattaaggatttagattccattggtgtagatgccatcatcgtgcaggacttagctgttgcagaaattgcaaaacgtgttgcaccaaacatccatcttcatgggagtacacaaatgacagctgctacacttgatgcggttcgtttttatgaaagtctaggctttacacgtgttgttttggctcgtgaattaagtcttaaggaaattcaacatatatgcaaacattgtaaggcagaaattgaagtatttgtacatggtgcattatgtgtatgctactcaggtcaatgtttgatgagttctttcatcggtggacgcagtggcaaccgaggtgcttgtgcacaaccttgtcgcttaccttatgaattattggattctaagggggaaagtgtgttacctaaacatgaagcttatttgctaagtccaaaggacctcaattatagtgagcatatgaacgaactcgtagcagctggtgttacatcctttaaggtagaaggtcgtatgaaaaaggtatcctatgttcgtcaagtgataggtacttatagagagatattggatgaggcatcaattcacgaaaatcaacgtaaagccctagcatctggatttaatcgtggattttccacagcctatttagaagatacggtaggtcgacaaatgatgaccgtagtggcgccaaatcaccagggtaagccaatcggcgaatcgtatacgaaaaaaggggaagtttacttatccttaacagaacctattgaacaaggttcattagttaaaatattacaatctaatggcagtgttacctattatacggtagatgacgaatggacatgtgtatccgatacgctgtataaagggcgacccgcagagggcttagcagtaggtcaattatatttagcatctacaccaaagaatacaaagtcacgaggcttacaagagtttacccgtaaatatgatatgtctgtatatctcagtgttggttctgatggtgaaacaaattatactgaattaactgccatcctagactctggccttagtgtgactgttacaaatgagtatgtgccagctattgctaataaagtgcccacatcgttagagaaggtaacagaacagttaggtcggttaggtaatacgttatttaggctttcttatgtagatattcctgatggcccttatatgtggcctgctagcgttcttaatgcactacgtcgtgatgccgtaactgcattagaaacagcgttaattacacatcatgtagaatcatggcaagcattgcaagtaataggcgatgtagattatgatttcaaggcgcaacacgagttatcctatgatacttgtcctatgatttcagctcgtgtcgatgaaatagaaggtgtgaaagcagcaatttctggtggagcacagaaaatcgtttttggtggtgatagactgagtcgtacaccatatgcgttatctatatatgatgaggtagcccgtttatgtgctcaatctgatgtgatttgtacctttgctacaccacgagttgtgaaagatgatgaagtagaagcatataaacatacattagaggcaatcgtacaggctcatccagatagtatttccattcacgtgccacaagcattattatggctccgtgaattaggatatacaggtgccattgaggctgatacaggccttaatattttcaatacacctacattgcatttctgggaacagttacatataagttgcgtaaatccatcgcaagagttgaccttaaaacaaattacggaactagctaaacatagtcacgttcctattgagacgatgatacatggctatacggaaatgatgatttccgaatattgtgctattgcaagttttgttggcacaggtagtaaagtaaattgtcctatgccatgtgttaaggaatcgtattcgttaaaggatagaaaaggtgaaatattcccaattcgtacggatccatactgtcgtatgcacatcatgaatagtcatgaaatggatatgcgtgcctatgtacctatgttattacaaaaaggaatttccatattacgcgtagatggtcgtcatatgaaaccaagttatgtgaaagatattgtatcccaatatgttggcatagcaacgggtacgatggaggcaccacctaagaaaatagattcccaaggcgaatctattacacggggacattattttagaggtattttatagaacgaggtagtacattgtttaatgaagatgtattagattttataaaaattaaagaagagttggctagtcattgtagctctattattgctaaagaaatggctttagcattggaacctatgacgaatcgagaaaagattcaagaggctttagatgaaacagcagaagcactgcgctcttggcaaacagaaatcgagcaacctttaggggggactcgagatatacgtgaatcttgtaaaaagagtcgtaaggattttgtgctttcacgagaagccatatgggatgtctatataaccataggtgcctataaacgtatggcgaagttctttagagcgaagtatatggaatacccattattgtctttatggatgcaagatatgccgaatatggaccgtgtggaacaacggttaaaacgggtgtttgatgaaaaaggggaactgctcgatacagcatctcctaaattggcgagcctacggaatacgattagtaagacgcgagatcgtattaaacacgatattcaagccatattgcatgacaaggataatcagaaatatttccaagaagcgattattacgcaacgcaacaatcgttatgtaattcctgttaagcaagaatatcgccaatattttgatggtttaattcacgatcgatctgcaacagggcaaacattatatattgaaccgatgcgacttgtacagctaaacaatgatttgcaagaagctttaattggtgaggagcaagaggtattacgcatttataaggaactttcagcccttatcaaacaacatagtaatgatctgatggatgcctgtgaaaaggtatctcatattgaatttgtctatggtaaagcaaaactcgctatagctcaaaaggcagtacaagccacattgagcgaagggcgtgacgtcaatttgatgcgtgctcgccatccgttgattcctgccaatacagttgtacctacagatattcgtttgggcacggactatcgaattttattgattactggctccaacacgggtggtaaaacggtgtcattaaaaacacttggcttattatcccttatgaaccaaagcggtttatttattcctgctgatcatggttctatattgccgatttttcataatatttttgcagatattggggatgaacaaagcattgaagctagcttgtctacattctctgcacacatgacacaagtgatttctattattaaacattgtggtcctaatgatcttgtgctactcgatgaactcggctctggcacagatccggaggaaggtagtgctttagctgtatccatacttgaattcttccgccaaaaaggaacacttatgatggtcagcactcactataatgagttaaagaactatgcgtaccatacggcaggtatcgagaatggtcacgttgaatttgatgagcgtacattaaagccaacctatcgattacatattggcgtagctggtagtagtcatgcattgagcattgtggcgcgtttggggctaccaaaggacatcgtcaatcgcgctcgtgattacaaatctaagtttggtagtagcgaaatggaaaccgttttatctgatttgaatgaacaattacgtaaatcatcggaacgcgaacgggcactcaaaaaagaattagatgaaacacgtcgcatgcgcggtcaattagaaagagaaaagaaacagtttaatgaaaaacgtaaacagatgttagcgaaggctcaagctgatgcggaatcgatgaaacgtagtctccgcgtagaaggggaagccatcattaaacagttaaaggctcaattctctgaaacgaataaggataagcgtcaatccgccatcaatgcagcccgtaaaggtatatccaatgtccacgtaccagatgcccctatagatgataatcgtaaagagttgactatagatgccgttgctattggtcaagttgtatatgttacgtcattgcgttcacttggcacggttttatccattaagggtaatcgcgtgactgtagatataaatggtttatctgctactgtgaaagtaaatgacttgcaatctactacgagagaagaatccaataagattcaacgagataatcttaaggcccaacctaaaacacgtaagaaagcaggtggctctgccgtacaacgtcaaaaagaagtgcgtacagagattaatattctcggtcaaaccgtagatgaagcagtagtctccgtaggtcgatttattgatcaagccctattaggcggcatcaatcaagttcgtatcattcatggtaaagggactggtgcattgcgcgaaggcgtacatcagtatttacgaaccttgccacaagtagcacattttgaaactgctggctatgatgaaggtggcgcaggtgctacaaatgtagtgttaaaataatatacaatccttacgatagtgctagataagaagcagacaactatgagtctgcttctttttttgtaatagaaaagaggcaaaaccatgtggttttgcctcttagtatgttgcttcgctagtggttagcgatcttttttcttctcttttttagacttcgattgacttggtttggaatctgtagattctaccttggatgatgagtcatcatcttttgagatcgcatcattcttatccttaccatcctttttatctttgtcatcttttttgtctttgtcgtcctttttcggagcttcttttactgggttataatggccctcgctgactgccgcttgagcactagcaggtacattaaagtcagaagcaggggtattagctaatgcggccgacataaattgtctccacattactgccggcgttgaaccaccggtaatacctaatgtttcagatccgtagtcatcgcctatccaaaccgcagcaactaaatcaggtgtatatccaacgaaccaagcatctttttcatcatctgttgtacctgttttaccagctgcaggtctaccgatagcagcattgccaccagtaccaccagtgataacagactctaacatatctgtgatgatagccgcatctttttcttcaacgacgcgtttttcttggatggaattttcttccaccacttgtccgttgcgatccacaatttttatgattgctgtaggttgaaccttgacgccaccattagccagtacgccataggcttctgccatttctaatggtgaaacaccatgagttaaaccaccgagtgctgttgataagttgttatcttcatcagttaaggtagtaatacccatctttttagctaagtcgataatcttagacatgcccacttcatcagcaatttttacagctggtacgttacgagaatgttgtaatgcataacggtaagtaatattgccttcatagtttcgttcatagttttgaggacgccatccattaaaatcaacagggctgtcatcaacaatggaacctggagttttaccagattgtatagcagctaagtaaacaaatggtttcatagcagagcctggttgacgttccgcttgtgatgcacggttaaaggcatcatctccacgaccaccgaccatggcaacaatataaccgttatgtggattcattgctacaatagcaccttgtggttggtgtagaccattttggtcagtatacatagttggtagattttgcattgctgtaactgcagcattttgagcatccatatcgagagtggtataaattttaagaccatctttatagattgcatcatcaccatatttttcagaaatttgagcaattacataattgataaaataagatgcattgttgttttcgtgagtttgctcttgcttagcaactaaacctaaatctgcttcgcgagctgcatcggctttatcttgtgtgagataaccatacttgaccatttggcccaatacaacagcctggcgttttttaccggcttctaaattgttgaatggggagtagtagtttggactttgaggtaacccagcaagcatagcacattgagctaatgttaaatcgcgtacatctttaccaaagtaaacatgagctgctgattgaacaccataagcaccttgaccaaaataaatttggttcatatacatttcaagaatttcttgtttggtatagtgctgttcgattttaagtgctaataaagcttcggaaatcttacgtttaagagttctgtcttgggaaagaaatgcattacgagctaattgttgtgtgattgtagaaccaccttcggatacaccactatgtacaacattaacccaaatagcacgtaaaataccgatagggtcgataccgtgatggctataaaaacgggagtcttcagtagctacaaaagcatcttgtaattcttttggtacttcattaattgggactggcaaacgattctctgtggagtgaaccgtagtaattaaattgccatgtacgtcatagatctgagacgatgcagatggtcgtacgttagatacatctggaagattagacatggtagcgcttataaaaccacaaccgccaccggctacaataagaacaagtaataatacaatcatccaaatcgtctttttagttgatgcctttggattgctcgggttaggagctggtttacgacgagctcttatatttgagttattacccatagagtcacctcttttttaaagtaaatataacgtaaaatatattacgcagttataaatagtataccataaaagacataaaacaaacactatatataattgtgaaagcctatttataatggtatactataaagaacagattatatgtaggaggatttccatgattacagcacaagaacaagtgcgccaaattacacatggcgtatctggaataattaatgaagaagacttagtcaaaaaaatagaacgttccattaaagagaataaaccattgatcgtaaaattgggcctcgatcctacggctcctgacattcatttaggtcataccgtaccacttcgtaagcttcgtttattccaagaatttggccatcaagtggttattgtaatcggcggttttacggctcgtattggtgaccctactggtaaaagcgtaacacgcccaccacttactaaggaagaagtattaaaaaatgcggaaacctataagacccaaatctttaaggtattagaccctgaaaaaacaattgtacgcgataatagtgaatggcttgaatccatgaacttcgctgatgtacttcgcttggcaagttcgtatacagtagcacgtatgatggagcgcgatgactttgataaacgttacaaagaaggtcgtcctattggtgtacatgaatttatgtatccattgatgcaaggtcaagactctgtagcattgcatgcagatgttgaatttggtggtacagatcaaactttcaacttacttatgggtcgtcacttgcaagaattggcaggacaagaacctcaagtagttattactatgccattgctcgaaggccttgacggcgttcaaaagatgagtaaatccttggggaactacatcggtatcgatgaagcacctaaagatatgtatggtaaagccatgtctattcctgatgaattgatgatgcgttatttcatgcttgttacggatatgtctatcgaagatcaagacgagatggaagaacgtttagaaaatggcacattgcacccacgtgatgcaaaaatgcaattggcaaaaactatcgttcgtttatatcatggtgaacaagcagcgcaagaagcggaagatgaatttaaacgcgtattccaacaacatgcattgccaacagatattcctgaatatgctattgatacacctagcgaagctattttcgtaccacaattctgtacggatgcgggtttgactgcttctaatggtgaagcacgccgctccattaaagctggtgcattcaaagtaaacggtgaaaaatacggcgaagaaaacctagttcttgaagatggtatgattgttcaagtaggtaagcgtaaatttgtaaaaattaaatttaattagttgatattttttgagtcaataatattaatataaaaacaaaagggagctgatataatgatatgtacccattttcctggacacatattatttactagcctaaacacatggatgcttccctgtattttacagggggcatccattttgtttttttctgaatccttttatcattgtaatagttgatgtattcttcaattgcccccgcaaaagcattgaatgatggatattccatttcacagccataatatatttccgttttcaacctaccgaaaaatgtctccattacagaattatcataacagtttccttttctagacatagactgaataattccatgttctttaagtgcgttcctaaaatatttatgttggtactgccatccttgattagagtgaaaaatcaatcctgaaagattaggatactttttgaaagctctatctaacatacgagaaatctgttctaaattaggccttaatgccaagtcataggaaataacctcattcgtgttcatatctaagataggtgataagtaacactttccccatggaaagttaaattgagatacatcagtagtccatttttgaaatggagctgttgtactaaagtctctattgataatattatcggctattttgcctacttgacctttataagagtgatatttttcttttggtctctttcctgcgagccccatgattttcataagtctttgtactcgtttatgattgactataaaacctcgattaagaagttcttgatatacacgacgcacaccataacgtcccttatgctctgtaaaaatcttttgaatttcctctttaagttgtatatttctttcatctacaagatctactttagagagctcaaaataataggtggatttagccattcccatagcttttaaaagatattttagttgatatccttgctttcggagtattttgataatcgctgctttttcgccttgagacgcgcagcttccttttcttctctcaaggcaatctctttttttatgacttcattttcagctttaatataagcattttcagctcgtaagcgaatgagttcctcgtattcactctcattgagttgtctaggtgaaatattctttgttactttcatgtcagaatcctttggtcgtcgccctttaggcttattgataagaccattgtatcccaaagtcttgtatttatgaacccattgatatagtagaccactattaattccagcaacaatagctacggaacgtaaagattccccagctaatacttgacatactaactcatatttatcctctgtagaccaattcttttttactccataaaacttattaatatctggaccatgcaactcctcttgtttagcccaataccttatttgttcatgaaaagaatgaggcgatactccatttggtgtttctggccattcaccttgatagaataattctattgctttctttttaaattcataactatatctcatgaaaataccccctttactgagtgtccagtaaagggggtacatatcataattagctcccttttgttttaactgaagataatttttaatatttttaaccccaaaaacttataattaaaggctgtttagtataaagtggagtatagtattggagaaaaattatatatgaagaaatcgttagaattattgctatttaaacctatatcttctggtgccacatatctaataaaaaatgaaactataaaatcagcactaacgttattttgtatcggttggattacagtgcgtggattgtatttaataaatggaattcatgttaaagcttggcaaagtattcatatttcatatctagatacatttgttggttttaatttatcatcctatttaattgattttacttatcgattatttctttctattttgattgcatttatatgttggattgttatgcgaatttgggttaaagtagactttttaaaagttttcatggtaaccctagtaatatctgcattaaatttttttgttactattcctaatattttagtttttaatttggttaagaagatttctattgatagtcttttttgggggaaaactatatatgattttgttcattttttagtagggctatttgacatttatgtatactttctatttactgtactcttatacagattaactaatttaaacaaatggggcatagcaatattcttatcgttattgctagtaggtatatcaatcattttcgagcctttggaagcttttttcagttgactattaaataaagaggaatttaatgtttcgagattcaataagattattagtacatcctaataaaaagacgatactagatataattcaaggtattacatttaaaggtgcaatatgtttatatactctggcttgggttatcttgcgaatcgttatggggaatgctggtattgatgttcttcatattttaccaattcttgatcataagctagtttatgttaattacataatagtttttgttgtagattatgtttacataatgtttaaaaccataatattagcatccttgttatggttattattaaaatggtggcattcaacatcattaaagcgttttataataatgacaatatattcaatggggctttgctttttatttgctagtataaaattttatcttcagtcttattttttgagtctgaattatttagatgataattggagttttataatgtggaatattgccggtctattgggcaatattttaattttctattcttggatagtatacttaatgatattgtatcgcttaaccaatattaataagtatttattaattgtttgcactgcattaatttgttatgtattctatgcaacgcaaataactatatccatatagtagtttttagagatggccgtttataatttaaatggtcatcttcttgtttttgtgatatatatttgaaaatatgcccataaaaattgacataatttaaattaagttatactatttatatgtaaaaggtttaatgtgttgcactaattacaaacaggaggttctcacatgaatcgcgaaacagcttatgtattatggtttgatgaattaaaacgtgaagacgtaaatttagtaggtggtaaatcctcatccttaggtgaattaacttcctctacaaatgtacctgtaccttatggttttgcaacaactgcatatgggtatcgtgaatttatgaaagaaactggtcttgaagatcgtattcgtcaagagttagatgatttagatgatgtagaaaactctgcattgcttcgcgaagtttgtacaaaaattcgccgtatgatttgccaagaagaaatgcctactgcattggctgaagctattcgcaaatcctatgaagaactaggtgaaaaggtaggcgaaaaagatcctttcgtagctgttcgttctagtgcaactgcagaagatttaccagatgctagctttgctggtcaacaagatacatatttaaatgttcgtggtgccaatacaattattgaaaaagtaaaagaatgttatgcatctacatttactgatcgtgcaacatattaccgtgtaaaacaaggctttgaccatatgacagtagcattgagtgcagctgttcaaatgatggtattctccaaagctgctggtgttatgtttacggttgaccttgtaacaggtaatgacaataatatcttaatcgaaggttcttggggccttggtgaatatgtagtacaaggtacagttacaccagataacttccgtgtagataaacaaaaaatggttatcactgatcgtatgattaatgataaaaatattcgccttgtacgtaaagctgatggcgattgcatagaagaaatcgtacctgctgatgaagctaataaacaagttatttccgatgaacaagtattggaattagctgaatacgccaaagctattgaaaaacattatggttgctacatggatatggaatggggcgtagatgaaagaaatggtaaaatctggattcttcaagctcgtccagaaacagtatggtccagaaaagataaatctgaacaaactgcagatacaagcgtagcaactactacagatcgtgaaatcgtagttaaaggtttaccagcatctccaggtaaagctgctggtaaggcacatgttatcattaatcctgaagatattgatgagttcaaagaaggcgaaatccttgttactgctatgacagcacctgactgggttccagctatgaaaaaagccaaagctatcgttacagatgctggcggtatgacttgccatgcgtccatcgttagccgtgaacttggtattccttgtatcgttggtactaagagccgtagccatgaagctacaacttctattaaagaaggccaaatgattactgttgatgcaactaatggtattgtttacgatggtgtgttagaagatgttgttaaaccagctgcaccacaagaacaagctgttgtagcgagtgaatatatccctgtaacgggtactaagatttacatgaacttaggcgatccagacttggctgaaaaatacggtgtattgccttgtgatggtatcggtttgatgcgtgaagagttcatttggactactttcattcatgaacatccattacaccttatcgaaacaggtcgcagtgatgtagctgttaatacattggctgaaggtatgcgtaaagtgtgtcaagcgttagcacctcgtcaagtagtagttcgtttaagcgattttaaatctagtgaataccgcgaccttaaaggcggcgacaaatttgaaccacatgaatccagtgcattacttggctggcgcggtgcttctcgttactatgatcctaaatacacacctgctttcaaattagaattagaagccattaaaaaagtgcgtaatgaatttggtttcaaaaacttacaagttatgattccattctgtcgtactgttgaagaagctgaactcgtaactaacttgatggctcaagaaggacttgtacgcggtaaagatttcaaaatctggctcatggctgaaattccagcaaatattatcctagctgaccaattcaacaaatacgtagatggttactccattggttctaacgatttgacaatgcttgttctaggttgtgaccgcgataatgaaacagtccaacacatttatgatgaacgtaatttagccgttcgtagagctattcgtcatcttatcgaagtggctcataaagatggtaaaactgtatccatctgtggacaagcaccaagtgtttaccctgaactttgtgaattcttagttaagagtggtattgattccatctctgttaacccagatgcggttaaaaatactaagaaaatggtggctcaaatcgagcaacgcatgatgatggatgcacttacaggtcgtggtcgtcaagatgtagaagaccttgaatggtaataaagatatactttatttgatgatgtaaagaggaggcgaaagcgcctcctctttttctaaaatgatacataggatataatatttatatgtgaaaggagggacgggtgtgaaactttcaaaacgacaagaagcaatagcccatattgtacgtgaaaaaggacctgttacgggaagtgctatagcggaacatttggatgtgacacgatctgcattgcgttcggatttagccgtgctcaccatgattggcgttctcgaagcaaggcctaatgtaggatattactatgttggcttgtcgccaaaggaccaaactgctgaaattttaaggtcttataatgtacatgatgtgctttcacaagccgttatcgtatcgccagagaccaatctatatgatacaatcgtgactatttttacagaggacgtgggtacgattttggtttgcgaaggttcctatttacaaggtgttgtatcacgcaaggatttattgcgtgcctccataggtcaaaccgatgcacatacaatgcctatctcaatgattatgacacccgttagcaaagttatcaccgtagaaccatcagattcgttggctgtggcggcgcaaaaaatgattgactatgaagtcgattgtttacctgttatagttagagaagacgatgaatcacaagacagtcctaagaaacgattaaaggtggtaggacgtgtatctaaaacaactgtgactaaggcgtttttagaatgtagtacacaagaggtataaagaatggcagaaaaaattatttatgcgatatctgactccttaggcgaaactgcagaggccgttgcgagagcaacagcaagtcagtacgataaggaacaaattgaaattgttcgcatcccatatattgaagataaggctcaaattgatgaaattatacaagatgctaaaaatggtaatcacgtaatttgtcatacaattgtgtcgttagaattgcgaaactatttacacgaaaaagcggcagagaataatattcctgctgttgatattatgggccctgtattggatgctgtaggtacagtggcatctaccaagccacgtatgacagctggtatggttcataagctagaccaagaatatttcaaaaaggtagaagctattgagtttgcagttaaatacgatgatggtaaaaacccatcaggcttcgaaaaggctgatgttgtgattatcggtgtatctcgtacaagtaaaacgccgttatccatgtttttagcgtataaaaaaattaaagcggctaacttaccactagttcctgaggttccattgccagaggaattatttaagattccgcctaagaaaattgtagggttgattattgacccatataaattgaataatatccgcagtgaacgtttgcgtgctataggcttagaagatgaggctaattatgcctctattgagcgcattaattctgaattagaatatgcaaaagctattatgcgtcgtctacattgccaagtgcttgatgtttctaacaaatccattgaagaaacagcatctcttgttatgcaattagtagataaaaaccgtatggctgccggaaaataaataggggaggcgcaagcctccctattattaaatattatattgttaacatgtttgataaagaggtactatgaatattagagaacgtatagaagaacgagaagatatgatcttatctccctatgcggcgagaagcagtatggcattgcgcgatattgatgaagaaccagatccactacgtaccgcatttcaacgggatcgggatagaattatacacagtaagtgttttcgtcgcttaaaacataagacacaagtatatattgcacctggtgaccattatagaacaagaatgacgcatacccttgaagtaggacaaatcggtcgtactgttgcgcgtgctcttagacttaatgaagatttagtggaagccattgcgatgggacatgatgtggggcacactccatttggtcatgtcggagaatatgcattgcgcgatatggtaggccattttaaccataatgaacaaagtttgcgcatggtcgaagtattagagaaacatggtaacagacaaggtcttaatcttacaaaagaagtgcgggatggcattttaggccatacgggaccaactataccatctacattagaagggcagattatacgtattgtagatcgtattgcgtacttgtgtcacgattatgatgatgcacaacgggctggtatgctagaagctaacgatttaccagaagaagtgcgattttattttggcgatactccgtctagtatgattacggccatggtgaaagatatggttgaacaatcgttggataagccagcgattcagatgtctgctgatattgaaagcacgatgaatatttttagacagtttatgtttaaaaatgtatatctagcacctgcattaattcctgaccgtaataaggccgctcatgtagtaaaaaatttatttacatactttatggagcatccaggtgatatagaaacctatgtagaacgaaatggtgtgtattccactgttgatattgtcgattatgtggcaggattaacagatcaatatgctataaaattatttaaagattactttattccaaatattacgctgtaatagggcgacaaaaagaccgttaccatttggtaacggtctttttgtttaagagtacatgtactatttattttacgcgcgtgtaattttattagaacgaaggcagcgagtgcatacatttactttttttgtagcaccgtctacaaccgcccgtactctttgaatgttcggtttccaagtttttcttgtgcgaatgtgagaatgactcacgttcataccgctagatgtggatttgccacatacttcgcaaaggtttgccatagtttccacctccaagcttaatctataacataacaaaagtatattatcataaagacaaggtttaagcaagtgtttttactacatgcattgatattttatgaaatatactacaatatttggtatactatagctaatattgtagtcgaaatctatgagatatggcaagagaaatataaaaatggatatattttcactatattcattaagtatgtcatatgtgaggcattataatgaacgaagcactgacctctattaagggaattggaccaggtcgagaaaaacaacttcataaattaggcattgatactgtatccaatttattggcttattttccacgctcctatgaagatagacgtaaaatttattccataaaagaattggaaactggtattactgcgggggttgtaggtactgtcgtatccattacggaaaaacggccacggcctcgcttatctattttagaagttatcatcacagatggaactggtccgatgaagattgtattattcaatcaaggatataaaaagaacttttacaaaaaaggtcaacgcctctatgcgtacggtaaggtcgaatttcaatatggttctatgcagatgaattctccgcaaatagaaaatctcgggccagatgctatgccagatacgggcattgttcctatttatcccttggtggatggcgtttctcaatatgtggtgcgcgcatcgattcgaaattggttcgaagcgcatcatacaatggatgaaattttaccgcctgaaatcatggattctcatgtgagtatgaagcgatatgatgcatttaaagaaatgcattttccttcaagtagtgaaagttatgaaaaagcacggtatcaattagcctacgaagaactatttatcatgcagtctggattggctctgcttagaaataaagagcaatgtcacgtagggcctaagatggaaccagatggggtactaatggcacaatgcagatcgaatttaccctttaaattaactggtgatcaggagcgtgctgtaactgaaatttcacaagacatgcaagatgaacggcccatgcaacgattactacaaggtgatgtgggctctggcaaaactgttgtagctacattgagccttgtaaaagccgtagaaaatggataccaagctgttatcatggcacctacagaaatcttagcgactcaacattatgaagggataactgaattttgtaaaactttgcctattaatattgcattgcttacaggatccacacctaaaaaagaaaaggatagaatctatgaggaattagcaaatggaaccattcaattgattatcggtacccatgcgctcattcaggacaaggttcaattcaagaatttaggattggttattatcgatgaacagcatcgttttggtgttaatcagcgtgccgcattacaacataagggcgtatatcctcatgtcttgattatgacggccacaccgattccgagaacgatgaccctatctgtatatggtgatttagcggtatcccttattaaggaaatgcctccaggacgtaaaccggttaagacttatgttgtagatagctcatataaagaacgattgcgcgtgttctttggtaaggaaatggcggcaggtcatcaagtatatgtggtttgccctcttgtagaggaatctgaaaaacttgatttgcaagcagcagaagaactctttttggaattgaaagactatttttataaaagttttgaagtgggccttgttcacgggcgtatgaatccaaaagaaaaggacgaggtgatgcaagcctttcatgatggccgtattcaattgctcgtgtctacaaccgttatcgaggttggcgttaatgttcctaatgcgacgattatgtgcatagaaggggctgagcgttttggattatcccaattacaccaattacgaggtcgcgttggacgtggtgacattcaggcgtattgcatattagttagcgattccaagggggatgtcagtcaagaacggttgcggttgatggaatccacgcaagatggatttgaattagccgaacaagatttattactgcgtggatctggccaattgtttggacttgcacaatccggattacctgatttacgggttgctaatatcataaaagatatagatatactagtggcagcgcgtaatgatgtgctgtcatatatccgagaatttggcatcaatcaactagaaattcaaatgaaagaagaattatcaaaaagatttggtgaaaaatttcttagaatattgtataattaagaggtagggctaataattctataaggtgcgataatactaggttttatctaggttttccccttgtatataacggcctattctcgtataatataaaaaacaatatttttgtatctatggaggtgccatatgccattaattcatgttgaactcgttgaaggtcgtacaaaagaacaaaagaaacaattaggtgaagctatcactaaggctactgtagacatcgtaaaggttcctgcagaagcagttaaggttatttttgttgatatgaaaaaagatgagtttatggaaggcggcattttgcggtctgaacgctaatgaaagctacgattatccgttctagcccactgggctagaatgggtcgtagttttgttttttattatacgagaaaggaaaaacaaatgagagacgataaattcggtatgcgtggattgacttttgatgatgtattgttagtgccggcagcatctgatgtattaccatatcaagtagatttaaagacacaattaacacgtgatatttcactaaatatcccaatgattagttctggtatggatactgttactgagtcccgtatggccattgccatggctcgtgaaggcggtatgggtgttattcataaaaatatgtccatcgaggaacaagctcatgaagttgatacagttaaacgttctgagcatggtgttatcgttgatccgattttcctaagccctcagaaccttctctctgatgcagaagaattgatgcgtaaatataaaatctctggtgtacctattacagaacatggtaaactagtagggatcattacaaatcgcgatatgcgttttgaaactgatttatcccgtcaaattggcgaatgtatgacaagtgaagggttagttacagctcctgaaggtacttccttggaaatggctaaatccattttgagcaaacatcgtattgaaaaattaccattagttgataaagatagtaatttaaagggtttaattactattaaagatattgaaaaagctacaaaatatcctaattctgcaaaggatgctagcggccgtctattagttggtgctgctgttggtgtttctaaagatatgtatgatcgtctagatgctctcgtagcagctaaagccgatgttatcatcgtcgatactgctcatggtcattctgcaggtgtgttgcgtacattaaaagaaattaaacaagcatatccacatattccagttattgctggtaatgtggcaacggcagctggtacagaggctcttattgaagctggtgcagatgctgttaaaattggtattggacctggctctatttgtacaacacgtgtcattgctggtattggtgtacctcaaatcactgctgtctatgagtccgctcaagtagcaagacgttatggtattccaatcatcgctgatggtggtattaaatactctggcgacattgcgaaagcgattgcagctggtgccaatgttgttatgatgggtaatattcttgctggtactgatgaaagcccaggagaaactgttatttaccaaggccgttcctataaagtataccgtggtatgggtagcttaggggctatgaagcttggtagtaaagatcgttatttccaatcagaagctaaaaaattagttcctgaaggtatcgaaggtcgtgtaccttataaaggtatgttggcagatactattttccaaatggttggtggtttacgtgcaagtatgggatactgtggttgccataatattaaagaaatgattgaaaacactcaatttattcaaattacggcagcaggcttgaaagaaagtcacccacatgatgtaagtatcaccgtagaagcaccgaactatagtggtttataatggagtattattttgagtaaacgtatttcggtattatccgtccctattgattgcatcactatggacgaagcagtttcaaaaattatagagatgacgaagcaatcagggctacatcttgtagcaactgccaatgctgaaatggttatgctagccaatcaggatcccgtgttacacgggatcttgaattccgctagtctagttgttcctgatggagctggtatattgtgggcagcggaacgcatgggtgaaagagtacctgaacgcgttactggtgttgatattaccaaagaattgtttaaacaagctgtaagcaatcaaatccccatatattgtttaggtgctgcgcctggtgtagcacaacaagcagtttctaatttacaagcaatgtatggtactattaatatagctggcatccatgatgggttctttgatgaagcagaggaacaacgtattattaacgatattaaaacttcgggtgctaagctcgtatttgttgcattaggtgtgccaaaacaggaacaatggatttcagaaaaactatcctctttacaaggcgttgtagccattggtataggagggtcttttgatgtattggctggaaatattccacgcgcacctcattggatgcaacgtaatcgtttagaatggttatatagattatatctggaacctaaacgtataggccgcatgttggccataccaaagtttatgtggactgttattaagaataaataggggagtttagttgtgcctacaggaccaataataaaagaaggatttcctttaatcggagtgatgctcttcattacgattatagcggcgtattttggatattatagtatcgcaatcattacatttattttggcattattttttgtgaacttttttagaaatccaaaacgcaccattcctaccgacccagacgctatattatctccagctgatggcaaggtaatggaaattgaagatgtatatgaagatttgtatttacatcgagaatgtaaaaaggtaacaatctttttatctgtttttgatgtgcatgccaatcgtgctcctattgaaggcaaaattacatatcgtcattatacgatggggagttttttacctgctttcaaagaagatgtggggtttgaaaatgaacgtcatacaatttgtatagaaaacgataaaacagaagtactcgtcacacaaattgcaggtttattagctcgtcgtatcgtttcttggacagatcttgatagtgtattaaaacgtggccagttatatggtatgattaaatttggttcatgtactgaaatttatatggataaaaatgtagagatttgcattgaaaaaggtcagcatattactggtggcgatacgattatcgggaggcttcgtcatgaataaatcagttattccaaatttatttactagttctaatttagcatttggtgttatcggcattacattgtctgctacgggcaatacctttggggcggctatttgtgtgatactatcactgattgcagatggtttagatgggcgtgtggcacgtgcattaggcgtagcaggtcctatggggcgtgaattagattccttatccgatgtagttggatttggcgtggctccagcttatatgctatatgttagtgatttgcaaggactaggctggctcggttatattccgttattagcctttgctgttttaggcgcttttcgtttagctcgttttaatattaaaactgatgaagttcacggctattttgaaggtcttcctattccagcagcaggttgtttagcggctacctatattttatgtggtgtgcaagtcccacagctagttttgtttgtgtccatgattcttgttggtatcttaatggttagtgaagtaaaatatcctgactttaaaggtcagagtgcagttcgcattagcaaaattgctatcgcattggttgctctcatcatcattgctgcattggtatatgattggcatacatgggctgttatgatttttactggttatgtgttgtttggtctgtttaatacggcgttgaatatagtgcgcaaatagactgtggaggtttgtcttatggattacctactggatctgatattgatccctatgcaggtaataatcgtaatttatacggtttattatttcgtacttgccgttataggtatgtggcggtctcgagttcataaaaactatacgccaaaaaattcattcgccattgttgtgtgtgcccataatgaagaggctgtagtaggagagctcgtaaaaaacttaaaaggtttagattaccccgacgatttgtatgatatttttgttgtagcggataactgtactgataaaacggccgaagtggccagtgccgcaggagctaatgtacacgaacgtttcaacaaagaagaggttggtaaagggtatgccatggggtggatgtttgaccgcgtggataaaatggataggaaatatgatgcattcctcatctttgatgctgataacttggtacaccctcaatttatgttagagatgaatgatcacctcgaaaaaggtgaatctgtaattcaagggtatcttaactccaaaaaccctacagattcatgggttgctggcactttttcaatcatgttctggatggttaaccatatgtggcatttagccaaatatcgtattggtttatcaacggcacttggcggtacgggtatgtgtattcgtacatctattattaaagaatacggatgggattgtacaagcttaacggaggacatggagttctctatgaagttattaacacatggtattaagacgacatgggctcatgatgctatcgtgtatgatgaaaaagtaacaactatgatggcttcttgtaaacaacgtttgcgttgggcacaaggtcaatttgattgtgcagatcgttatattcctaaattatttgcagcgggtattaagcaaggtaatattgtcattttagatggtattttgcaagtgagtcagccttatttcttattgttgacgactgtatatttggtattttcttatatcaatgcatatgtaccaatttacactaatattttgtaccaaattatgcctatgtccgtatggcaaattattggtattggacaatatctattcccattaattgtattgttgaaaattaaggtaccacctaaaatttggttttactacttgttatatccaatttttgtatattcatgggttccagtaaatattttaggatggttccgtcgtcataataaggaatggtctcatacggtgcatacaaaagctgttggcttggaggatgttaaattaactcgtatgggagatatgaataagaataaaaaatagaatctataggagtgactatgcatatcttaatgtgtaacgatgatggcattttagctgatggcttacgccaattagcgacgtatttaagtcaatattatcgtgttaccgttgtagcaccagctactgaacaaagtgctaaatcccatgcattgacgactgagattcctttaaaattagatgcgtacaatggcgaggatgaaaatcctcgcctttatgcacttacgggaactccatctgattgtatgaaatttggcctcagttatttattagccgatgacatgcctgatcttgttatttcaggtattaatcatggctttaatttaggttctgatgtattgtattcaggaaccgtatctgcagccatggaaagtgctttttatggaatccctggccttgctttatctgtagagcgatattcgattgagcgtggtcatgaaatgcatccgtttattcatgaattaattgagaaaatttatgtaaatggtaattttgaaggcttattaaatgttaatttcccaatgcgcggcatttgtgattgggatcattttaaattggtgagccaaggacttcaaacctatagtaatataattgatgctagaattaattcacgaggtcaagattattattggttggctggagacttggattgtggaaaggaagacgtaccaacagatgttgaatacgctcgaaaaggttatattacaggtgttactttgacatggaaacagcaagatgatgcggcgatgcatacactcacaaatattttagaaaaaatataaaaaatttgttgacagacctttgttattcctatataattacaaatgttccgagacgccggagtggcggaatggcagacgcacttgactcaaaatcaagcgggtaacaccgtgtgggttcaagtcccacctccggcaccaactacaagcggaaacgcttgaacaggtgataagagtaatcttatcacctgttttttgtttatacgattcaagtaaaatgatagaggtctctatggacatacaacatatcatggattatctaccaataacatatgcactgcggcaacaagatattagcaagacaatggttgatttaaaactattaaaagagatacccattgatagttccgtcaatcaatgtcaaggattctgctataactcaaaaaaagatgtatttgtactagcttgtattaattctgaaaatacgcgacaagttatatatgagatagatccaagaacatttgatattgttggaacctataagtttcgtgatgctaatgtattagcacatatgaatacgcttacctataatccaaatactaatttgttatacactacgaatgctatgattgatggccatcgcattactacaatagatgcagatacaatgagtattggcaatactattacgattcctgaacgggtatttaatttagcctatgataaaaaaacgaatcagtttatgtcgattgtccctatagatgcaacaatgagacgtattaattactatacatcacagtttcaactcgttcagtctaaagatatagatgctaactatgatgattataataacaatggtgcctttgccaatgatggtaaaactatatttgcaacattatccaccgttattactgtggataaaacaggaaatgttactaagattgcctcttttccaaaatatcttgaaattgaagatatggatatgcgttataacataatgtacgctgctgtaaatatgaatcataaagtttttatttatactatgcttaactattaatagactgtactttcatcaatgattaatctaacaaaattgtgtataataaaaagatagataatcgacatataagaggttatgatatgagattaggcacagatataatagaaattgagcgaattaaaaaagccatagaccgttcagcgcgctttcgacagcgcgtatatacggaacgtgaaattgcttattgtgaaagtaaacgaacagggatctatcaatcctatgcaggtatttacgcagcaaaagaggcttttttgaaagcattggggactggattgcgttacggctcatggcatgatattgaggtgtgccatgatgaatttggggctccatctctaagcataacgggggctttcaaaaaaattatgcaagaacgaatgtatacagaatctatagtttctattagtcactgtcggtcgtacgctatgagtacggtcatcataaagaggtaatttatgtacagtttaacgagagaagcatcacaacatattgatgcctatgtaccgcgtcatctacacgtgcctttggagttgctcatggaaaatgcaggtcgaggtatagccgatgcgttggtagatgtagaaggagaacgttttcacgaggatccttttacaggtatggttctatttgtgtgtggtgttggtaacaatggagccgatggactggtagcggctcgtcatttaatagaacaaagaattcccgttaccattgcattagtaggcaatgtatcacatggtagtgagctatttaataaacaactgaccatggtgcgcgccatgggaattgatattgttccttttgaaagttttagtgattggtcccgtgttcatgttgtcgtagaaggtttaatgggaacaggttttcaaggtgaattacgagaatctgtaatatctgtactacatgacatcgatgtggaacgcaaccaatatggattttctctatgggctatcgatgtgcccgctggtgttgatgccactacggggcaggcttcggattatacattatcctatgatgcgacagtgacctttggatctattaaagaggggctattgttatatccaggcaaatccttggcaggcacagtaatcatcgcaccgttaggggtaccttgggaattagcattagaatcagaggcgccgtttaacacatctcattatgttttatatgaccgtttagcttcattggaacttagtgatcgaatgccgcaggcccataagggtgttaacggtaatgctttaattgtgggcggttctgaatcaatggtaggagcacctatcatgagcgcagaggcggccgtacacggtggggccggtaaggtttcattagccgttcttaatagtgtgcgatctatcgtacagtctaaatgcataccagaaatcatggtattgccattagaaaatataggttccactaatttacaatcgtatgatgtcgttgccgttggccctggattaggacgcacagagggcgccaaagtattggtaaattctttgttagaacgacaatcgggacatatggttatcgatgctgatggattatatgctcttggcaccataggacatgtttatgcacatggggataagactattacttatgaaggcaatatgcagtttaaaaattgtattatgacacctcatttaggcgagtttagccgtcttattgatacatccattaattttatagagaagcattatgtagagttagcgattcaatttgctgtagctcataatgtagtgctcgttttaaaaggaattcctagtttagttgcctttcctaccggtgaagtatatatcaatatgataggcaatcctggtatgggaacaggaggaatgggtgatagtttaacggggattatagccgcctttgtagcacaaggttattctttacagtctgcggccttattaggtgtctatgtacatagtcgaagcgctgatatattggctgaagaaaagccttggggctatacgccaagtgatgtaagcaaatccgttggtttggtactacaagagttattgaaaggataggtatatgacgcgattacaacgaatactactgtgtttcatagctttattagtgccactgtttgtgctagcaggttgttcgaattcagatgtatctaatgcggctacacaagccgtgtcggcatcatccaattattctattgatacaaagcagactaatgcagaagggcatgttgatatctatatgctagatatcggccaaggggatgcaatacttcttaaagttggtgatgagtatagcatgattgatacgggagatatagaacatcgtgaaaatattgtagcccaactacataacctcggtgttactaagcttaaaaatgtcatcatcacacatcctcatgcagatcatatgggtggttttttagctattgcaaaagcaatgcctatagaacatgtatatgatgatggtatttctgttgacaataatatgtataaaacatatgaaaaatggattgagaaaaagaatattcaacgcactacgttaaaaaaaggtggtactgttgattttggtcatggtgcagtatttgtagtatatgcgccttgggatgatatattagtagataaaaaagggcaaccggatttaaataataattctattgttggtaaatttatatttggtaaattttctatgctctttacaggtgatgcagaattacaagaagaacaacggcttataaaagagcaaaacagtaagctctttgctcgtattttgaaggtaggtcatcacggatcacgaacaagtagttctgaagatttcctaaaatccgtcaaaccagagagtgcattaatctcttgtgggttatataataaatatggtcatcctcatgatgtgacattacgtcatttgaatgaacacaatatcgccatttatcgtacagatacgatgggacgtattcacattagtacggatgggaatgaatggcaaatttctacagaacgatgatagatatgtataatccgtatacctatcttcatgtttgtatgaaataatctatctataatctaacattagtttatggatagattggaacgatgagatgaaacattagtatcatcggctcatctctatggtttggacaaaaagtatgtcagttagattggagtgaatgtattgcgtaaactatttttaatttgctttgcttttctcatggctgtaccactgttgttaagtcaagcaaaggctgctaatttacaggatgctcgttgggtaacgagaactgatgcacctgttccatatgtacgtatggttatggatttatctactcctgtaaacgcggcagcatccatcagtaaagatggaaaaacgacaacggttactttgaagaatacgaagctaaaaacggtgaagaatactatttatatggattcttccattgctagcgtagctcaactttcacaagtaggcaaagatgtggcagttacgattaaaactccatccgcattggatactaatgatgtgaaggttttctctttgaagaaggatacagtcaatcaaaagccgtatcgaattgttgtagatgtacagaaaaaaggcgtggctccaaaacctatcaattatggtaagaaaccatccccagctacagcgccagcaagtagcaaagggtccggtatatactctgtatcaggaggattatccggtaaggtgattactattgatccaggtcatggtggtagcgacccaggtgctatcggccctacagggttccaagaaaaaagtgcaacattaccgattgctaaatatttgaaatcagctttagaagctcgcggtgctaaggtattcctgactcgtactacagatgccgatgtatatggccctaatgcgagtggtgttgatgagttgggtgctcgcgttaatatagcaaactcccataattcagatgcctttgtaagtgttcatattaactctttcaacaacccaagtgtaggaggcattgctacatactactattctaaaactggtaatgacgctcgcttagcacaaaaagtacaaaatcaaattgctaatgtaccaggcttcaatggtgacagaggtatccaagaaggtaatttgtatgtattaagacatacaaatatgccggctattctcgtagaattaggctttatttctaaccctaatgaagaacgtgctttgaagagcgaccaaacaaaacaagactttgctaatcgcattgctgctggtattgctagttactttggaggctaaggatgaatattcgaaatcaaataacagtgattgcttgtatcggcatcctagcttttacagcgggctgtaattccaatcaaatgcaaaacacaggttctacaaacgtaagccaagaggtcaaggtcaataaagatgctgaaactgctaagacttctagtgaatccgttaaaatggtattctttgttcctactgaagatggttccggtgttaaacaacaatccgtggatatcgcagcagataaggtgacgccgaaggcggcattgcttgccatgttaaaagctgatcgccaacaaaagtatcctatctttgataaagcgataaaaatcaactctgtaacagttaaagatggagttgcttctgtagaggtgaataaagcttttgttgatggtaaaggtggcgacttaactgttaagttgcaaatggctgctattgttaatacattgacctcttttgataatatcaatggagtgctctttgtatgtgatggcaaaaaggttcctattgtaggtgcatttgatacgaatagccctattaaacggatggaacaactcataaaaaaataatgtacgaatcgacctcatcagtatgatgaggtcgattttttttgcattcttatatatgttacaatacatatagtgtataagataaaaaaggtgatatagtggaacttaaaactcttggtgaatttaatttcatacatagtattgaatcggatacaatatatgacaataagacagtggtgcaaggcattggcgatgattgtgccatttataaagctagtgaagggtatgatcagctcataagtacggataccatggtggaaggtgttcattttatctttcattatatggcgccctatgatgtaggatatcgtttgatgacggctaatttgagtgatattgctgctatgggaggtataccacgtcaggttgtattatctgtatctgcaccaggtcatattgacacgcaaattttagatgaaatttatagagggattaaggatcagtgccaacgatatcatgtaaatcttattggcggtgacacggtcagtatagatggccccatggtgtggaccattactatcataggcgaagtgcctaaaggtaaagcgatactacgaagtggtgctcgacctggggatgtggtgggcgtcactaattatattggttatgctgcaacagggttaggatccttatcgtataatctagatggctatccaatgacgagaattggacatcagcgtccagaaccacagattgaattaggccaaaaattgcgagatataggcattcacagtatgaatgatattagcgatggccttagtagtgagttgaatgaaattgcaaaggcatcacatgtttcaatcgtcattgatgaagcacttatcccattgcatgaagaaacatataaactagctgctgtattacatactaatcctgttgattatgccttgttgggcggcgaagattttcagctcgtatttacagcgcctaaggaactttcacaggcattagaacagttaggttctatcacgcttattggtgaggttatagagggaaaaccgatggtacaattggtgactaaggataaagagatacgcttattagaagcgaaaggatataatcattttcatgagtaaaaataaagttacattagaaacatattctgtagaggatacacaatgctttggtgaacgcctagggcagtgggtcaaagcgtctgctagtccactatgcatagcattaatcggtgatttagggactggtaagactcatatgtctcagggcatagcaaagggtcttggcgtgtcggaggatattacaagtcctacattttctcttatgaatacctatatgacattggccggtgaaatataccattttgatttatatcgcatggatgatgtaagtgaattagaaaatattggattttatgaatttacagaggatcaagttgccattgtagagtgggcggataagtttgaagctgaattgcccgatgaaacgttatggatacatattgattcgattgatactcactctagacggattacattagagagcgatgtacttgacgctgaaacattgaatactttaggaggtatgtatgtggttgggaattgaaacgagttctgtcgtttctagtgttgctgtgatgaatgaaagtcagttacttggtgaaattactatacaagcaggattgactcattctgagcagttggtaccacatattcaatcattgctagagatgacgagggtagaaaaatctgatttaaaaggaatcgttgttgctagtggtcccggttcctttacgggtttgcgcataggaatggggacggcaaaggctatggcttatgcattacatatacctttatatggggttatgactatggatggattagcgcgtaatattccgtatattacggatacgatttgcacggttattgatgcgcaaaagaaacatgtctatgctgctctgtatgcatatgatggagagcgtttacgggttaaagaagagccattcgtagtagaggctgtttcattagtagaacgattacgaaatcaacataaacgcgtcgtatttgtgggcgatggtattaagcggattgctccactagtagaagatgatgagttattaatcattggtgatcctatctatcgcatacctaaggctagctctttattattaagcgcccgctctatgattgaacgaggtgaaagtgctgatcctatggatatggtaccgtactatattagacggtctgaagcagaagtattgtgggaagaaaagcataaagataaccctgctatgttaaaggagaatcctacagtcactgtaatcgaagcggcaggtgaaaaatagacatgacagtccgtagagcaacgattgaggatgcaaaggaaatttttgctattgaaatggaatgcttttctgttccttggagtttagattccatagaaacagaattactgaatgaagataagaaactctattatgtcatagaagataccaatggtgttgtaggttatgcaggggcatggatcgtatatgatgaagggcaaattacgaatattgcgatacgtccatctgcaagacgccaaggctttggtgctaaacttacgagtgcattgatagaggaatgttttaaacgaggcatgcatgaaatctttttagaagttcgtatatctaatttgtctgctttatctttataccgacaattggggtttactgtaaaaggtatgcgaaaaaattattactcagagcctaaagaagatgcgtatatcatgtctcttattaaagaggaaggaaaatgagtgtatatacattagcattggaaagtagctgtgatgaaacatcggccgctgtactaaaggatggccgtacagtactttctaatgtcatatcgagtcaggtgccaattcaccgaaaatttggtggtgtagtgccagaaattgcatcccgtcatcatatagaacaagttatccctgttattgataaggcattagcggatgctcatgtcacattggatgacattgatcatataggggttacctatggtcctggattagtaggggccctattagttggtgtagcggctgcaaaaggattatcctttgctacggggattcctttagtacctgttcatcatatggaaggtcatatttttgctaatttcttagctaatcctacattagaaccaccatttttaagccttgttgtatcaggtggtcatactatgttagttcatgtgaaaggctatgaagaattcgagattttaggacaaacacgggatgatgcggcaggagaagcttttgacaaaattgcccgtgttatggggtttccatatcctggaggacctcatattgatgcattagcaacagagggcaatccagatgctattgagtttccgaaggcccttagtgagtcgggaaattttgaatttagctttagtggcttaaaatcagctgttctaaattatttaaatagtaaatcacaaaagggtgaagacatacataaggctgatgtggcggcgtcctttcaaaaggctatcgtagatgtcctcgtagaaaaaactaaggatgcagctcatacactaggggaaactaaaataaccattgctggtggtgtatctgctaaccaaggattacaagtagcattagagaatatgtgtaatgaagaagggtttacgtactataaaccaggtaaaattttagctactgataatgcggctatgattggatgccgtgcttactatatggcacaagccggaaaattctgcgatttacattcaaatgctaagcctagtgtgccaattggtaccgttgcatgggtagaaggtaactagtatgactgtacatatatatgatgaacttgttaaggaaacaaatctatctagtttgcaagcagccctactagttcatattagtcatacgattcgctttggccaatcggtgagtaaacataagattgttttgtttacagagattgcgaatgatgacatgatgtgtatatatgagtctaatgactcattagttacatcacgcatacctagttctgatatgtggaaaaaactaatcaccaccggtgaaagctttcaacaatccacacaaaatggatttgaatatctatttcccattgtcgataatggcggtaagactataggaggcatttccttttcttatatagcacctgccaatggtgtggaaggtaaacgaggatttatcgtagccgatacgatgcaacgattgatgttgacggccacagatgaacaaattaaagaatatgagcctatatcgtatttggatgggctcatcatttttgaccaaaatgggactatcttgtacggcaatgatacggcgttacacttggcggatattgtcggtgttgatcggcggttggtgggcacatctatttttggtagttctttaaaaatatctgctattcatcgtgtcatagatgaacgaaatgattttgtatccgaagaaatctatcataatatggtactaagacagcatttgattcctattccgatgggacgcaatgaatgtcgttgctttttaattcttcacgattgtacccgtgaaagtaaacagcaacaagaactactagttaaaaattccattattaaagagatacatcaccgtgttaaaaataacttacaaacagtagcaggcttactacggatggaagcgcggcgctctgatttaccagaggtaaaatcggcattacaagagggtatttcccgtattgaaagtatggcccttgtccatgatttagtatctcactatgatgaagactatatttctatacgatccatatatgatgaattgtgccgattattacgtcagagcatggtagaacgtaatcaacatgtagaatttcgctatcatggagacgattgtatcatttcatctcatcaagccagttatatttctcttgtattcaatgaactgatttctaatagtattgtgcatgggttggatgggactgatggtgtaatttcattatctgtatccagtatgaatgatactattgcactagtatttacagattcaggtaaaggtttgcctcgtgattttgatatggctaaaagtaagcgattaggcatgcaaattattaataatttggtgactcacgagctacaaggtcatatgacgattgaaaatggtgatgttggggttattgttacaattcatattcataaggagcaataaatgcgtattttaatcgttgatgatgaatctttaatccgcatggatttgcgagatattctagaatctgaacaacatgaagtggttggggaagcatcgaatggtgttgaagctattacgatgtgtaaagaactaaaacctgatgcggtgttaatggatgtgaaaatgcctgagctagatggtatagaagcagctcgtcaaattggatttaaccacttggcacctgttgtacttctaactagttatagtcaacaggatttagtgacaaaagctcgtgaatctggtgtatatggatatttaataaaacctgtgagagaagagcagctgattccaacattagaaatggcatgtggtcgatttttagatgatttagaatcacgtcaacaaatggctgatttagagaaaactctagaagaacgaaaaataatacaaaaagcgacaggcattcttatggatttatataaaattacggaggacgaatcatataatcgaattcggcaattaagtatgaagaaacgagagtctattgtcaacatatgtaagctaatcattcaacaagcatcgtctaattaataaaaactatagggcgatacatataaccttctatataagatataaaagcttatatagaaggttattttatatgaattagtacttgtaaaaactaaaaagtcaaaaaatcaaaattagtacttgcaattattttgacataggttataataatacatgtgattagcactcgataagttagagtgctaatgaattatgaataatacatagtaaataaggagtgacatcatatgttaaaaccattagctgaccgcgttcttatccgtttagaagcaaaagaagaaaaaactaaaagtggtatcttccttcctgatacagcaaaagaaaaacctcaagaaggtgttgttgtagcagtaggtgctggtaaagtatatgacaatggtcaacgtgtagctccagaagttaaagttggcgatactgttatgtttgcaaaatacgctggtagcgaattagaaatcgatggcgctactcacttgattattagcgaacgcgatatcttagcagtattataatagctttcaaggctatacatgttaatgatacattctatattgccttagggcatatatttctttacattggatagtgttactatctaggaggtaatacatatggcaaaagaaatcttgtttaatgaagaagctcgtcgcgcattgggtcgtggcgttgatcaattggcaaatgctgtaaaagttacattaggaccaaaaggccgtaatgttgtattggataaaaaattcggttccccaacaatcacaaatgatggtgtaactattgctcgtgatatcgaacttccagatccatttgaaaacatgggcgctcaattggtaaaagaagttgcaactaaaacaaacgacgtagcaggtgatggtactactactgcaacagtattggcacaagctatgattcaagaaggtatgcgcaacgtcgcagctggtgctaacccaatgatcttgaaaaaaggcattgaaacagcagtaaaaactttggttgaagaaattaaaaaacgctccattaaagtttctggtaaatctgaaattgctcaagtagctagcgtatctgctgctgacgaagaaattggtggtttgattgctgaagctatggaaaaagtaggtaacgatggcgttatcactgtagaagaatccaaaggcttgcaaactgcattaaatgtagtagaaggtatgcaatttgaccgcggttacatttccccatacatggtaactgatcctgaccgtatggaagctgttatggataacccatacatcttgattactgaccgtaaaatcagtgctatcgctgatatgttgccaacacttgaaaaagtggtaaaagtaggtaaagaacttcttatcatcgctgaagatgtagaaggtgaagcattggctacattggtagtaaaccgtttgcgtggcactttcaaagcagtagctgtaaaagctcctggcttcggtgaccgtcgtaaagctatgcttgaagatatcgcaatcttaactggtggtactgtaattactgaagatatgggccgtaaacttgattccgtagaacttactgatcttggtacagctcgtcaagttcgcatcactaaagatgaaactacaatcatcgatggtgtaggcgataaagatgtaattgctaaacgcgttagccaaattcgtgcacaagtagaagaaactacttctgaattcgaccgtgaaaaattacaagaacgtcttgctaaattgtccggtggtgttgcagttattgaagtaggtgctgctacagaagttgaaatgaaagataaaaaacttcgtatcgaagacgcattgaacgcaactcgcgctgctgttgaagaaggtatcgtagctggtggtggtactacatttatcgacatcatccctgcattgaacacattggaagctactggtgatgttcaaactggtatcaaccttgttaaacgtgcagtagaagaacctcttcgtcaaatcgcttacaatgctggtcttgaaggctccgttgtagttgaaaaagttaaaaatactgaagctggtgttggtttcaatgctttgactgaagaatacatcgatatggtaaaagctggtatcgtggatcctgcaaaagtaacacgttctgctcttcaaaatgctgcatccatcgcttctcttgtattgactacagaaacaatcgtagctgacaaagtagaagaaaatgctgctgctcctgcaatgcctccaatgggcggtatgggcggtatgatgtaatccactgcttttagcgacatatagatactatattaaaatcctaatgaatgtaacttactacattcattaggattttttattcttagaataagtcttgataaattgatttcataaacaatttatgatataattctatagaatttcatataagagtcttagtttgacagacactagtatatagcatataatttgtatatctaaaaatatctatataataaagaggtgttactatgttgaactttttatttaaaagtaaacctgattatattaattttggtcttttattctatcgctttgcattaggtatttctatgttctatcatggatacttaaaatatgtaagtggagaacaaggtctctataaggtaggggccatgttatctgctttaggtgtgccaagtggctttgaggtaattctaggcactattgcctcctatgcagagatggttggtggtattcttatcatcgtaggtttgtttacacgtattggtacgcttctagttgtaggtaccttggcggtagcgaccatattgaatcttaacggcaatttctttagttgggattatccgtcccaaatggcctttggcgccattatgttgttccttgctggtgcaggtcgctatagtttagataaggccttatttaaataatcagttaattagaagactcatcatagatgagtcttttactatgtagagaggttattatgaatcaaaaaacagttccatttacatctgaacaattagaagcaattattgctaaatatccaactccatttcatatttatgacgaagaaggtatcgttaataatatgaagagatttatctccgcattctcttggaataagggttttaaacagtattttgctgtgaaagctactccaaatccgtatattatgcgtgtattacaaaaactaggggtaggtgctgattgctcttccttagctgaattacttctttgtgaaaagataggtatcactggacatgatattatgttcacatccaatgacacaccttatgtagagtataaaaaggcgttagatatgggggctatcatcaatttagatgatattactcatattgaatacttagaaaaacatcacggatctctgccagatacattctgcgtacgttataatccaggtcctttgaaagaagggggcaatacgattatcggccttccagaggaagcaaaatatggtatgactcgtgaacaagtgtttgaggcatacaagcaattacaagcaaagggtgtaaaacatttcggtttacatactatggttgtatctaatgagcttgatattgatggattggtaggcaccgctgaaatctgctttaaccttgctgtagaaatcaaagaaaaactaggcatcgatgttgaatttatcgatcttggtggtggtgtaggcgtagcatataaaccagaacaaacacctgttgactttgaaaaattgggtgaacgtgttcatgaagcctatgatcgaattattaaaggcaatggtcttaaggatattgctttggcctacgaatgtggtcgcatggtaacaggcccatttggatatcttgtttccacagctattcacaaaaaggacatctatcgtcattacatcggtttagattcttgcatggcgaatttaatgcgtcccgcattgtatggttcttaccatcatattacagtaatgggtaaagaaaatgctcctaaagatcatgtgtatgatgtaactggttccttgtgtgaaaataatgataaatttgctattcaacgagaattgccaaaaattgatattggtgaccgtatcatcattcatgatgcaggtgcacatggtcattcgatgggctttaactacaatggtaaattacgttctgctgaattgttgttgcacaaagatggatctgttacacaaattcgtcgcgctgaaacatacgatgatttgtttggtacattagacttctctaatttataatattgagaattaaatagagttgagaactactattaataaaacataagatatacggatatatagggattttttctaatccctgtatattttagtaggaatatcttgctatcatttagataagaatgtataatgagtatagattgttatgcacatacttgctaaagtggcgagagaatacggcggtatcacccttgtgcgtaccgccgtttttctatgtgactataaagttttaatcatataatcagattatctgatacgaaggagtgaaatattttggctgaattacttcagattaaagatttggaagtgtctgtagaagagaagaaaattcttaaaggcattaatttaacaataaataaaggtgagattcacgtcgtaatgggtacgaatggtgctggtaaatccacattggcaaatgctattatgggtaacccattgtacacagtcgataaaggttctatcgtatttgatggcaaggatattacagaagatgctgtaaatgatcgtgcaaaagcaggtatctttatgtcattccaaagcccaatttccgttcctggtattactgtagaaaacttcatccgtactgcaaaatctacaattacaggtgaaaatgtacgtgcgttggctttcaaaaaagaattgaaagaaaaaatggatgaattgtcctttgacacatcctatgcacaacgttatgtaaacgaaggtttctccggcggggaacgcaagaaaaatgaaattcttcaaatgtctattttaaatcctaaattggctattcttgatgaaacagactctggtcttgacgttgatgctgttcgtattgtatccgaaggtgttaatcgtttccacaatgaagataatgcagtattaatcattactcaccacaatcaaattttacaaaaattaaaacctgattttgtacatgttttgatcaatggtaaaatcgttaagactggtgatgcttcattggttcgtgaaattgaagaaaaaggttacgacgcatacaaagcattagcataggaggcaacatggaagaaagaaagaaaacccaagttgcggatatggaccgtggtgtctatgatataaagaataattttgagtattcctatattgctgatgctgggttaacagaagatattatccgtgaaatttggtctaataaaaatgaaccggaatggatgcttgacttccgtttgaaatccttagagatttacaatcgtatggaaattcctaattggattcctgatatttctggcttagatatggaacatatttacacatatgtaaagcctaaagtagatatgaagggtgattggaatgaagtacctgatgatattaagagcacatttgatcgcctcggtattccagaagcagaaaaaacatctcttgcaggtgtaggtgcccaatatgactccgaagtcgtatatcacagcattcaagaagatcttgtaaaacaaggcgtaatttatactgatattgaaacagcacttcatgaacatgaagaaatcgtaaaaaaatactggatgacattgattcctcctacagatcataaatgggcagctcttcatggtgccgtttggtctggcggttcctttgtatatgttcctgcaggcgtgcaagtggatattccattgcaatcctatttccgtttgaatgcaccaggtgctggtcagttcgaacatacgatgatcatcgtagaagaaggtgctaaggtacactttatcgaaggttgttctgctcctaaatacgatgtatccaatcttcatgcaggcgcagtagaattgttcgttaaggataacgctacgttgcgttattccacaattgaaaactggtctaagaatatgtacaacctcaataccaaacgttgtgttgtaggtaaaggcggtactattgaatgggtatctggttcctttggttctcacgtatcctgtttgtacccaatgagtattcttaatggcgaaggtgctcatgctgagtttacaggcgtaacatttgctggtgaaggtcaattccttgatactggttgtaaggtggttcacaatgcaccatatacgacaagtaatgtaaactctaaatctatctccaaatccggtggcgctgctatttatcgtggcctgttgaaaattggtcctaatgcagaacatgcaaaagcaactgtatcctgtgaatccttgatgttggatgaaatttctcaatccgatacaattccagctattattgtagaaaatgataatgtcgatttaggtcatgaagctaagattggccgtatttctgatgaagctattttctaccttatgacgcgtggtattagtgaagaagaagctcgtgcaatgcttgttcgtggtttcgtagaaccaatttctaaagaattgccattggaatatgctgttgaaatgaataatctaatcaatcttgaattagaaggttctatcggttaaggaggtactatgagcgaattactatttaatgaacttcctagacctacctttagatggttgcgtgttaaccatactccagcaagtctttggggagaatcagacaaaactacagctgtattggtaaaaggtaatgatgccattataagcccattgccagctggtacagctttgatgaatacaaactataaaggtgctaatggtgaggctgtagctaagcttgtaagcgaagctgaaggctatcgtatccatgtgcctgctaaggcaaaagaagtggtaggtattcgcattgatgcgagtgcacgtattgccagtcgtttccaatttatcgtcgaagaagatgcacaagtagaagtacaattcttcttagatggcggtacaaaagaggcgactaatattcaatatcttaatgaatacgatgtaaaatctaatgccaagattgtcgttaaaaaagtaaatcttttagacgaaactgtacagcatatcgaacatcgctatacaaaactagaggataatgccgatgtagaatacatcaatgtagaaattggtggcaaagaaaacttcctaaactatgaacatgatttacaaggtgaatctagtaaaatcgttcatgacattgcttatttaggcaataaggaacaaaaatttgatattgctatgctcatgactcatagtggtaaaaaatcttttagtgatattcatacattaggtgccttaagcgatacatctaaaaaatccttccgtggtacattggatttccttcgcggtgccgttgcctctgaaggtgctgaagaagatacatgtttattgttagatcctactgttaaatctatttctctaccattgttattgtgtaaagaagataatgtagtaggtaatcatgcagctagtgcaggacaaattgatcaaaataaattgttctacctcatgagccgtggttttagtgaagtagaagctaaacatattattgtagaatcaatgattcgaccaatcatcgatcgcattggtgatgacgtgattgaagaagctgcattaactgcagtacgtaataagatttaagaggattgactatgagacctattacagaagcatataaggattttcctattttacataaagaacataatggtcatcgccttatctacttagatagtggtgcaacggcgcaaattcctcaaatggtaatggatcgccttacagaccatatgcttcatcacaatggtaatccacatcgcggttctcatatcctcgctattgaagcgtcggaagcgtatgaaaatgcacgtgaccgcgttgttgagttcatcaatgcccgtgagcgagaagaggttgtctttacccgtaatagtacggaatcgatgaacctaatcgctcatagctatggcgctaattttgttacaaaaggtgataagattgtcattactgttgcagaacatcatgccaatcttgttacatggcaatatgttgctgagaaaacaggttctacattagagtatatgtacttagatgaatcgggccatttgaaagatggtgaaatcaataagattgatgaaagtactaaaattgtggcatttgcccatgtgagcaatgttcttggcatggaatttcctgtgaaagaattgactgaaaaagcccattctgtaggggctattgtggttcttgatggagctcagtctacacctcatatgaaggtagatgtacaagccttggactgtgatttcttcgtattctctggtcataaaatgtgcgcttctcaaggtattggtgtgctttatgggaaacgagaattacttgaaaaaatgccaccgttcttactcggtggtgatatgattgaatatgtaaaagaacaatctactacattcaatgaattaccatataaattcgaagctggtacaccaaatgctcatggtgctgtaacattacatgccgctattgattatctcgaatctttcggcatggatgctattgaggcacatgaagaagaattggtatcctatgtattgcctaagatgcttgaaatccctcatgttcacgtattgggatctcaaaaccctcgtgaaaaacatggcgttatcgcttttacaatagatgatgtacatcctcatgatgtagcgactatccttgattctaaaggtatctgtgtacgctctggacatcattgtgcacaacctttgggcgcattctttcacgtagctgcatctacacgcctcagtatgtatttatacacgcgtaaagaagatttagatgcattcttagaagtattaaaaactgtccgttcggtaatgggctttaaagattaggagacattcacatggaaatggatcaattgtatacggaacttattttggaacataatcaagataagcgtaataaacgtgagttaagtgagtttactgcttccgaacatggccacaatccaagttgtggtgatgatttgacgctacaaattgatgtacaagatggcattattaaagatgcagcttacacaggctctggttgtgctatcagccaagcttcagcatccatgatgattgatattatcaagggtaaatctgtagaagaagcattgcgtttggtagaattattcttgggtatgataaaaaaagaggttaccgacgaatctaagcttgaagatttggaagatgctatggccttacaaaatatttctaatatgcctgctcgtgtaaaatgtgctgtattagcatggcatacattaaaagaggctttaaagaaataattatgaataagaccattatttttgacttggatggaaccttaacagattcagaagaaggaattttgaagagtgtcacatatgcactcgaatcctttggatatgaaattccacctcatgaaacattgttattattcttaggccctccacttgtagattcatttcaagaacactgtggcatggcattagaagaagcagaaaaagtatataaaaagtttggtgaacgctatggtaccattggtaaattcgaaaatcaattgtatcctaacatcatcgacctattggacaaggttaaaaatgaacattatactgtggccttggctacggctaagccagaagtttatgcacgcgagattttagatcatttttctattacacaatactttgatgtcattgtaggagccaattacaaagaaggcttggttcataagaaagagattctacaaaaggctatcgaattgtgtggtaatccattaactgatgatacgggacgtcgtctcgtatacatggtaggggatagaaaatacgatgttgagtcaggcaatgaattaggttgtatatctataggtgttacctatggatatggtaccgaaacagagttaaacgatgcaaatgcagaatatctttgcgatgatgtagatgatattgttatgaccttggacttagaggaaatgcttgttcgtagataaagactattaatgtttatattaaaaggctagagattcgtctctagccttttttacgcagtaaaaagaccttgttcatactgagcaaggtcttttagattttcttatgttatttttttaggccactttttttagctaatgatttgataaccttagcgctttgttttttgagtttgcccccagtttgttttaattggatacgtgtacggaatacacgaccaagtgttgtaatttttgttttgcgacgcggtttcatatcgcgttcgttaccgaaatcaccacgttgaacagtggttgcttttaccttttcagatccaaatgattgacgtaaggatttcataaattgtgtaagtggtagagtacgattgaaggcgaataaatcaactgctacataacccaattccggatacgcatgtaatgtgaagtgaaattgttttgcaatagcaagaacgacaatttcatcatccataacttgatagtttatttcgtctaactcaatatctgctaactcaaatgcagcagctacactttcttgtacggctgctgcggaagagagggattcttcattgcaagaatataaatctagtaataattgatgacctaatgcatctgccattgtagcaccttctttcgtacatacgttattatatctttaatattatacattgaattcttgtattagtctattcgtagaaatatttacgtatgtacattgattatggtgggaaaatatatacaataagtttatatattttggtaataatcaaataataatttataaaaatttgactttttatttgacaatagtcaaatagtctaatataataagattatatcaaaagaacaaaaggacaaattaagagatgaatttataaagaggtgttattatgagcgttatagctgataaaatagaaaaatttatacttaataaattgacagaagaacaagaaaaattaattttaaagagaaatgagttggccgatgaattagattgtgcaccatctcagattagttatgtattaagtacgcgtttttctaatgaacgaggatttgatgttgaatctagacgtggattaggtggatatattagaattcgtaagttgcaaccagaatcttctaatatggtaccaacagttacgacttatcatatctatgaaggtccaaaccgcgtggaacggttaatcgatttgcgcgatgttgatcaatctttatttcaactgttacaagataataaaattacaaagcgcgaggctcaaatgatgcataattcatttgctagcatcattgaacatgtagattatgaatctagaaatgatgctattcgcaatctttatgcatctatgatagagacattgcggaaggagtgatgtcgtatgaaatgcgatcattgccatacaaacgaagcaacagtacatatgacaaatatcgtaaataatcaaaaaacagaacaacatttatgttcgtcctgtgctaataaattacaaaaagatggtaagttatctccctttagttcgttcgtaaatgatatttgggataatgactttttctctaatgattttttcaagaatatagtgtatccagaccatatgttgcaatcacagcagatgaaacgctgtccaaattgtggaaatacgtttgaagattttaatcgatttggaaaatttggatgtcctagttgttacgaaacttttaaaaatcagattgcatcattagttcaacgcattcaagggtccattgaatatgaaggacgcgtaccgaatcaagggcataatgtgtttaaagcacaatatgaaataaaacaattacgacgtcaattagagacggctatcggtgatgaaaactttgaagaagcagctcaaattagagatacaatcaaagccttagaatcgaaactcgatagtcataaaaattgaggaggatagtatgttcgataatatattagatacggcccttagtaaatggctccaacatacgccatccgattcagatcatatcgttatttctagtcgtatacgattagctcgaaattttagagacacattatttaccaataaaaatgatgaagcagctttacatcatgttgattccattgcacatggattggttagtacgttaaaagatgcagacaatcaagattattattgtattagtcttgataaattgccagatatagaacgtgccattcttgtggaaaaacatttgattagtcctgttatggctgaaaaattgccatatcgtagcttgcttgtgtccgatgatgcatcggtagcaattatggttaatgaagaggaccatttgcgcatacaaactatggaggcaggtctaaatttaatggatgctttccaccatgcagaacgcattgatgatgctattgatgagaagcaaccatttgcatttaatgaatcttttggctatttaactgcctgtccaacgaatgtgggtaccggtctacgcgcctctgttatgctacatcttcctgcgttagcaatgactggacgcattaatcgtctcattcgcagtattgttcaacttggctattctgtgcgcggtttatatggcgaaggttctgaagcgttaggtcatatttaccaagtgtctaatcaacgtacgatgggcatcagtgaagctgatacaattgagcaattgacgaaaattgtagaaggaatcatagcagaagagcgaaaatgtcgccaaacattggtgcacaatgataaagatggtcttgaagatcatttgtggcggtcctatggcatattgcgatatgcaaggtctataagcggtcaggaatcgctagaaaaattaagcgatgttcaattaggtgtagatttagatatcttacctacatggtcgagcgatagttttaatgaattggtggctattacaagatccaattttttacataaatatatgggaaaagaagaggtaagccctcaagaacgcgataattacagagcaacagtaattagagaaaaactttcacataaataataatggtcattcctattttatgtgatgttgaagaataccattcatggagatactccatttaatatagatttacaaaaagtaccttcattttttgaatgaagtttatatagagagcgcaaactgatgtttgcaaacgaggtaatacatatgatgcaacgatttacagatgatgcacaacgagtgttatccttcgcccaagaagcggccttggaactaggccatgactatgtgggcacggagcatatactcattgggctcataaaggttaaaaatggtgttgctgcaaaggctcttaatgagctaggtctcagtgcagagaccattattgaagatgttgaagagcacattgggcgaggaaataagaaggttagttccgtatatatgacacctcgtgtaaaacatgtgctagagttagctgttgaagtagctaatcatatgaaccacaattatgtgggaacggaacatattctattaggtctgttgagtgatggtggtggcgtagcagtcggtctattacgtaatcataatattcgcgctagtgacattgttgaagtaattcgagatattcttggatcttctggtagaactagtcataatagtgaagataaccaagacagcagttcattaggcgatattgccgacttcggaacagatttaaatgaatcggctaaacagggtaaaattgatcctgtgattggccgagataaagagattacgagggttattcaaattctgagtcgtcgtaccaaaaataatccggtacttatcggtgaaccaggtgtaggtaaaaccgccattgcagaaggcttggcacagcgtatcgtaaacggtaatgtgccagaaatattacgtaacaagcgaattatttcactgagcatcagttcaatgttagccggtgcgaagtatcgtggtgaatttgaagaacgattgaaaaaagccatcgatgaagttcaaaaacatgacgatatgattatttttatcgatgaaattcatacattagttggcgctggtgccactgaaggcgccatggatgcagcgaatattttaaaacctgcattagctcgcggtgagttccaagtaattggtgctacaaccttagatgaatataaaaagcatatagaaaaagatgctgcactagaacgtagatttcaaccggttttagttggtgaaccttctgaggaagatgcgctcgaaattttaaaagggcttcgtgatagatatgaggcctttcataaggcaaagattactgacgaagcattggaagcagcggtttcactatctagccgatacatcacagatcgatttttgccagataaggctatcgatgttgtcgatgaggcagcgtccaaggtgcggatgaaagtgttttctgccgcacccgatgtgaaagcattggaaacacaattagcagatgtaaaaaaggagaaagaagctgctgtaaccgctcaagaatttgagaaggcagctgagatgcgtgatgaagaaaagcgcattgaaaaggaaattaacgataagaaaaacgcagctaaggaaaatagcgatgctaagttagttgttactgacgaagatatcgcctctgtagtagcacaatggacaggtattcctgtttctaaaatcgcacaggaagaatctgaatcattattacacttagaagaagagcttcataaacgcgtcatcggtcaagatgaggctgttgtagctgtctccaaggctgttcgccgcgcgagggccggtctaaaagatcctaaacgtcctattggatcgttcctattcctaggtcctacaggtgtaggcaagaccgaattggctcgtgccttagctgttgccttatttggtgatgagacggcgatgattcgtctagatatgtcagaatacatggaaaaacataccgtatctcgcttagttggtgcccctccaggttatgtgggctatgaagaaggaggtcaattaacagatgcggtacgccgtaaaccatatagtgtgattcttcttgacgaagtagaaaaggctcatgcagatttctttaatatcttattgcaagttcttgatgatggtcgattgacagatagccaaggtcgcactgttgattttaggaatactgttatcatcatgacgagtaatctaggtgctaaagctctgcgcaaggattcacctgaactaggatttttagcagctaaaaaggctgatagcaacactgaagatgttagtgttgttaattttaaggaagcaaaaaaatctgttatggattctgtaaagcgtcatttccgtcctgaatttttgaatcgtatcgatgaaatgattgtattccatgctttaacgtcaaatgatttaaaacaaattgttacaattttaatggatactgtagtaaaacgtcttggtgatatgggactatctctggaaatttccccagcagctatggatatgcttgtgaaagaaggatctgatttctcaatgggcgcacgtccattgaaacgagctattcaacggttaattgaagatcctatttcggatcttattttacaaggtaatgctcctaaaggtgctaccatcaaggccgatgtagaagatgaacacattattgtaaaagcttctaattaattggaaatagatattgttctcatacagtcttttatgtaaaatttaatgtcaaaatggtatactattagtgataatagttgaccgtagtattaggtcatgagtgaattatcattcatgaccttttacttttcatgggggttgtatggcaaaggtaaaaacagttttcttttgtaataattgtggtgctgaatctgccaagtggatgggaaagtgtcctcaatgcggtgaatggaatacactggttgaagaagtggtgaaagacactaaacacagccgtacaccatctgtacgtggggtgggcaccaatacggctaaaccggtggcattaccagatattgagatgtctgctgtgtctagaattcctacaacatataaggagatagatagagtgcttggtggcggtattgtgcctggtgcgttaatgttattaggtggtgaccctggtattggtaaatcaacattgcttttacaagtttctcaaaaggtggccgatacagttggtactgttttatatgcatctggcgaagaatcacaattacaattaaaattgagagcggaacgattacatattaatagcgaacgattacatgtgatagccgatacagatttagaccatattcttgaggtcgcattagatcaaaaaccatcattactggtcatcgactccatacaaacaatgtttactgcagatatcgaagccgcacctggtagtgttagtcaagtccgtgagtgtacatcgcgtttattacggttttgtaaagaacagaatattccgaccattatcattggtcatgtaacaaaggaaggcaatattgcaggccctcgtatgcttgaacatatggtggatgtagtactctattttgaaggggaacgttcctatcagttccgtatattacgagccatcaaaaatcgttttggttccacatcggaaaccggtatttttaccatgattgaagatggtttagcagagctggctaatccgtcggcgtccttgttagctgaacgagcagatgatgaaagtggtagtgcggtcatgatttatcttgaaggggttcgtcccattctggtagaggttcaaagtttggtagctacaacagcctttggaatgccaaggcgtacggctattggctatgatttgaatcgtctaattgtgctactagcagtattggaaaaacgctgcggctttacgttgggcaataaggatgtctacgtcaatgtaatcggtgggttaaaggttaatgaaccggcttgtgatttatcgatggccgttgccattgtatcaaatttaaaaaatcgcgtagtgcctcatgacatggtgattcttggagaggttggattgaccggtaatgttcgtagtatcccacgcatagaacaacgaattaatgaagctaagaaattgggctttacaaagtttattatcccagaagggaactataaacaaattaagcacgatgataagtctattcaaatccgtggtgttacgtcaattgcacaagcgatgcaactcgcattttcttaatacatgttatagttcatagaaggctaattcattgagtataaactctatggtatttgaaggaggtgatgccatgatttatggtattttacggtatgtgattgctatccttatcggtacggctgcatacgtaggtatggacaatttagcccctattattgatccttatttagtatctcaatttgcaagctttggagatatgtcgctcactgtagcacgtatttcagttattgtgcttggtacgataattggtattttaataggctattttatttcgtcctttattttaaaacaaggtttagtcattgctagacgattggaacgggtattaacacatattcctaaccaagaattgattgcaggcaccatcggtttattatttggtcttattattgctaatttaattggtgcagcattcaatcaggttcctatcattggaccgtatatttcaatcatcttaagtgccatttttggctatagcggtgtgcgtttgatggcccgtaagggacctgaaatgtatcttaactatttaaagcaatggaaacgcagtgaagcggggactaaaaaaagtagaggcttcaacatgtttggatctcacaagtccagtgactcaaattcaactgcaaagttattagatacttctgttattattgatgggcgtattaaggagttgtgcgctactgggtttattgatggcccattggtagttcctgtctttgttttaaatgagttacaaattatttccgactccgcagatgcgatgaaacgaaatcgtggccgtcgtgggttagatattttaaaagaaatgcaggatgcaaaacttgtatctattgaaattgtagaagatgactatgatgatctacacgaagttgattctaaactcatgcgattagctttagagaaacaatggaagcttatgaccaatgattttaatcttaataaggtggctcgtgtacaaggcattaaggttttaaatttaaatgaattagccaatgtgttgaaaccggcccttattgcaggcgaatggattcgcgtacaagtgatgaaggaaggtaaagagattcaacaaggcgttgcctacttagatgatgggactatgattgtcgtagaagatggtcgcccgtatgtaggtcaagaggttgaggttatggttacatccattttacaaaccagtgcaggtcgtatgatttttgcgcgtgtagatggaggtaagcatgagtaaggttagctgtattgtattagctgctggcgcaggtcgccggatgggtcatgatgagaacaaaattttcattaaacttggcaataaatcgattattcaatggacgttaagtcatattgaacaagttaaagcagtgagtgaagtcattctcgttgttgctgacggcgaagcagcctatataaagcagcatattgcatcattagggctttcaaaatcaattaaaattattacaggtggcaaagagcgtcaagattctgtgtatgcaggtttacaagcggttagcgatgatatggatattgtcctcgttcacgatggagctagacctttagcaaagccagagttatttaaaagtgttattgaaggcgccaagactcatggcgctgtgactataggtgtaccatctacagatacgattaagcgtgttgatatcgatggacaggttttagaaacattgaatcgtaacgagctgatgaatattcaaacgccacaaggtttcctaaaaaatatattcaaagaagctcaggaaacggctaagcgtgatgcttatttggggacggacgacgtgtccttagttgaatatatcggtaaagatgtgtacattttagatggcgattatgagaacatcaaggttaccacaccaaacgatatagcggtggctaaacggtatttaggaatcaaggagcaacagatgcgcgtaggttttggatatgatattcatcgattgaaggaaggaagaccttgtattttgggcggtgttcatatcgaatcgcctgttggccccgatggtcattccgatgcagatgtattgattcatgcgttgatggatgccttacttggtgctgctggtttaaaggatatcggctactattttccaccagaagatgatacatataaagggatttctagtatgattttattaaaacatgtgaattccttgttgaaagaaagaggcttagaagcctataatatagatattatggttatttctgaaacgccaaaattaaaaccacacatcgatacgatgaaggctaatttacaatctgttttagaaattccattagatcgcattagtattaaggctactaccaatgaaatgcttggtgccattgggcgccgtgaaggtattgcagcacaggcagtagtttccgtatatgaaggagaggtttaattatgaaggtacgttttgcgccaagtccaacaggtccatttcatattggcggtgctcgatccgctttgttcaactggctattagcacgtaaggaaaaaggtacgtttgtacttcgcattgaggatacagatttatctcgttctactcgtgaaagtgaagaaaatattaaagcatctttgcaatggctcggtatgaattgggatgaaggcatcgacgtaggtggtgaaaatggcccttatcgtcaaacagaacgtcttgatttgtataatgaagtaacacaacgcctacttgatgaagataaagcttatgaatgcttctgtacagctgaagagcttgatgaagtacgtcaagcgcaaatggaacgcggtgaaacccctaaatataatggtcattgttgccatcttacagaagaagaaaaagaaaaatatcgtgcagaaggtagaaaaccaactatccgtcttcgcgtacctttgaataaaacttatgcattcgatgatatggttcgtggtcatgtatccttcgagtccaatggtgtaggtgactttgtaatcgtaaaatccgatggtatccctgtatataactttgccgttgtaatggatgaccacatgatgaaaatcactcacgttattcgtgcggaagaacatttatccaacacacctcgtcaaatggctatctacgaagcacttggttgggaaattcctatatttggtcatatctccttgattcttggcaaagattataagaagatgtctaaacgtcatggtgctacatctgttgatcaatataagcaattgggctacttgccagaagcattagtaaacttcttggcacttcttggttgggctccagaaggtgaagaagaattctttacacaagatgaattgattcaagccttctccatggatcgcgttgctaagaacccagctgtatttgatatcgataaattaaaccacatcaatttccattacatgaaaaatttgagcgatgaagaattattccgcctttgcttgccacatttaaaagaagttggtttagctccagatagcttgaatcaatctgatattgattggttaacattactttgttctacattccgtgatcatattagctttggtgctcaaattaaagatcatgtaggcatgttcatgggggaaacagtattcctcgaagaaggtcatgaagaagagttaaaggcagtgcttaacgaagaatctgcgccaactgtattgaatgctttcaaagaaaaattagcagacatggaagaagttacaccagaagccgttaaaaaggctatcaaggctgttatgaaagaaactgctttgaaaggtaaatttgtattcatgccattgcgtgttgccttgactggtcaaatgcatggtcctgatttaaacaatattgttacattgcttggtaaagaaaaatgcttgcatcatttagacaatgtaggtgctttaactaaataatagaactattgaaaggctctcataccgatggtgtgagggcctttgttgtatataatgtacagatttgctataattatcggcgtattttattttgatttttatgaaagtgagtgttttgatgagtttaattcgatctattaaccatctcttcaatagctatctatcttggatagttttattgatggccgtattagcttatatgctaccgacattttttgcatggatgacgccgtatgtggcatatatgttacaatttgttatgtttgccatgggcttaacattaactgctcaagtattccttgatgtatttaaacaaccaatgaatgttatcctcgtatctgttattcaatttttatggatgcctttagcaggctttttagtagctctcatctttaacttcccaccagaaattggtattgggtttatcttgctaggtgcatgccctggtggtactgcttctaatgtaatgacattcctcgcaaatggtaatgtaccattgtccgtatctgctacaaccgtatctacattgttggccccaattttaacaccattattcgtagtattgtacgcaggtgcaacatcgtctattgaaattcaatttatgccgatgtttatatccatcgttaaaatcgtattggttccaatcattttaggtatcgtattgaattactttattggatctaaaattgaaccagttaaatctgtatgtcctactatagcggccattgcagtattacttatcttggctgccgtaacagcggttaaccaaaaacaaattgctgaaacaggtctcatcatctttgtggcttgtttagtacaaaacttaagtggctatgttgttacattctttatttgtaaggttcttaatattgatgtatcatctcgtcgtgctatgcaaattgaagtggctatgcaaaactctgcattgtccgtgtcattagcgatgaaacattttacaccgcaagcagctgtggccggtgcagtattctctatcatccataattttacaggctctatttttgccggtatttgtcgtaaacatgacgataaagaaaaattagaacaagcttagtatacaatagagtaggtacatcattttaaaagctttaactgataatacatttcaataaaagatgtagttaaacctccattttcgcaatccataatatgtttaattcccttaataaagggatatattcaatggtacagaagatggaggtttttcttgtaattattgacattatatagcattattggtaaaattattttatatcttaatataggtatatattaaaagctaagattgaaagaagtactctacaactaactttttagcgagaaccgatggtgggagggtttaaggataggtagacgaaatgcattcatgagctgacatcccgattataggtaggtttgtccggtgacgcgccgttatgcgatgagtgggtaccacattggtgcctaacagagtggaaccgcggaccatcgtctctgtatgagatgagggttcttttttatttttcgaatatggaggcatcagtatcgatgagagaaattacagtttataatacaatgacgcgccaaaaagaggtatttactcctgtaacaccaggtgaagcaaagatgtatgtttgtggtgtaacaccatataatcatcctcatattggtaatgctcgtccttttgtaacgtgggatgtaattcgtcgctacatgaaacatgtaggatataaagtaacgtatgtacaaaacttcactgatgtagacgacaagattattaatacatctaatggtgaaggcgtggcatgggacgtaattgctaatcgttatatcgatagctattttgaagtaatggatgcactcggcgtagaacatgccgatgtatacccacgcgtatctactcatatccctgatatccttaagatgattgagactcttatcgataagggttatgcttatgagttagatggcgatgtgtattttagcgtagaaaaatttgatcattatggtgaattgtctggtcgtacattagatgatatggaagcaggcgctcgtattgaagtagatggtcgtaaaaagaaccctatggactttgcactttggaaagctgctaaaccaggtgaaccattctgggaaagtccttggggcaacggtcgtccaggttggcatattgaatgttccgctatgagccaaaaatatttaggcgaagaatttgatttccacggtggtggtagtgatttgattttccctcatcatgagaatgaaattgctcaatccgaaggctgttctggccatcatccatctgtaaaatactggttacataatggattcattacgattaattccgaaaaaatgtctaaatccttgaacaatttcttcttggtgaaagatattttagaacaatatagtccagatgctttacgttacttcttacttagcacacattatcgtagcccattggatttctccgatgaacgcttagaagaagcaaataaatctttggaacgattaggtactgctatcgaaaatcttttatatcttgaaaaatgtgaagctggcccttgtgacgatgctcaacgtttattagaaaaagctaaagaatatgaagacgaattcgaagccgctatgagcgatgattttaatactgcattagctacatctagtatgtttggtcttgctaaggaaattaatatttactatcaagttgtaacaggtagagaaggcgttgtttgccaagatgctatcgcagaggtaaaacgtatcttcaaatttatgacagaggtcattggcgtattagaaaaagcttgggaaggcaatactggtgctgacgcagcagaatacgaacaattgatggatgttattctctctgttcgtcaagcatgccgtgagcaaaaacaatgggctcttgccgattgcattcgcgaccgattagctgaaattggcattactattgaagattctcctgcaggagcacggtggaaaaaacgtgaaatttaagcaatttcaatttctgaaacaagaagctattaaaaaattaatactcttagatacggaggaccattcttttgtatctaaaccagcatctgaagtattagcttcagatgctgttatgttggcctatattggtgatgctgtgtattctatgtacattagacaacgcgttgtagaaatgagtatttcaaaggttcaggttctacatacattggtaactgaatttatttgtgcaaaatctcagtcaaaagtattggatcaattagaatcaatatttacagaggatgaacaaacaattgctagacgagcccgaaatagtaatgtcaatgtacctaagagtagttctgtacgggaatatcgaaatagtaccgcctttgaagcagtccttggtttcttatatgaaacaggtcagcaggaccgacttaatgaattgatgaaagaggcctattctattacattaagaggactttcacatggataattatattgtaggcagaaatgccgtaaaggaagcattaaaagcaggccgttctatacaacgcattttagtgagtgacgataaaattaaaacgggtttatctgatatcgtgggtctagcgaaatccaaggggatagaggttcgtcccacacctgttaaacagatgaatcgatatgaaacggatgtacctcatcaaggtgttattgcatttgttaatgctgtagaattcaaagaccttggagaagtactgcaagagtcgaatcatgagaatccattgcttatcttaacggatggtgtagaggatcctcataatatgggggctattatccggaccgctgaatgtgtgggagctactgcggttttaattcccaaacgtcataatgcaccaattaacgcaacggttgccaaaacatctgctggggcagtggaacaaattccccttgttcaagttggcaatgttacacaaacgattaaacagcttcaaaagcaaggattttgggttcttggtgctcatatggaaggtgaccgtaccttgtatgaagccgatttaacgatacctaccgtccttgttattggaaatgaaggtaaggggattagccgtgttgtaaaagaagcttgtgatttcctagttactatccctatgtatggtaatttaaattctttaaatgcatctgtagcagctgctattctcatgtatgaagcagttcgacaacggactatgaaggtaaaatagaggtgctacatgttaaaggatattttaatcgtcgatgggtataatgtcatcttcgcatggcaaagtttaaaaaaactggctaatgaatccttggaacacgctcgaatggaattacgtaatcagcttttaaactatggtaaatttaaaggctatgaggttatactcgtgtttgatggtaaatatactaagtcgatagcgagtatcgaagaaatcactaaagggtttatagaagtatataccgatgatggtgaaacggcagattcttttattgaacgagaagtattcttgcgtcaaggtaagtatactaatgtatacgtcgttacttctgacggggctgaacaaaatcaaatattaggctctggtggacttcggattccagcaagagaattgcaaaatgatatgcgtcttgccaagcaagaggaacgcttgcaatatacacataaacatcatcgtgaccaaatggtactcaggagaaatgaggtatatgaccacttagatcccgatgtggctaaaaaattagaagctatacggagaggtacaaagtaagcacaacagatagacctgctgtagtagtatgaagtacattctatttcataaatattgcagaacatatataattcaagtataataacatatattggtatttctacaatatgtgattgtatggaggacctatgaacaattttcatatgcaacagtccgattacaatttcaaagaaatgactgatgagcaagttgtggtcatagctcaacaagagcaaaatgagtttgcaatcgactatatagtcaataaatataaaaattttgtgcgcgctaaggcgcgtacctattttcttgtaggtgccgatcgagatgatatcattcaagaaggcatgattggcttgtataaggctactcgtgattttagacatgataaattagcctcttttcgggcctttgcagaactatgtattacacggcaaattattacggccataaaatctgcgacgcgtcaaaagcacgcaccactcaattcttatatttctttaaataaacctgtgtatacagaagagtctgaacggaccttgttagaaatgctgtcatcagcacgaagtacaaatccagaagacctcattattagccaagaagagctagatgatatagaaaaaaacataggacatattttaagtgatttagagtggcaagtgttagaaggctatttagatggtaaatcatatcaggagatggcaaaaggtactgatcgtagcatcaagtcgattgataatgctttacaaagggttaaacgtaaattagagaagtttttggaacatcgtgtattagatgctcctacacaggaaggatgactattgtgacaaattttttgatggttttagaaatcattgtgtccattttattgattgttgttgtaattgctcaaactagtaagagttctggtatgggcggcgccgtttctggtgcggcagattctacattcggcggtaaagaacgcggcttagatgggttcttatctcgctgtacaatcattttaggtattatctttgctgtattgagcttagttctaggggcaatgattaaccaattctaatttgaaagcctgcctagcaggcttttctttttttcagcatatataaatattatgcaaaggaggtgtttatatgaaagaaaaagtgttagcgttttataaatctatttatccccatacgtatcatatcgatgatgctgctatggattgtcatattaagggcggccgtgaattggatgcctttatggatgctgctagagaactattaaaagaggggcgcttaagttttatacgaaaagatgtatatgcctataataatgatacagaatttattgaaggtatttacaagggatatagaaaatcctttggatttgttattactgctcctgatgaagaggatgtgtatatagcagaacaaaataagggcactgctatgcataatgataaggttcgtgtacgtattatcacatcccgagattcacgccataaacgagaaggcgttataactgaagtcatagaacgagctaatgaaactgttgtaggtacctatgacagacagcattcctttggatttgtcatccctgatgatgaacgattgggaacagatatttacgttgacttacataataccttagatgctcgtagtggtgctaaggtgcttgtaaaaattatcaaatggccagaaggcgataagaaaccagaaggtgtcattacagaagtattgggctataaaggtgacgtaggtcttgatattaactgtattatggctaattatgacttgccattttcttttccagaagatgttgtgaaagcgagtcaacatattaatacgaccattacagatgatgcaaaacgttgggacttacgcgacgtaccaatggttaccatcgatggtgaagatgcaaaggaccttgatgatgctgtgagtggtcgtaaactcgataatggtaactatgaactaggtgtacatattgccgacgtaagccactatgtagtgtcgcaaaaggctatcgatagagaggcctataaacgcggtacatctgtctatctagtagacagagttatccctatgttaccagaggtactatccaatggtatctgtagcttaaacgctggcgaagatcggtatgccatgacctgtatgatggaaattgatacaaatggtaaggttgttaattatcggattcaaccatctatcatccatgtgaatcgccgttgcagttataaagagatttataaagcattaaccgaagatattattcctgatgacttggcacctcttatgcccatgattcacaatttatctgacatcgcaaaaactttaaatgatatgcgccgtcgtcgtggtgcactggattttgatttccctgaatataaggtgcttttagatacagaaggcacaccattgcgcattgtacgtcgcgaccggacattagcggaacgacttattgaagaatgtatgcttatagctaatgaaacggtagctactcatctaaagaatacaaaccgtacgagtgtatatcgtatccatgaaacaccgagcgaagaaaagatgagtatgtatcaaaaggtactcaattatttaggtcaagatattcgattacatcttgatgaattagagccacgcgtgttccaacatattttagatgctgttaagggcacggatattgaacaagtggctcaaatcatgacattgcgttccatgcaacaagctaaatatagcatcgataatgcaggtcattttgggttggcgtcgaaatgctacacacactttacatcgcctattagacgatatccagatctcatggtacatcgcttattaaaagctgatatgggatggcctgatggatatgcacaccgcgatactaaaacagaatttttagaacgtgctgctgtgcattcttcagaacgtgaacaagtggctgtagctgctgagcgcgacacagtcgatttaaagaaaacccaatatatggttccatttattggcgaagtctttgagggcaaaatatctagcatcacatcctttggtatgtttgtagagttagataatggtatcgatggtcttgttcatatgaatatgatgactgatgattactatttttacgatgaagaacatttcctattagttggcaagcgtacgggtcaaatctatcatttaggtgatacggtaacggtgacattggtgaaagctgatgtagaaaaacgtcaaatcgatttcgtacttggcgaagtggataatcttatgagaattcaagaaatgatgaagaattccgaaggttatgtaggggtaagagaaaagaaaccgtttgggcgttctggtatctctaaacaatctaaacgaaaaggcaagggacatagcaagtcttctaaacgaagagaacaatattctggcttatctagtgttacaaagcataaaaagggacgcaaagaccataaagcgtccaagaaaaaagtaaagaaacgtaaacgataataaaaatattaatacctattgtgaggtgactatggcaaagaaagatgctccatcattaattgcagataaccgtaaggcacgtcatgattttaatattcatgaaacctatgaagcgggcatcgcattgacgggaacagagattaaatcaattcgccaaggtaaattaaatcttaaggatagctttatccgcattgataagggcgaaatgcttctctacggtgttcatatcagtccttatgaacagggcaatcgctttaatcatgagcctgagcgaacacgtaaactattgatgcataaatcggaaataaaaaaattattccaacaagtgaaagaaaagggattctccttgattccgttgaactttcattttagccgtggctatgtgaaggtaacggttggtcttgtaacaggcaaaaaattgtacgataaacgccaagatatggcagaacgggatgcaaagcgtgacattgctaagcgtttgaaagaacaacaaaaatactgatatataataggaggatgtttagtggaagttaatcaatacttttatagtttggcaaaaatatcagctcaaaaagcagctgaaaacggagtgcatgtagatcctaaatttatatatactcaatggtacattgaaacaggtgggtttacatctcaactacaagcaacacatcataatctaggtggtgttacagcatcagatggcagttggaggcattttacggattttattgattttgccaactattttggcaattacttgacatactatagagaagatggcatgacaaatgctacatctctgtattcgtatatcaatgccttgtacaatggcggatactttacagcagattttaattcttattatggctctgtattacaagtgtttaatacaatcaatttctaaatatggttaagggactgttttacagtcccttatttttatgcatattgttaacttaatacaaaatataagttgataaaaattacatattttcttataatgtaaacaaagtgtgatttatatagttgacaatgtaagtacatgaagaggtgaatactatgagtcaaattcgtcaaatcacagaaatcggtattttaactgctatgattacaatcttgggagctatcaaaattcctaatcttgtgccgggcattgagttccagttatcagcgcctctagcggtggcaatttgtgcggcttttgggtttaaaaagtatatcatcagtggttgtttatccagtcttattgggttggcattgggaacacaaaattttctaagtgttgctattgctatgcaatttagattagttgtgggtttcttattgtggatttgcaaaaatcatatgcttggcgttattctaagtggccctattgcttcgacggtagctcgattaactctatccgtctatgttggtaaaggagctctagctatggttatgctcgcagtacctggtatgatttttactgctgttgtagcgccaattatgactgctgtatttaaaaaggttatatccgctgctacgcatagtgtacctcgaaaggtcgtgcgatgatggggttatatagtattcgcatgcgtggtgcagaagggggacctcatgaagaagggggccgccatatttctggagctgaacgcattgtagaggaaagtgatttagaatccgtagcatctgccttgattcatcgggcattgcatcacagtaaaggcaagtcagattttataaatattcgtatagatgcggttcacgatgaagatattgcttacgttgattgtatcgctatcgatgaacatcagactgagtctgtaaaagaatcgcatgaattagcaaaagagttattacagtcagtagtggcgcataaggccgtagaaaatgctttcacagaactaggccaactaccaggtaacatgcgtggtgctattctgatggatgccaatacaggtgtgcgattggatcaagacactatgcgtggtgttcgcgtaagtcatatggatgcgtgtggcaacgaaacaagatctatgaatgtgcacatgcgtgaagctcttgtactggctacaaaggtacaatcttgtccagggattgtaggcgaactttgttggtctgatgatcctgattatacagtggggtatgtggcgtgtaatggcatatatcatcgcattccgaatatgaaagaaatgggaaatcctatcgggggccgtgtattttttgtagataccgataagcctattcgtgaaattgtcgattatttagaaaatacaacagtattggtacggtggtagcatggattattatcaagactttcaaaaaaaactagaggctaaggagcaagaacaaaataaaagaactattaagacctacgagcccttagatgcagtacgtgtaaaatgcaatgatagtgaatatatcatgatggcatctaataattatttggggcttacccatgaacctcgtgtacaagaagcggctatgcaagcaattcaacgatatggcaccggttctggtggtgctagacttacatcaggatcgtttccattgtttaaggaattagaaatcgctatagccaattttaaaggaacggaacagtcacttgtgtttaatacaggctatatggctaatgttggtacgattactgccttaatgaataaacatagcgtcatcattagtgatgaattaaaccatgctagtatcatcgatggatgtcgcctcagtggagctcatattgagcggtataaacataaagatgtagaacatgctgaatatattcttaagaattataaatctgcgtataaaatgatcattactgatggtgtatttagtatggatggagatattgcaccattagataggctgtatgagttaagtaaggaatataatgctcttcttatggtagatgatgcgcatgcgaccggtgtcatcggaaatgggcgaggtacggctcatcattttggtcttaccgatgtagatgtacagcttggtaccttgagcaaggccttaggttctgttggcggctacgtggcagggcgtaaggaattgatagaatacctgattaattatagtcgtagctttatattttctacagctttgtccccggcggatatcggtgcggctttagaggccctacgaattgtacgagatgaaccatctgtggtcgatacattacgtgataatactgtgtatatggcacataaattacaggctatgggcattgaatgtgatgatgaaacaccgatattcccgattgtggtaggcgagaatgatcgagccttaacattggctcgtgagttagaagaacgagggattattattactgctattcggcctcctacagttcctgttggtgaaagtcgcctacgcatgacggtgactgctgctcatagcaaagaacaacttgattatgtcgcacaaacactgcatgaattactagttgacatgaatatacattaggggtatgatagataaaccaacaaacccatggggatgtaaaggtttcgacaggggcgagtgtggtatagatagcgagtcggcgttccattgggccgttaaacggtgggaaaacatttaaacgcagaagaaaattttgcattagctgcataagctacgtccctcatacttgtgcctaccaagtgtgaatggacgtcaaaccgtaggctggcttaatttagtcgttcatatgaattaggcgagacaacatgaactggagtactgtagtttgtctgtgagcgataggtacttgagatttaaatcatagactgtgctcggagaggtctatatggcaacgcttttggacaggagttcgactctcctcatctccaccatgagatgattcataccgaagattagtatcttgtaatgatactaatcttcggtatttttttgttttgtacacaaattgttataaaagtcaacaatatatggtgtgaaattgtacgcaattgaatgtttaaaaatatagataatatctagctttattagaggtttataggatatagaaatcttgactatcccatgggaataaagtacaatatatttagaaatttatgaatttggatcttataaatttagtgttatgaaaaggagtacatgtaatgaagtctcgatattcacgcatgttagcagtattagcagtatctgctttactggtggcaggctgtggtagccaacaacagcaatcagctgatgtggcggtaaactcgtataaaatcgtatcgcaaaacgcacaagttgatcaaacctatacgggtacggttaaggcagaaaattctgtggctgtacatgctcgtgttactggttatgtggtggaaaaatttgttaaaggtggggatcaagtagtagcaggtcaacctttatatcgaatcgattctcgccaatatgaatcaaatgtagcaacagcggaagctaatgtggcaagagcaaatgcagattatcaaaatgcagaaactgatttaggtcgttatgaaacattggcaagtcaagatgcgattgcacgccaacgcgtagatacacaacgttctgccacggaacaagctaaagcagctgtagaagcacaacaagcagcattgaagattgcgcaagataacttgggtgacactatcatttatgcaccatattccggcacattgagcatggatgctgttgatataggtacatttgttaatgcaggatccacgacattggtaaccatcgattctgtagatcctattttcgttgaatttagcatgactgaacaagagtatcttgaatttatggctactcgttctggtgatgaaaacagcggtcttaatttgaaattacgcttagctgatggcaaggaatataatcaagtaggttctgttgttcaagcggcaagaactttagatccttctacaggtaagttaattttgaaagcttccttccctaatcctgaccacttattgttacctaatatgtttgctaccgttatttctcctggtgaaaaattaacggatgccattttggtacctacaaaagctattttacaaattatggataaaaactttgtatatgtcatcggtcaagatggaacagtatctcaaaaggctgttgaacttggtggcactacaggggctttcacaatcgttaaatctggtcttgtaaatggtgatgaaatcgttgtagatggtttaactaaggttaaaaatggtgcaaaggtacaagccactgaattgtctaaaacacaaattgaaacagctaaacaataggaggtaagacgtgtcgaaattctttattaatcgacctatctttgccattgttattgccatcatgattacattaatcggtttgctttcaatggttaatcttccggtagctcgatatccacaaatttcaccaccaagtgtacgtgttagtaccatgtatacaggtgctacgcctcaagtactgaatgatactgtagccagtgtaattgagtctcaaattgtaggcgttcaagatttagactatatgacatctgatagtgctagtactggtacatattctttgtcattacagtttaatcaaggtagtgatcccgatatggatacggttaatacccaaaaccgtgtgcaagcggcgctagctcaactgccttcagaggtccaacaagttggtgtaacaacgacaaaatcctctggcgatatggcgtacattttctccttgaattctccaaatggtacctttgatagtacattccttaaaaactatggtacaaactatttgatggatgccattaagggcgtaaaaggtgttggttccgttcaagaattcggttctgactatgcaatgcgcatttggttagatcctagcaagatgcaaaaattaggcattaccatgtctgatgtaacatctgctattaaaagccaaaacgtacaagctgcagctggtacagttggtaaaaatcctaccaatggagaacaagcattccagtatccaattaaaattgatggccgtctagtgacagagcaacaatttggtaatattgttatcaagaactctaatggtactgtattacatttaaaggatattgctcgtattgatgtgggcgcaaaagggtacgattttgtcgctaagtcttcatatcgcgatccaaatgctccatctggtgagattttatttgttgaacatcgtccgtctgctggttttgccatttctttacaaaatgatgcaaatgctttagagacgatttcaaatgttcaaaaaatattgcaagaacagtctaagtctttcccacaagatttggaatatcacgaagtcgtagataatacgaaattcgtacgtgcctctattaatgaagtagagcatacattctttgaagctttattgctcgtactcatcgtagtgtatgtattcttgcaatcttggcgttctacattgattccgatgattgcagtacctgtatcattactaggaacatttggcgcgtttgtattattagatttctccatcaatacattaacactgtttgccatggtattggctatcggccttgtcgtcgatgatgctatcgtagtggtagaggctgttgaatatgagttaaaatataatggtttatctccaaaagaagctgccattgcggctatgaaaaatgtacaaggcccagtagttggtattgcctttgtattagccgccgtgttcatacctgttgcatttatgggcggtatgaccggtattttatataagcaattcgccttaacaattgccatttctgtggcgatttccgcagttgttgcgttaattttgacaccatcgttgtgtgcattgatgttaaaaccacatgtacaaaatgaacgtgaagactttgttcatcgtcaactcaataaatttaatcgtggtcttgaacgttttagcgattggtatggcaaggtgttagctcgattaagtcatcgtttgagcttaaccgttattacattgctcgtctttgctgctggtacaggtatcgtattccatttcttacctacaagtttcgtacctgcagaagacagtggatatttccttattgctgtaaatgaaccaccaggagcaacgtctgctcgtaccgtggaaactcttgataaaatcaaagatttcttagagcaaacaccgggcattaaagataatgtagaacaagtatttactgtttctgggtttgaccttttaggtggctctcaaaaatctagtgctggtgtttcctttgcggtattaaaagattgggatcaacgtaaatcatctaatcagtctgttaatgctatggtgggtgcagtatttggctttggtgcgaagaatgtacctgaagccagtgtagtagctttgaatcctccatccattccaggccttggtaacactggtggttttacaatgtatatcattaataaagctggtgatagtgctgaggtaatggcggaacgggctcaggcatttatggcagaagctagaactaatccggctattcgaactgtttacaccacatttgatacatcatccccatccttacaatttgaaatcaatcgtgataaggctgctcaagatggtgttcagctcactgatatcttcaccacattgcaaggtttctatggtagtattcaagttaatgattatacatcgtatggtaagaactataaagttgttgttcaagcagaggatcaattccgtcaaaatgctgacaacttgaatatgcttgcagttcgtaatagtaagggacaaatggtttctattgctaactacattacgaaagaaaagacggcaaccccttcatctatcacgcgtttcgataatgctatggccgttaaaattggtggctctgcggctcaaggatatgcttctggtgatgcaattcaagcattgaaggatgcagctgctaaaacattgccagctggttatacctatgattggggcgatcaatcccgcgaagaattgaaggctggatcacaaaccatgttgattctaggtcttggcttgacatttgtattcttgattcttgctgcattgtatgaatcctggaaagttccatttgctgtattattctccgtaccatctggtatgattggtgctgcattagtaccattcttgttgaattttacaggtcgattccaattagcaaatgacatctatatgcaaattggtttgttaacattggtaggtttagctgctaagaatgctattctgattatcgagtatgcgaagattcgtgttgacgaacgcggtatggatgttgtcgatgcggctatcgaagcggctaagattcgtttgcgtccaatcttgatgacgtcctttgcattcatcctaggcgtattgccattggcaatttctactggtgccggttctggtgctcgtacatcaatgggtatcacagtagtagcaggtatgacaacagctacattctttggtatctttatcattccaatgcttttcatcatcatcgaaaagattggtcctggattctttacgaaacgtaaaaagaatcattaaatccaaatttcataacacaaataaaacacgcttataacatagcttataggcgtgtttttttaactattttatggtataatatgctagttaaaacgatttaattatcgcatgggcgatatggtgaaatatttatataaaagaggtataaacatgagtgatgtaaaaacatttgtggctggtcataaaagccctgatactgattctatttgttctgctatttcttatgctaatttgttaacacaaatgggtacacctgcaacgcctgtatgtgctggtgatgcgaataaggaaactaaatacgcgttggaacatttcggtttcgaacacccacaaatcgttacaaactgggaagagttcgctcctaatggtggcgatttatacttaactgaccacaatgaatctaagcaaatcatcgatggttacaaatccatgaatatgtgtggtgttatcgaccatcaccgtattggtgatttcgaaactgacggccctgtattcattcgcatggaaccagtaggttgtacaaatacaattttgactaaactttatattgaaaataatcaagaaattcctaagaatattgccggtttgatgttgtctgctattatttctgatactgtattgttccgctctccaacatgtacagaaacagacaaagaaatggctcgtaaactagctgccatcgctggtgtagatattgaatcctatggtttagaaatgttgaaagctggcgcagatatttctgatttaacaaacgatgaaattgttcgtacagatatgaaggaattctccgaagcaggtcaaacgatttctatcggccaaatttccgttatggatacaactgatgtattggctaaacaagctgaattagtagcagctctagaagctcttcgtacagctaatggctacgcggcatcctatattatggttaccaatattcttgatgaaagcacaacattgatctatagcggtgatgtagaatccgttgtagttaacgcatttggtaaagatgtaaaaaataatgctgtattcttaccaaatacaatgtcccgtaagaaacaaattgtacctccaattttaggagctatgaaataataaaggatatagaccatatcatggtaataaaaacgttgctcttgcaacgtttttattatatgtgatggtcatttataattactcattttatgttatagataaggagataccatgcaatcattgttagatggcttgaatcgggagcaacaacaagccgtacaacataccgaaggcccactattgattttagcaggtgcaggatcagggaaaacaaaggtattaactgtacgtatagcatatttactagctcaaggtgtaaatccttatgaaatcttagccatcacatttaccaataaggcggctaaggaaatgaaaagccgtgtagaaggccttgtaggcgatgtagctaatcgaatttggctaagtacattccacagcttttgtgctaaatttttacgctttgaattagataattttttaggttataacagtaattttacaatttatgatacatctgactctcaagttgttataaaagcagcgttgaaggctctcaatctggacgataaatactatcctgtaggtgctatgatcagtgctatttctgatgcgaaaaataaattgatgtttgcttctgattttagaaaacaagcacgggacttttaccaacaaaaggtagctgatgtttatgaatactatgaaaaagagttacgtaaaaataatgcgttagactttgatgacttattattagtagctgtaaaattactacaatctaatgcagctgtgttagaaaaatacagcaaacgttttaagtatgttatgattgacgaatatcaagatacaaaccacgctcaatacttattggcttatttattatcatcgcattggaaaaatattgccgtcgtaggtgatgcagaccaaagtatttacgcatggcgtggtgcagatattcaaaatatcctcgattttgaaaaggattatccaaattgtacatccattaaattagagcagaattaccgttctacaaagatcatattggatgcggctaatgccgttattgataataatgaaggccgtcctgaaaagaacctttggactgataaaacagaaggggctaaaattcaacattttacagctcaatctgaacatgaagaagcggctttcataggtgatactatcgtaaaaaaacatgatatccacggtgtaccttatggtgatatggccattttatatcgcactaatgcccagtcccgtgtactagaagaagcgttgattaaacgtgccttaccgtacactatggtagggggcacaaagttctacgatagaaaagaaattaaagatgtgctagcttatttgcgcgtattatataatccttttgatgatttgagtctattgcgcattattaatgtaccaaagcgtagtatcggtgctactacggtttctaagttacaagactatgcgcgtgaaaatggtacttccttatttatgaccttaacacaattgcacttagtcgataccattaagggtaaaacgaaagagaaacttgaagaatttggcattttaatttttacacttgttgcagaaatggatgataaatccgtccttgatattttagaggctattcttgatcgaactggctatttggctcaactcgaggaaagcacggacccacaagatcaagcgcgggccgaaaatatcggtgaattattatctgtggcgaaggatttccaagatacgaatccaactggtactgttgaggatttcttagaacaagtggccttagtgaatgatgtcgattcatttgaacaagaagaatccaaggttactttgatgacgttgcatgctgccaaaggtcttgaattccctattgtattccttggtggcttagaagagggcttattcccacatagccgtaccttgatgaatccagaggaaatcgaagaagaacgacgcctcgcatacgtagggattacgcgtgctgagaaggaattatatatttctaatgctacaactcgtaccgtattcggtcgtactagcagttatttaccgtctcgtttcatcgatgaaattccagcggaactcgtcgatagtttacgtgcaaaacgaagaattcctgatgatattaaaccaacggtgccaagacatatgtcggtcgctagtcgccctgtaacaaaaccgattattcgcaatgaagttatcgctgattggaaggttggggatactgcgattcacagcaaatgggggaatggtaaggtcgtcaatgtttctggtgaaggggctggtatgaagttgaccatcgaatttcctacacaaggcgttcgcgtcgttatggccaagtttgcaccggtaaaaaaaggttagaacaatcattgtatgatatagaggataattatgaatcctaaagatagaatagaacaattacaaaaagaattgactcatgcgcagtatttatattatgtaaaagacgcgccaaccatgagcgactttgaatatgatcaaaaatatcgtgagctcgttgatttagaaacagcgcatcctgaatatattgtgccatcatctccaacacaacgggtgggcatcaaggcggatggtccttttgaaaaagtagtccatggtagacctatgctcagcttatccaatgtatttagtgcggatgaagtacgtgcttttgaccaacgggtaacgaaggaattgggacatcaaacaaaggcttatgtggtggagttgaaaattgacggcttagctgttaatttgcactatgaaaatggtatctttgtccgtgccgtcacacgcggtgatggtaaggtaggggaagatgtaacagccaatgtgcgtaccatcaaatccattcctttatacctagaaaatgcgccagaatttatcgaaattcgcggtgaagcgtacatgccacatagcgaatttaagcgtatcaatgaggaacgcgatgaagaagggttaccgacctttgtcaatcctcgcaatgcagcggcaggttccttgcgtcaacaagaccctgctattacggcaagtcgtaatcttgcgttctttgcttatgccatcggttctgaaagtggtgctaatattcatacgcaagaggaattgttacatacgttggagaatttccatttttccgtaaatcctcattatcgcgtttgtaataccgtagatgaagttattgaggctattaattattggggcgaaaaacgtcatgaactgccatacgatacagatggtatggttataaaggtcaatgattttgatgatcaagagatgttaggctcgacggcaaaggaccctaagtgggctacggcttataaatatcctccagaagaggtggaaacagttgtcaaagatataaccattaatgtaggacgtactggtgtattgacgccaactggagaattagaacctgtgtttgtatccggcactaatgtgagtcgtgttacattacataatcaagatttcatcacagaaaaagatattcgcattggtgaccatgtacttattcacaaggcggctgaaatcattccagaagtcattcgtgtattgcctgaaaaacgtacgggcagtgaggttcctttcacaattcccaatcgttgtcctgtttgtgaaagtccagcagtacgccgcgaaggtgaagcggccattcgctgtactaataaacattgtcctgctattgaaaaggaacaaatcattcactttgcatctcgtgatgcgatgaatatcgatggacttggcccaagtattgtggaaaatttaatcaatgaaaaattgattaccaatgtagttgatttatatcatttgactacggaatccatcatgggtatggaccgtatgggtaaaaaatcggcagataatcttgtgaaagctattgcagattctaaatctcgtggattagaccgcgtactatttggccttggcattcgccttatcggttctaaagcggccggtacaattgctaatgttgtgaagtctgtggatagatttttaacgattagtaaagacgaattagtggcggtggaagaaattggacctaccatggcagatagcattatcgaatatcgagaggaccctcaacatattaaaatcatcaatggcttaatcgaagccggtttaaaaatggacgtagatgtacaagaagccgctggtaatgaaatggaaggtgaaatcgttgttcttactggtaaactcgaggtcatgggtcgtagcgaagctggtaaactattagaaaaacacggcgctaaggtgaccgggtccgtatctaagaaaacaacacttgtcgttgctggtgaagatagtggcagtaaattgacaaaagcgaatgaacttggtattcgcgtcattaatgaagaagaatttactgaattattacgtgatttaggcgaattataatcctttattttgaaaataaaacctatttgctttataataataagatatgaaaggatgtggaccgatgaaaatcagccaagaggaaattaaaaaaatcgctttactgtcccgattagaagtaaaagaagataaaatggctagcgttgagaaggaattatccgatatcttaacgtatgtagcagaattaaatgaattagaattagatgatgtagaagtaatggctcatgctgttcctttgcataatgtatttagagaagatgagactaaaccttctttagatcacgacttagcattgtctaatgctcctgaagaagaagatgggtactttaaggtgcctcgcgttgtacaagaataggaggtttcactgtggcaacaattcatgaattacacactaaattagtgaacaaagaaatcagtgctgtagaattaacaaatgctgtgattagtcacaaagcaaaagtggaaccagaggtacatgcgtatttatctgattcccacgaattagcattagcatctgccaaagctgtagatgaagcaattgctaaaggtgaagctatttctccattagcaggtattcctggcgctattaaggataatatttgtattaaagatcaacctgctacatgtgcatctaaaatgttggaacatttcattcctccatataatgcatccgttattgaacgattacatgctaatcacttggttagcttaggtaaacttaacatggatgaattcgctatgggcggttccacagaaaattctgcattagctaaaacagctaacccatggaatttggaatgtgtaccaggcggttcttccggtggtagtgcagctgcagtatccagtggttctgctatctgggcattgggctccgatacaggtggttctatccgccaaccagcatccttctgtggtgtggtaggtatgaaaccaacctatggtaatgtatctcgttatggtttgattgcctttgcatcttctttggatcaaattggacctgttacacgggatgtaactgatgctgcattggtattaaatgccattgctggccatgaccctaaggattccacatcaattcctggcgaacgtgtagattatacaaaagcacttgtgaacgatgttaagaatttaaaaatcggtgtaccaaaagaattctttggcgatggccttaatgcagaagtacgcaaggctatcgatgaagcaattgaaacatataaaaaattaggtgctgaaatcgttgaggtttcattacctagcacaaaatatgctttgtctgcatactatattattgcattggcagaagcaagttccaacttggctcgttatgatggtgtaagctatggtttgcgtgtgcctgcagataatttggtagaaatgtctactaaaactcgtacagaaggctttggaccagaagtacaacgtcgtatcttgctcggtacctatgtattgagcgcaggttattacgatgcatactatttgaaagctcttaaagtacgtcgcgttatcaaaaatgaatttgatgcagccttctccaaggttgatttgttattggctccaacagcccctaacacagcgtataagtttggtgaaaaaatcaatgacccattagcaatgtacttagaagatatttgtacagttccagctaacttagcaggtattcctggtattagcattccagcgggcatgagtagcgataacttgccaattggcttacaattattgggtcctgcaatgggcgaagaaacattgttacgtgccgctttcacatttgaacaagcacgtcaagattgtcaattagtagcaccaactggggaggtttctctatgagtagtaaatacgaaacagtcgttggtttagaggttcatacagagcttaagactaagtctaaaatcttctgtggttgtaccactgaattcggcggtgatcaaaatacacatgtatgcccagtatgtcttggcttacctggtgctatgcctgtgttgaataaacaagtagtagaatttgccatcaaagtaggtttagcattgaattgtgaaattcttaaattcaacaaatttgaccgtaaaaactactactatcctgatttgcctaaaaactatcaaacatctcaatatgatttgccaatctgcttgaatggtcacttagacattgaagtaaatggtgaaactaaacgcatcggtatcacacgtattcacatggaagaagacgctggtaaattggttcatagcggtaatacgatttccgattctaattcttctaatgtcgactataaccgtacaggcgtacctcttcttgaaatcgtatctgaaccagatattcgatccggtgcagaagcgagagcatacgttgaaaaattgcgttccattttgcaatatttagaagtatctgacggtcgtatggaagaaggttccttgcgtggtgactgtaacgtatccgtacgccttcgtggctccaaagaatttggtacacgtacagaaactaaaaacgttaactccttaacagctattcaaaaggttgttgaatacgaagcattgcgtcaagctaagcttatcgaagcaggcggcaaagtagaccaagaaacacgtacgtgggacgatgcacaaggcatcactcttggcatgcgtaagaaggacgaagaaaatgattaccgttacttcccagaaccagacttggtaccaatcgtaattacggacgaaaaaatcgaagaagtacgtcgttccttgcctgaattgcaagacgctaaaattgcgcgctttgtatctgaatatggcttgtctcatgaagatgcaaccatccttaccatggctcgtaagacagctgattatttagatgcagctgtgaaagctggcgcagatcctaagactgtggctaactggatgcttggtgacttgtctaagatgatcaatgaaagcggcttaacatttggtgaatctaaggtaagccctgaaaacttggctggtatgattgctcttattgaaaaaggcaccatttctggtaaaattgcgaaaaaagttatcgtatctatgtgggaatccggcaaggatgctgatgctatcgtaaaagaagaaggtcttgttcaaattacagatactggcgctattgaagaaatcgtaaaacaagttatcgctaataatccacaaccagtggctgactttaagggcggtaatggcaaagctatcggtttcttggtaggtcaagttatgaaagaatccaaaggccgtgctaaccctggtatggttaaccaattattacaaaaattcttaaacgactaagactgtcttgacttagttcatcttaaaattgtataaacgaattgtcccctatggtatatttaccataggggatattttgtttccatgactattatggtataataaattgtataaaattgattaacagttttgtgataaggaatatatcatgaataacaaagatacaatgaatgaaaataaagaacaagaaactaagacacgtgtcctaagcgatatagagcgccgtgattttgatggcgttaccattgatgaagaaggggatactgtacaagttgaatttacacctactcaaaaagaagaagaccgaagtgggtatgagcaatttcaagactatggccctcgtgtgaaggtatatcattttggcggttctagttggctaagccgtatcattatgattattgtattagctgcaatcttagcagctatcgtattctttggcggcatcatcttgtccatcgttggcgtggtcatcctagtaggggctattatctcctttatcttaggcttgttttaatggtataatatatctattatgacaagacggtggcaagtccattcgatgatgctaaaggggtactatgaacgtagttctatcaacattaaactcaaaatttatacattcttcactagccttgagatatctcaaggcttatggtgaagcccatggacaggcatacgatatagtggaatatactattaatatgcctgttttgcatattcttagcgatattacagagcatgatatcgatgtcctaggttttgcctgctacatttggaatatagaaatgaccttgcatgtggtggatatggtgaaagccgtacgaccagatattaaaattgtattgggcggaccagaggtttctttcacagccgatgaattattagaacgatgtccgaatatcgattatattgtacaaggtgagggcgaggaagcattccatgatcttgtaacggcattacagcttggtaatgatggattagaccctgtgattcccggtgtgagaggacgtagggatggtagtattctaggatctttagaggctgtagaggtttctgatttatcgtctataccatttccatatacagaagaagatatggaagatttagagcataagattatttattatgaatcctctcgtggttgtcctttttcctgtcagtactgtttgtcgggcaataagaatactgtacgattctttcctcaagagaggacattagaagaattgcaatggtttattgatcatggtgtgaagcaagtaaaatttgtagaccgcacctttaactgtgcacctcatcatcatagaccccttatggagttcatgagagacagcgatacagatatgaatttccacttagaaatggaaccagagcttatgacagagtgggaaactaacattctttgtgaaacgccgcctggacgcattcaaatcgaggtaggtgtacaaagtacgcataagaaaacattagatgctatcaatcgctataatgattggccatacatccaaaaatccatacgtcctattattcaagcaggacgtacgcatgttcacatggatcttatcgtaggattgcctcacgaggattttaatcggtttggacaatcttttaacgatttatttagcttacaacctcatgcattacaaattggattcttaaaattgctaaaaggatctggtgtacgacggatgcgtgaatataagtatgtagcagatccattggctccatatgaggttctaagcacgcatgtactaccttatgatgatgtacgtttcttgaaatattttgaagatgtatttgagcgtttttataatagtgaacgatttagaacaacctttggctatatcggacaacaattgattcacggtaaaacggatgcatttacctatttttgtgatatgacacgtgcatggcttaaggaaggtaatcataaggttaatcttaaggatatagaccaaattgaattcttatatcgtttcttccttgcaaaaggtgatacgatagctgcagagttattacaatacgatacattggtaagctatcgcggtaaggtgcgcagtgacgcagtagggttgcctaaacaaacaaaggaattactacaagtaggcgaagcattttggcgtaacgaagagattgcgtctacatttattcccaattatacgtttaaagaatggcgcaaaattcgccaacaatatgtggaaatgaatatgagccgtgaaacagcaacctatttaggcattcaacatatacctgaaggggctttcacagtgattatagatgtgaataaagaggtgaccccattcattcgccctgaaaacatacaatgatatagaggagtgttatgtcagatacaacgagaccgaaacggtaccggatggtttcaaaattttataaagaaacatatggtgaaaaggtatataaattacctgttgcattacctttaacctgtcctaatcgagatggatcagctggtgttggaggatgtacattctgtggggaaatcggtgctggttatgaaaatagacctgcatggatgacggtgcgcatgcaattagaagaaaatattgcacacatcggacctaaatataaggctaaaaaatttataccttattatcaaaactttagtaatacctatttacctcttgaggattttaaatcctatatggaacaaggttgtattgatgaagccgtagggattgcaatcgctacgagacctgattgtatttctaatgagtatttagatgtattacaggacatacaacaacgatttcataaggatatctacattgaattaggattgcaaaccgttaactatcatacacttgagaagattaatcgaggccatgatttagcgcaatttatcgatgcggttttacgcattaagcgttatggatttaatgtgaccacacatatgattgttaatttgccttgggatacgatggaggataccattgaaggggccaaaattttatcatcccttggcgttgaccaagtaaagttacatgctctatatattgtgaaacatacattgatggccaaatggtatgaagaaggtcaaatcaccttgattagcgccgaggagtatgcggagtgcgttgttcagtttttacgccatcttcatccagatatcgtgttacaacgattagtgggtcgtgccccagaggataatacattatttaccaattggtctatgggctggtggcgtgtacaggatttaattgacgatatgatggatgaactagatgcacatcaaggcgatttatgtgattatttaaatggtaaagcagtacgtaaatttatagatgggggacaagcatgagcgaacgggtatttacctttcctacctatgacttagcacaatctatactaggtcaacacaatagatatttacaaatgatgaatgaagtcattcctgcggatattgtatctcgtggtgatacagttgttataaaaggggacgagcttcaagtagaggcgttgtatcggacattagaggaactggtattcctctataaagaaggcagtacgattacagaatctcaagttcgcattgcggctaagatggtgatgcatggcaaaggggatgcccttcactctatgttcgaggatactttgtccgtaacgatgcgcggtaaaagcattacgccaaagacggaaggtcaaaagcaatatgtagacagtattcgcaagaatactatcacctttggcattggacctgccggtacaggtaaaacgttcttagctgttgcattagccgcattttacttgaagaaccgcaatgtagataagattattttgacgcgacctgccgtagaggctggtgaacgactagggttcttacctggcgaattacaagataaggtggatccatatttgcgtccgctttatgatgcgttgcacgaaatgtttggtattgaacaagtacaacgctttatggaacggggcacaatcgaggtggcaccattagcgtacatgcgcggtcgtacattagaaaatgccttcgtcatcttggatgaagcacagaatacgacggcagagcaaatgaagatgttcttaacccgtttaggtaataactctaaaatggtcgtcaatggtgataaaacacaaattgacttgcctccgcgtgtgacatctggtctttttgaagcagaaaaggtattaaaacgcgtgtctggtattcatatggtgtattttacagatcaagatgtggtgcgtcatgatttggtaggtcgcatcgttaaagcctatgatgcataccatcaaaagctttcaaaggaagaataagaattatgcatatacaaattagttatgatgatggtatagcccgagatactaagattgaagaggttatacaaaaggtttgcgatgaagtgagccgcgtgtatggacttgaagatgatgagttaagcattctactatgcgacaataagaaaattcatgaactaaatagggaatatcgtggtattgatagaccaacagatgtattgtcctttgcccttaatgaaggggacgattacgaaggcagtgatgaggaacatcacctattgggggatatgatactctccttggaacgagctcatgaacaagctgtcgagtacgggcatagttttgaacgggaattagcctatttaacaacacatagttgtttgcatatcttgggctatgaccatatgaccgatgaagataaaaaagaaatgcgcacagaagaagaatttgtgctttctaatttagggtatgtacgagaggatcaaccatataatgaataaagcagaacattttaaatctggatttgttgccgttgtagggcgaccaaatgtaggcaagtctaccatgattaatgccttgataggcgacaagattgccattgtatccgataaggcacagacaacgcgtaaccgcattatttgtgtttacaccgatgaagaaaaacaaatcgttttcatggatacacctggcgtacataagccaaaacataaattaggtgaattcatggtcgatgcagccattgaatctttgaaggaaacagaggccgttctatttgttgtggcaggtaatgaaaaacgtggccctggggacaatttcatcattgaacaattaaaacgcgtgaaagtaccggtattcctcgtagtcaataaaattgatacactgcaaaaagaacaggtattagaagcaatcgtatcctatcaagatgcgtatccatttgctggtgtcattcctatttcggcaaagaataaagaaaatttatctgaacttcttaatgtgctaggtgagcatttgccagaaggtcctcaatacttcccagaagatatgattacggaccaaccagaacgattgattatttctgatatcgttcgcgaaaagattttgttgtctacccgtgatgaaattcctcatgccatcgctgtcgatgtagatgaaatgaagactcgtgatgatggaaccacatatattcgtgctaccatctattgtgaacgagattctcaaaagggtatcatcattggtaacaaaggtgcgttactacgcaagattggtgcagaagcacgcatggatattcaaaagttattagctacaaaagtatatcttgatttatgggttaaggttaaaaaggattggcgtaataaatcgggtatgctttcagaactgggatataaaaaatagattatttagattgattatagttagaaaggattgttatggacagtatagatgccctgttaccgattgggttcggcatagtatgtattttcttaattaactttttggtggtagcaaaattctcttttgcacggttgcgcaaggaacacgtagaagatatggaaatcctacatgaaaaggatcgccaattcttgttaaagctataccaaaatcctgagtatttccttaatactacacaatttctaatactctttttcattctcaccttagcggggactggcacatatatctttaatagttttgtggtaggtatcatggatatttttaatatccatggtacatgggttcatcatattttagacctaatcttgcttattatcattagtcttatcgtcctcatctttggcgaaattgtaccgaaagcattgggtttatcattccctacaaaatatgtaaatatgcatagtcgcatcgtcgttggcgttggtcgtattgtatatccttttgtctggttagctagtaaaatatccaattgcatccttaaattttaccaaacaaaatacttaactgaactagaccttgtatatacggaagaggaaatacgcatgatgatttctagaagtcatgaagaaggtcagttaaatcaggtagaatctgagttgatagacaatgtgttcaactttgtggaacgtatggcaaaagaggttatggtgcctcgccaagatgtggattgtattttcgtggaagatggttatgatgaagccatgaaggtgattcgttctacatcgcatacgagatatccattgtgtgtggaagataaggatcatattgtaggccttgtacatattaaggatttgatggaacgtcaaaagcaggctagaaaagatttgcgaaacatcaaacgagatatcttgacggttcctgaggttatgaaattatctaccttattgcaatacatgcgaacgcgtcgtatttaccaagccgttgttgtcgatgaatacggcggtatggtaggccttgtggggttagaggatatcatcgaagaattagtaggggatattcaagacgaacatgaacctcatttgccggctacgatgagttattctgatggctcctttgagtttgacggcaaggttcttgtcgatgaagtgtctgaaatgatgaatattcacattgaagactccgattccgatacgattggtggctatatcttcggtctattaggccgtactccaattgtgggggatactgttgatgcttatggttatacatttgaagtaattaagatgcaaggttatcgtatttcacggttgcgtgtaacacctttacctgagtctgaaactgttacggatgatgaacatgaacaagattagtggcgcttttaatacgccggccatcgtggtgagccgaaaaaaatacaagctctattcggtgtttacctttatcacaccgtccttaggtattattagggcctcttttccgcataaacgattgcaaacattgcgtaatgcatcatatttacgccccttcagcgctatgtatatcacagttgtgcaggatggagaatttgtgaaagtcacacaaattgatggggcctatgtagtggaatcgctagatacaaaccttgataacattgcctatgcagccgtagccagtgaactgttacaagaactatttgcatcgtatgatgttgatcgtaatgtatttaatactgtagtcaattattcaaaatccatacgtcaacgaaatgttcgattagggacaatcatattgggatggcaaatgctgtcgttagctggtgtaatgccacaacatgaggcttttaatgccggagatggaattgatttattttgggaggaattacggatacatactcgtatgaatccatctcttgcattacgcaacgaaatgccaaatattttggcctatcaatggggcgatgcagcacctattgaacttcctggaactgtatggaaggaattagaacgattactattttcttattgtgaacaggaaataggtaaacaactgcaaagtgtaaaatttctgatgagtttataaaacatactaataaattgttaggtatcgatttataagactccttatcaaaaaattttataaattttaaaccacttatctctaataggttagataaacctatttatgataagtggttttcttatatagaaaaaatataatgtattacctgaacatatatctcatttatgagttagaaaatacaaacaaaaagctttatactaaatacattattggttgttctatatatgtttgcgtgatattagagcctatagtgatggctctattttatttttttattttgtaactatagattatagaaatttattaaaggattgtatggaatggaattaatcgagtatatcaagacattaggtaatgtaggtgtggctctatctggtggtgtagattcatcctatttagcatatgcggtaaaacaatctggcattccatgcaaagcatatactgtaaagtctcagtttgtaccagaatttgaattagaagatgccaggaaaatcgcagagtttatcggtattcccttagaaatcatagatatcgatgtacttgaacatgatgatgtgacgaacaacccaagtgaccgttgttattactgtaagcatcatgtgttcactacaataagcgaacatgctaaacgcgatggattttctgtattatgtgatggaaccaatgccagtgatgatatggatgatcgccctggaatgaaagctattgcagaattatctgttaaatcaccactaggagaatgcaatctaacaaaatctatgatacgagatttagctcataaggctgatttgtttacttgggataaaccgtcttacgcttgtttagctacgagatttcaagcgggacagcacataacaggtcttgacttagaacatattgaaaaagcggaaggatatttattttcattaggactatcagattttagagttagattagttggaaatactgctaaaattcaagttccagaaaatcaaatagctatagttattaagaataggattgagattcttacatattttaaatctatgtttgatgatgttgtattagatttagaggtgcgttcatgagcgataatgttagatctcttttagagcaagtaaaaaatggacaggtagatgtggatgcagccttattaaagctaaagatgaaaccgttagatgatttagggtatgccaacgttgatttacatcgtcaattacgacaaggtgtaccagaggtcatctatggtgctggtaaaactagtgaacaaatagtggggattatttcttccatgcagtctaacgggcaaggtcatatattgattacacgcttagcacctgatgtggccgcagaggttcaaaagcaccattcattgacatatatcgaggatgctcatatcggctatattggtgagatgcctacggagaaaacagagtcaagtatagccattgttactggcggtacaagtgattataaggtggctgaagagtgtgctattacagctgagttttacggcaatacggtgaatcgaatctatgacgtaggcgtagcgggcattcatcgcttgttacaacatttagataccattatgtccgccaaggttatcgttgtcattgcaggtatggaaggggccttagccagtgtagttggtggccttgtggatgtgcctgtcatagctgtgcctactagtgtaggctatggaaccgcctttgggggagtgacggcgttattatccatgctcaattcctgtgctagcggagttacggttgttaacatagacaatggatttggtgcagcttatacggcgaacatgattaatcatataggtgaaagtaaatgaaacgattatttttagattgccaaatgggcattgccggcgacatgctcactgctacattactcggtttagtagataatcctgaaatgtggatagcaaaacttaatcgaatggggatacctaatgttacctatacacttattccgaaagaagataagggcttacaaggttatcgggtagcggttaccattaatggtatagaagagtctgaacatcataaaggtagtccccatgaccagcatcatactgatcatcatgtgcatggccgaggcttacagggggtaacggatataatcaatagcttatctatttccgatacgtgtaaacagaatgctatcaatgtatatcatctagtagcagaagcggaggctaaggttcacaaatcgacagtgacacaaattcatttccatgagctcggcatgctagatgctattgcagatattgtggccgtttgtgtactcttagaggaattgaattttgatgagattatcatctcacctatacatgtaggaactggtacggttcactgtgctcatggagaactacctgtgccagcaccagcaacgatggaattattagctggtatccctatgtatgcagattatcaaattaagggggagctatgtacgcctaccggtgcagcgttagccaagtattttggcatatcctttagccatatgcctgttatgacaccaacaaaaatatcttatggatttggtactaaacaatttgaaagaccgaattgcattcgcgcctttgtagaaatgaacaatgatttagaagacacaatcatggaaatgtcttgtaatctcgacgatatgacgccagaagaaatcggttatgcagtagaacagttattactttcaccagcactagatgtgtttaccacatcgattatgatgaaaaaacaacgacctggtacgatgctgacggtcctttgtaagaaaggcgacatggataaggtgcgagatttaatatttagacatactacgagccttggtattcgataccatcgctgtaatcgatatattttgaaccggtctacaggagacatagattgggaaggcaacagaattgctttcaaaacaagcggtggatttggtgtaaagagacataaatatgaatatgattcactagctgccattgctaagcaaaaggatatgagtttattagaccttaaacgacaattgggtaagaaggaggattgatttgtcgtagcgggttatttatagtttgttagtgttaagttaaggagtgattcccatgaaaacatttaatgtaccctatgcaaaaggatttgtagatatcaatattcctgatcaaaatatcgcaggtgtattagaatctaaagcacattcctataaggctgagctttcacaagaagcattggtagagaatgcgttagataatcctatcggcagccaacgcttggaagaattggtaaagggtaaatccaacatggtcattatcacaagtgaccatacgcgccctgtgcctagtaaaattacgatgccaattttacttcgccgtattcgtgaagccaatccatccatcgatattaccattttattagctactggtttccatcgtccgactacacatgaagaaatggtagataaattcggtcctgaaattgtagccaatgaaaagattgtaaaccatatctctggcgatgctagccaaatgactaaaatcggcgtgttgccatctggtggggattgcatcatcaacaaattagctgtagaaacggagttattaatttctgaaggttttattgaaccacatttctttgctggtttctctggtggtagaaaaagcgtattgccaggcattgcttccgaagtgactgtaatggcaaatcactgtgctgaatttatcaacagcccatatgctcgtacaggtattatcgagaacaatccaattcataaggatatggtatatgcgggtcgcactgcgaaattagcatttattttaaatgttgtcatcgatgcggaaaaacatattatcaatgcttttgctggtgatatggaacaggcgcatgaaacaggctgtgcttttgtgtctgaactagctagtgtgaaagctgtaccagcagatatcgttatcactacaaatggtgggtatccattagaccaaaacgtatatcaagctgtaaaaggtatgaccgctgccgaagcatcttgtaaaaaagatggcgttatcatcatgattgctgcttgcaatgatggtcatggtggggaatctctttatgaaaaccttaaaaatgccaaaacaccacgtgaattactagacagcattgctaaggtccctcgtaatgaaacaattccagaccaatgggaaatgcaaatcttggctcgtattctagatcaatttacagttattgttgtaacagaccaatgcgatcctaagatgcttacagatatgcatttacaacatgctagcacatttgatgaagcattgaacaaagctttggaattaaaaggaaaagttgcaagcattacagttattcctgatggcgtatctgttgtggtgaaagcataatatgttatattttaaaagttaatataaaaagataaaggtacatcatgattatttggtgtacttttatcttttttattagtatgtcattaatctaatagcattacattgatatgtatacatattatgatttatttattctgatgagagaatatattataataaaatcgtagtggtatttagttatttataggaggttattatggaacttttggggaatctcaaaattcactttctcacactggttcttacagtcgtggctgaatttattggcatccagaaattaggacccattgttttattaccgttattgtacactttgattcttggtcttttaatttctattcctaagtttaagattcttactgttcaacaaatggaaaaatctgctgattatattggcatagcagttatgatccttatggtaaaagtaggtcttggtattggtccaaatctaggaattcttacaagtgcggggtgggctttgttattacaagaactaggtcatttcctaggtacgattgttttcggattaccagttgctttattcgtaaaaatggggcgtgaagctgtaggtgcttgctactctgtagatagagaaccgaatgtagctatcattatagacaaatatggatttagttcgccagaaggtcgtggcgttatggggatgtatatttgcggtgttctcattggtgcaatgtgggcttctgtattatctggaattttagcttcatctggattatttcatccattagctttggcaatgggggctggtgtcggtagtgcgagtatgatggcagcagctacagcaccaattgttgcagtatatccggagtatgaacaacaaattatggcattatcgggagcagctaatttattgaccactgttcttggtgtttattttggcttatttgtatccttaccaataatggaaaaaacgtataatttctttactggtcgtacacgtgaacaagatctagcagaggaggcagtacatcatgagtaagagtgaacaaattacacaatttattattgtcatctgtattgctgcaattattactgctgtaggtaatgtaatggatggaaagcatctttttggtgatagcttaatcggtgttgctattatggccatccttgcgactattggaggggttatttctcatttgccatatgcaaataaattacctatggtattctgggtgtctttggttggtgttattgcatctttacctattatgccaggacaagaatggattatagctaaaacaagtcaagttacatttttagctactacaacacctgtattagcctatgcaggtttatctttaggtaaagatttagcagcatttcgtcgattatcatggagaattattcctgtagcactagctgttacagcaggtacatttatatgtgctagtgctttggctcaaattatgcttcatttagaaggtttaatttaatagtgtttttagcatatagttattcatattatagtagtaaataaatatgctttgttaaaaaattatcgaccgtatgtaagtacggtcgattttaaaaggagatgttctttttatgacaaaggaagaagtaaaacaacgtgtttgtaaagctattgttgatgcacaatcgcgtttacgagaactagctgaatctattatggctgaacctgagttgggttttaaagaggtaaaaacttctaaaaaggttcaagatatgtttgatgaacttggcatttcttacactactggtcatgcaatgacaggtgtaaagggtagaatgaaaggccgagatagtaaatatacggttgccatggttggggaattagatgccattctatgtccacgccatcctcgtgccgatgatttaacaggtgctgctcattgctgtggacataatgtacaaattacgaatatgtttgccgtagctatgggtttacaagcggtgatggacgaattagctggcgatgttgtattatttgctgttcctgcagaggaaatgattgaaattgattaccgcaataaattgcgtgagcaaggaaaactcaagtatatgggtggtaagcaacaactcatctatgaaggtgctttcgatgatatcgatatggccatgcaaatgcatgtggagacagccaaaacaccagctggtgaaatggggcttggtagtacctctaatggttttgtatctaaactgattgaatatcacggtaaggtagcccatgcggcgcaagcacctcatgaaggtataaatgcgcttaatgctgccttgatgggggttatgggggttaactccattcgtgaaaccttcaaagaaagcgattattttagattccatcccatcattaatcaaggtggcacattggtaaactgtgtgccggattatgtccaagttgaaagctacgtgcgtgcctctaatattgaagctattgtagatggcaaccatcgtgtaaaccgggccttaaaagccggtggcgatgcagtaggggccacatgtgttatcaaggacctacctggttatttaccgatgcgtaatgatgaacgtatgaatgctctattacgtgaaaattcaaatcctatttttggtgaagccaatgtataccaaggtccacatattacagctagtacagacatgggggacgtatctcacttgatgccggtcatccatccatgggttggctgtatcagtggtgtactacacagcgcagaatacgaaatctctgtacctgatgtagcgtacattaaaacagcacaagccttggctatgacaatcgtagacctactatacgatgatgcagcaggcgctaaagatgtattagataactttacaccagcattaaacaaagaaacttatattgaactcttagatcgcattgctaagggcgaataaaataaaccacctatcaaagatgaattgattatctttggtaggtggtttacaattttattaaatgatttaaaaataattactaattgttgattaatagaaagtatgtctttattttttatttcattcatatgttttagtattattggaatagttcttttttattataagtaatgaagaaagtgaaaataatgaaacgattatttttttatgtatttgcattatttaatttaatttcgcttatatatgctgtggcttatgattatatgactggtgccgaaatccactatgatttctatggagcattctttgtttgttggttaatattctttggtatattgaaagcaattttaggtatataaatagtgttaattaataattagatgttttatcgaatgatacagctagcgttttatgtgatctttttgattttattattctctattatgggaaaaataatatatgactatattaaaggtggtaagctaaaatataaagcctatggtattcctttcgtaagttgtcttattataaataaatccttaaggagaaagaagaagaatggaaaaacaaatggcagctatattttctctcttaagttttaactatcttatgattaaatgttgggggagatggaaagtaactcttttagcattaattggcaactatttccttatatgtattttaataaaatcatattttagtttacctaaatttattgaggacttcaatgtaatttttgtattcgtaatatgtgttttcggtgcttataatttatggtgtaaaaataaagttgaaacactaacttattatgaaaaaagaggatgggttttgacccgtattttttcattattatttatcttagctctattactattagctttaatttttatatttatagagtatatttatgggatatatatttagtttaatgatatattgagttctaatttggagatttagcagtagatatttttgaataaatagctagtccggaaaaaattcattttcctaaagaattttatataggagatataagtttatgaaggagaatattgctttatttttagcaatcttatatctaatttatagatataagacttataaaaacgttaataaaataatagaagacagaatagaaaatgttcataggccattttttaaacgaatacaggatgttttgcagtgctctaaagaagatgcggagaaggtaggtttagcattagataaatattttgtaccattaaaaagtaaattctataaaattgataataatacctactcatttgttgatgagggcggttttaaaggttcattctcaatagatcaaaattataatttattaacattagagtataatggtgtagatttattggctttacattaaattagtaataaagagttactcaatagacagatatatttaatattcatttacatgaattacttatatatagcatgattggactcttctttgatttgtttgatttctttaagtgaaattattttttatataaggaaattattaaaatggctgttataaaaaaatattttttctatgcatttgcattattttcattaccttccatcatatatgggatgtcttatgattttatgactggtgtcgaaatccactatgatttttatggtgcaggttttgttgcttggctagtattttttggtatattgaaagaaattttgggattgtgagaatgctcttaaatttaataaatcataatctgtccagttgaaaatcggagaagaaactagaatagatgtttattctgattcctaaggtggaggtctttaatatcaatcgtgtctgaaaacggtaatactatatttaattacattaataatatagctaatgcaatttgtactaattggaataaattgtatttccatgcggaaattgataaagattatggtaacactagaatatgtttatatattgtaaatggtaatgaactaattaatgcttatcaatttctgaaaaattctgataatgttagacacctagaaacatattgggatgaaatactacatttaatattcgcattgtcaaaggatgaagtaaacaaagattatttatggaatattatgaatgttattgttgatgattctttaggcattaaaatatcatttcagtatggtaattttaatcagaaatatgatttagaagaggttttaaaatgggaatatctaactttaggacttaacaataatctttggattcttgatgataaagaaagaaatgaattattgaaacaaccactagggaatccttttgtaaatagaaaataaggaatgatatgaaaaacgttttgaaaaacatatttagaaaaactaaaaaagaaatagatagttcggaattagataatactgcacaagagaatcttttagacaaggaatcactggatgtagatatggaagcctggcatatacatacaaatgatttaattaaacaaagtgcaactgtactatatcaaatgattgatagtgaggattggaatgttatgtttttacatggagttcctaccgaagagtctgttgattgtagattttattatatcaatttagaaggcacagcttactctggtcaacttttatcaaatccaggaattaatttggataattatatcgaaggtaccatgcatatggctcaacgtattcgtgcattatatatgcactttaaatctgctaaaatgcaaacaccatcttctataacaattactgttactaatgaggggaaggtagaagttaattttggttatgatgaaggtatatcagatacggattcttattttgaagcgtatgagatgaataaatttactcacttaattaagtaaataagaatgactttatgtttctaatatgatgatttaggtgactatgtatacttgttagaatttggattaattttttagtgtaaaaagcgttagataaaataaatgataagtgaagagatacaactaataaaacaaaatatatatgatttacttcataatacacgaataaataagaaggcctaccttattatattgattggtttattctttacctattttgttagtaatggaattataaacactttgtctatccaattaatagagatgtattatttacgttatatctttaaactaatgggtgtatgtttagttatagagttaagtagacgtagattacatgattttggattatcaggaaaatggatatacttatggttaataataagttgtagtatatatggatattatatgtatgatttatatgcagttgatggattaagtatagctttttttgaagaaatcttacttatagaattaggtgttatttttataccaacaatgtttttatacttactcccaagtaatcatggtaataatcgatatgggaatagtacagttcaattgatttcaccaacgaaatctgttggttatctaaataacaagataactctagagaataaaaatggattattagagtatatgagggatatttatataagtcagtcattttgttttaaaggcagagctaaaagagtagaggcttattttggtataggatcatttggtatgattattagcttaatcgtaaattttatctcaatactttttatgattaaagacgagacaggaatagaaatacttacacctatatcaataggtatattttatgtcttatatttttatgctattctatcaattttgacattatgtattcgtagattacacgatagtttatatagtggtatttggatcatattattattggttccatatttaaatatttttattatatacagaatatttgtaaaaagtagttgggatataaatagtttaagggatataagctaattgttattgcccatctgtatatgatatttgctaagagtaaagcataatgatattcagatagtaattacttgttttcactaatatttaaaaatagtaataaatggatttactatttattttctttattcactatattgctatttttaatggctatcttattctcagtgtaattttatattaagtaaattatagtataagattatacattcatgattggaatcttattaaatgaatgtatataaacagaaacgtaatttcataagtctgattaggtatagattatggtgttctttatttatgatagttgcatggacattaaatgcaatagatgctatacctattgagggtattgttgcgattccagaggtaacactagtatgtactatttttattgtaatgcttttgtggcctctcattagtcatagaaaactttttgttttaatatatcgaaaatatatcaacaaaggacattctacattttatttctgtttatggttcttagtaggatggatagataaaattgtgaaaaaagatgaactcaatagttctgcatttagactttcatttgaatcctattcattatatgactatatatggctagtaatttatattctatttttgatgtggattattttctatgcggatatgaataagtgggaacgtttaataggttctggtagtgtgattcttttaattcttaaatccttatatgtaaagtaattgttttactagtttcccataattcatatctgtgttgacattcatccctttgtattgctacaatattgtgtataatatatgcgatgaagcagagtagtaaacctctctagcgagtgaggatggtggaagctcacatttggttgaaggcgctgtagagcattggcaggaacgcaggtatctgttagtaaaggccaacatagaaaaaagagggcgcaagccaaatagggtggaaccgcgggtatactcgtccctgtaacgtttttcgttacagggacttttttgtttgtaacgaaatggttgattttatgtcggttgtgtaaagtggaggcagcaatgacatttcaagagattatactaaatctacaaaagttttggagtgaacaaggttgtatcgttcaaaatccatatgacatcgaaaagggtgcaggtacaatgaaccctgctacattcttgcatgcaattggtcctgaaccatgggctgtatgttatgtagagccttctcgtcgtccagcagacggtcgctatggtgataaccctaaccgtttgttccaacatcatcaattccaagttatcgtgaaaccatctccagataatatccaagaattgtacttacaatccttggcaactcttggtattcatgcggaagatcacgatatccgtttcgtagaggataactgggaatccccaacattgggcgcttggggccttggctgggaagtatggcttgatggtatggaagtaactcagttcacatatttccaacaagttggttccatcgactgtaaaccagtgtctgtagaaattacatacggtttagaacgtttggctatgtacattcaaggcgtagaaaatgtatatgaccttaaatggaatgaaaatgttacatatggtgacgtttggcatgctaacgaagttgagcaatccgtttacaactttgaattagcagatacagatatgcttttcaaattatttgatatgtatgaagcagaagcaaaacgcgtttgtgaagcgggctatgtattaccagcttacgactatgtattgaaatgttcccacacattcaacttgcttgattcccgtggcgctatttctatcagcgaacgtactgctttcatcggccgcgttcgtgcactagctcgtatttgtgcacaacaatacctcgctaaacgcgaagaattaggattcccacttttgaaaggagataaataagatggcaaaggatttattatttgaaatcggtgcagaagaaattcctgccggctttatgccaaatatcttaggtcaattgaaacaattggcagtatctaaattctatgctgctcatcttacttttgaaacaattgaaacatttggtactcctcgccgattagcacttgttgtaaaaggtattaaggatacatctgatgaaataagagagactcacaaaggtccttccgcatctatcgcctatgatgctgatgggaatcctacaaaagcagctattggttttgctcgtggtaaaggacttgacgtatcagacctcgttgtagaagatggctatatttacgctgaaactaagacggcaggcgtacctgcaaaagatatcgtcacagatgttttgccacaattgattacaggccttaacttccctaaatccatgcattggggtaatttagatgctaagttcgtacgtcctgtacgttggcttgtagcattacttgatgaagaagtaattcctgtagaatttgctacagttaaatccggtaatgtaacacgtggtcatcgcttcttaggtgctgatgaaatcactattaagaatgcagcatcctatgtagacacattaaaagaaaactttgttatggttgatcaagatgcacgtcgtgaattgatctctaaacaattacatgatattgcagcttctaaaaatgcatctatcgtttgggatgatgatttgttagaagaaattaactatcttgttgaatggcctacagcattgtgtggtggctttgaagagtcctacttggcacttccagatgcagccatcattacaccaatgaaagatcatcaacgttatttcccattagttgaccaagatggtaaattattgccaatgttcttaacagttcgcaacggctccgatcattctattgaagtagttcaagctggtaatgaacgtgtattgcgcgcacgtcttgatgatgctaaattcttcttcaatgaagaccgcaagaaacctcttatcgaccgtcaagatggcttgacaaaaatcgtattccaagaaggtcttggcaacttggctgacaaaacagaacgtttgttaacattaggccgtgtatttagtgaagaatgtgaattacacgaagatgcacgcgtcgtattggaacgtgctactgaacttgccaaaacagatcttacgacaggtatggttacagaattcactgaattgcaaggtgtaatgggtaaagaatatgcgttacttgacggtgaatccccagaagtagcggaagctatttttgaacaatatttaccacgttttgcaggtgatgtattgcctcaaacagaagctggtaaagtgttgtccattatcgacaaaatcgataacatcgttgcaacatttagtcgtggcttgattcctacaggctcccaagatccatacgcattgcgccgtcaaacaattggtatcttgaacatcttgcttaacagcgaatggaacatttccttgcgcccaatcatcgtggaatctatgaatcttcttaatgtacctgcagataaacaagatgaattgcttggccaagtagaagaattcattacattgcgtttgaaaaatatcttccttgaccgtgaagttcctcatcatgtaatcgacttgttgttatctaacaatgaattgtctgttgctgatgctgaaggtcttgtgaaagctctcttggctaaccgcattgatgaaaatgttgaattagtacaagctttcacacgtatgtataatcttgtgaaagatgtaacatatacaagtgttgatgaaagcttattaaaagaagatgcagaacgcgccttgtatgaagcggctacaaaagcatctgaagcaagtatcgatgcatgggataaaaatgactatgacgctgttgtggcagtacctgctacattggtgcctgccatcaacaaattctttgaagatgttatggttatggacaaagatgaagctattaaagctaaccgtttacaactcgttcgtttagcttatagtgtaatggctattatcggcgatattagtgcattaaaataacatatattttatatagttaggaaattacatttgtcttaactatgtgaaactgaggaagggcaactgtggttgccttttctttatgcaggaattttggcatctatgtcgaatacataaagtatacaaagttgtaaggagatgtcattatgattacaaatgttgaattattcaatgccctccgtaatgtgacggctaagcgtgaaggttcacgttatagaatactcatggaattatatacaatcggtaagggaacgagccaacgtgtattagtggatagtttacagattcgcccagctaccgtatcggagcaactggatgtactcatacaattgggatttgtagaaaaaaccatcgatacgatggataagcggacaactgttgtgacactaaccgatgcagggaaagaagaagcacatagtttagttgaacatagggaacagcagttagctcatcggtttagacgattatcgccagaggatcgacaagatttgtatgacctattaggccgtattgattaagctatatacttgtatatagttgtggtgaaatgggtatataaatctatacaagatatagtgtgtaacctcttgcattgtacattgacttgtgataatatattactgttaatttgagacagtccgctgcctataaggtgtaggtattgaatgtctgcaaacaggaggaaacaatgaacattattaacgtactcgaacaagaacaacttcgtacagacatccctactttccgtgctggtgatacagtacgcgtacacgtaaaagtagtggaaggtagccgtgaacgtatccaagtattcgaaggcttggtaattaaacgtcaaaacggtggcgtacgtgaaactttcacagttcgtcgtattgcatctggtgtaggtgtagaacgtacattcccacttcacagcccacgcttagctaaaatcgaagttatgcgccgtggtgttgttcgtcgtgctaaattgtactacttacgtaaccttactggtaaagctgctcgtattcgcgaaaaacgctaatgttcttaaaaggctgccgttggcagccttttatttttgctaaaatatagatatacatacattcatacaagatatatagaaaggagacattatggcagattcacctatcgtacattggttccctgggcatatggcgaaagctacgcgcatgattacggagtatatcaaaaaggttgatgttgttatcgagttattagacgcgcgtattcctcgttctagtgcgaaccctgtcatcctagagttagttggtcaaaaaccgcatattgtactgttaaataaggtagatttagcagatccaaaagcaacgaaggaatggacagaattctttacgcaacaaggcattactgtattagccatcgattccaagtctggtaagggcaataaaaaattagtatctactgtagaacgtctcagtaaacctatcattaatcgttgggtagcaaaggggattcgtagccgttctatacgtactatcatcttaggcattcctaatgtagggaaatctacattgattaattccttggctggttctgcagcaacccgtacggctaacaaggcaggtcacacgcgtggtcaacaatgggttaaaatcggtaagaatatggaattgcttgatacgccaggcgtattatggcctaaattagaggaccaacgggctgccgcacgtcttgctatgacaggtgctatctctgatgatgtgtacgatttagagcacgtaattaagcaattgttaaatcatctattgacgaatacacctaatatcttgatagaacgttataaattaaaagaagaagagatgaccgatgtggatacaattcttgaaagcattggtcgtcgtcgaggctgccttgtcagcggtggtgttgtagaccttgataaggcgcgccgcattattttgcaagactatcgcaatacgaagcttggtacaattacactagaccaagttgatgaagaaccgtattatccagaagatggtgaggaactgcataatggataaggaaatattcgctaagttaaaggtagctgatattaaggccctttttgaaacggaacaagctttggaaattttaccattagcacaagaggatactcgtagttccgttcaaaaattagcagcctcctatattaaacgtcaagaaaaagagctaaaagaacaacaacgcttgatgggcatgtacgactatgaaggcatgttctatgatgaagggctatatcatgtagctggcgtcgatgaggtagggcgcggtcccattgcaggtcctgttaccgtagctgcagtcattttacctcctatgacattaattccaggccttaatgattctaaaaagcttactgaagagaaacgtgaagcattgtatgacatcatcatggaggaagctgtagcggtcagctgtatttcttacggtccagaaaaaattgatgaactcaatatttatgaggctacacgtcaagcgatgtacgaggccattcgcacccttgatgtacctgcagaggctgttgtagctgatgctatgaaattacctgatttaacgatacctgttgaatctatcatcaagggcgatagcaaaagtgctaatattgcagcagcatctatcattgcaaaggttacgcgggatcgatatatgaagagcctcgatgaagagtatcctggctatggttttggcatacataagggatattatacagaacttcataaagaggctgtggagcaacaaggtgtgacaccattgcatagaaagagcttcgaaccaattaaatccatcgttggatggcatcgagaagaaaattaaataaaatacttaatcatgaaatagaaatgaaaaatctatagagaagaggttcctattggtcacctaggtgactattaggaacctcttttctatttacattcatggtcagaccgtcttatgttgtatatataagtattcgaaagcatctatatacataaggaggtaatcatgaatacgatgaattgtgaacaaaattgtaacctattagatgcaaaagctcttggtaattggggagaagatattgctcgacagtatattgagcaacaaggattaaaaattgtaacgaccaattacaaaaccaaggtaggtgaaatcgatattatcgccaaaaatgggctgacctatcattttattgaaatcaaggcgcgtcgtggtgtcacccatggattgccacgggaggcagtttcaaaacgtaaacaaaagcatattaagcaggcagctatgtattttatacgggatttgcgggcccagaatcgaaaatggaaggaactatcctttgatgtagttgaggtatatgtacatgaggattttaaggccactgtacactatatgcctcagtgtttcatgtaggaggtccattatgtatgcaaaggtctatggtgctaccatagatggtttagatggcgtcgttgtaacagtagaggtggacatatctcaagggctacctgtctttgacattgtgggactcccaaatcaagctgtaaaagaatcgagagaacgcgtgcgggcagccattaaaaatagtggatttgattttcctatgcgtcgtattgttgttaatctagggcctgcagaggtcagaaaaagtagttccggattagatttgcccatagccataggtgtattagccgcatcaggtcaaattaggctacgcaaacctaaattaacaaaattattacaatcaactctgtttataggcgaattatccttagatggcagtctaaaaaagacacaaggcattcttagtatggctatgaaagcacttgatgacaagattcttacgatctttacaagttcggataatgtatcattgctgcacaatatagaagcaatcacatcctatggtgcacatacattggcggatattgtgaaacttgtaatacgaccggatgaatatcgtgtagacactgttgatgacgattgtaatgacgcggtcaacagcctcattgattacaaggatgtacaaggccaagaactaggaaaacgagccatggttattgctgctgcaggtgttcaccacgtgatgatgataggtccgcctggatctggtaaaactatgttggcagaacgattaccaaccattttaccacccctaagttgggaggagcggctagaaacaacacgcattcatgatgtggcagggttgctcgaaaagaataggctgattgctaaacggccttttagatgtcctcaccatacagcaaccttggcgagcatcatagggggcggtagtaatgcaaaaccgggagaaattacattagcccataaaggggtgctatttattgatgaagcaccagaatttccgcgctatgtattagatgcgttacggcaaccattagaatctcatatgattactgtgaatcggttacaaaatagttatgactatccagcagattttatatgtatactcgccgcaaatccatgtccttgtggatattatggggaccctcataaggagtgtgtttgtagctctacagaattagaaagatatcagcataaaatatctggacctatattggaccgcatagatctattcatccttgtagagagacctagttttaacgatatgttatgtatggattctgattctatgagcagtgcagatatgaaacaactcgtggagcaagggcgccagatgcaattagaacgtttccaagaccaaccctttaagtcgaatggtgccttgccacatggcgctattcgtgaactttgtaatatacgcgatgattgctggggcttgttaggagacgtatatgaacgatttcattttacagggcgtagctttgatcgattgctgaaggtgagtcgaaccattgcagatttagatggatccttatatatagaaaacgaacatatttcagaagcgatgatgtatcggcacattccatatcatgtgtcgaggataggagttcatgatggagcaacagtatgaaagtaatttttatattgccgccatgcagagtatttcttcactaggagcggcaacgatacgtgatttagtcgaaaagtttggagatccttataaggcatggtgtgctttacaaaatcgtaagaacctaacgacaatactaggcattccgtccacaaaatataggcaaatcgagaaagaggcgaccgacgaacgattacggactatctataaggctcttaagaactggcatatagaatatattacgtaccttgacgtattattccctgggcatttgcaagagatatacaatccgccagccgtcatatttgtgagaggaaatatatcgttgttagatgatgaaactatgaaaattgccatggtaggagctcgaaaatgttctgattatggtcgtaatgtggcactgcggataggtaaggaactagctgcgtataatgtagccatagtcagtggtggtgcgagggggatagatagtcatagccatgaaggtgctttagcggcaaagggacaagtgatcgttgtaatgggatgcggtttagatattgtatacccaccggagaataaacggttatttgatgccgttcttaagaacaatggtttattagtatcagaatatcctcccggtacaccgccgtcaggtgtccattttcccgcaaggaatcgcattattagtgggctttcacaaatcattatcgtagtagaggccaaggcgagcagtgggtctctgataacggctgatatggccgccaatgaaggacgtgaaatctatgtggtgcctggcagtattttaagcaatgtagcggagggcaatcactggctcatgcgccaaggggctaatatattaacgaaagcacaagatataatcgaggattatgagttaaagccccgtgtagttgatacgcaagggtccgatgtgttaagctttaaggtggaatgggaggtcgtgttgagtacaattcctaccgatcaatgtattagtgtaggcgatttaatcaagaaaacacatattccattacaacgattacaaagtattttattagaccttgaaatgaaacatatgattgagaaggttcattctaagggctatattaacataatcgggagtgatgtacttgtccattaaacgatctatcgttattggggaaccgaaagaaccaaaacaagaaacaaaaaagaaaaagactacgattaataaaaaggtagcaaaagaagcattgacaccagttggtattgtacgcgacaaatcgattgttgctacatcgatgccaccagagcaacgaaaacctcgcgtatataatccggatggtaaaatccttgtcattgtggaatcaccggctaaatctaagactatcgagaaatttttaggccctaattatattgtgaaagccagtatgggccatcttcgggatttgcctaaatctcaaatgggtatcgacattgatcatgactttaccccacgatatagtaatctggtagcacgtaaaaaggtgattgacgatttggtggcccatgccgatgaaagtagcgccgtattactcgcaactgacccggaccgcgaaggggaggctatttcttggcatttagcatacattctaaacgtagataccacatctaattgtcgtattactttcaatgaaatcacgaaaactgctgttgcagaggccttagagcatccacgtaccgtagatatgaatatggtcgacgcacagcaggcccgtcgtgtactagaccgtattgtagggtataagttgagtcccctattatggaaaaaggtttgcaaaggtttgagcgctggtcgtgttcaatccgtagctgtacgtctcatttgtgaacgagaacgtgaaatacaagcttttgtacctcaagaatattggtctattgaaggacaatttaagacgaaaactaatgaagagttttccgcagaactaactcatgtaaagggcgacaaactagatattacatgtgaagcagatgcagtagcaatccaaaaggctattgcggatcatacggctactgttacatctgttaagaaaagtaaacgaagccgtaaaccagctccgcctttcaccacatctacattgcaacaagatggtgttcgtaaacttaattttggggctaaacggaccatgatgattgctcaacatttatatgaaggtttggaaatcggttcttatggtcacgttggtttaattacctatatgcgtacagactctacacgtatatccaaagatatgcaagaacaggcaagagactatattaagagaacctatggcgatgactattgccctgctaaaccgaatgtatatggtaagaaggaatcagctcaagatgcgcatgaagccattcgtcctacatctcttgaattgacacctaaaatggtagaaccatttgtaaatcgcgatgaactaaagttatatacactgatttggaatcgttttatggctagccaaatggcaccacaacaaaatgagtccactactattgaactagatattgatgatacttatacttatacctttaaggcaactggttctcgcgtgttattccctggatttagtgcagtctatgaagatagtaagaaagaagatacgccacaattaccagcgttgaagaaatctgatgtggtggaaactgtacttatcgacccagaacaacattttacgcaaccgcctgctagatattctgaagcaagccttatcaaaacattggaagaattaggcatcggtcgcccaagtacatatgcgccaattatagatactatcgttagccgtaactatgtagaaacaaataataaacaattcatacctacagaactcggctttgtagtagtagactttttagtggactattttgaaaaaatcatcaacactgggtttactgcagaacttgaagaggagctcgatgccatcgctaatggtaaggatacgtatgtgaaggtattgactgatttttacaatatatttaagcaagaattggatgatgctagcgatgtagacaaaattcaaattgcatccatggaaagtgatgaaacctgtgagctttgtggtcatcctatggtctataaattcggtcgctatggtaaattcttagcatgttctaacttcccagaatgcaagaacactaaaccgattacggttggtaccggtgttgcttgtcctaaatgcggtgaaggggaaatcgtagaacggaaatctaagcgtggtcgtatcttctatggttgtaatcgttatccacaatgcgattttacgttatgggataagccaactcatgagttctgtgatacatgtggtagcattatcgttgaaaaaacgtataaaaacggtacgacgaagaaattctgctccaatgaaacctgtccaactagaccgcctaagaaaacgagaaagaaaaagtctgatgagtcagtaaagaaagaagaggatacaaagagtgagtgaacataaagttactgttataggggctggcttagccggttctgaagcagcctggcaacttgccaatcgtggtgttactgtcgatttatatgaaatgcgtcctgtaaagagttctccagcccatcaaacggatcagtttgctgaactagtgtgtagcaattccttgcgcgctggtaatatagagaatgctgttggtctactaaaggaagaaatgcgtcgcttaggctcgttaattatggaatgtgcagatgcaacagctgtacctgctggtggtgccttagcggttgaccgtcatctattcagtgctatggtaactgataagattaaaagtcaccctaatattacagtgcatcatgaagaggtaacatctattccttcagaaggaacggttatctttgcttctggtccattaacatctgaaacactaggcgatgccattagagaattaaccggcaatacgggattttatttctatgatgcagcagctccgattgtgaccgcagagtctcttaactatgataaggtatttgctgcgtctcgctacgataaaggcgatgcggactatcttaattgccctatgaatgaagaagagtataaacacttctggcacgaattgacccatgctgaagccgtacagcctaaggattttgaaaaggaaatctattttgaaggttgtatgcctgtggaaatcatggcatctcgtggagaggatacattgcgttatggtccattgaaaccagtaggcttagtggataagcgtaccaatgaagaatcctatgcggtagtgcaattgcgtaaggaaaataaagagggcactatgtttaacctcgtagggttccaaactcatttaaaatggggtgaacaaaaacgcgtatttggtttaattcctggccttgaaaatgcagaatttattcggtatggtgtgatgcatcgtaatacgtatatcaattctccagaattgctcaatcatgcattccaattacagtctgatcatcgactattctttgctggtcaaatgacaggtgtagaagggtatcttgaatcagccgcatcagggcttatggtagggttacaggtaaaacgataccttgatgataatgcatttatcaacttccctaaaacgacggctatcggatcattgagccactatatatcttcctatgaaggatctaatttccaacctatgaatgttaattttggcattatggaatcatggcctcaacggattcgtaagaaaaaagagaaaaatgctctcattgccaatcgtgcattagaagaacttgacgcattaaaggcacaagaacaactgtaaatgatgcttgtcgctcatagtctatcgttagaataattgaatagatattaaaaatccttcattcatggatgttgtgtatccgtgaatgaaggattttgttatttacgtttcttttgtttttgtggtgcttctggtactgtttcagccacatcttgttgctttttatctagataaccaaagtagataaataaacagatacctacaatcataacaatgaggctcgtcatctgtgctgatttaagtcccattgtgaggtttacataatcaccgcgtaagaattctaagcagaatcgcgctgcggaatacaagatagcgtatagaacgaacacttgtcctttagcatgtttgaatgagctaaagagtagtaagatcacgaagattagaatatcgatttggccttcccaaatttcagctggccataatggctgattaccataggtgcggtatgcaagggtgctttcaggatagagaatgccaaaatttccacccgtaggatgaccaaaggcatcgccgttaaacaggttagccatacgcccaaccgattgagctaaaatgagggctggcgcaaaaatatcggcaaaggcccagaaatcgatattatgttttcttagataccaataaccggctaatgtaccgagtacaacgcctccttgaatggccatgccgccttgccatacgaaaggaatttcgaggagatgattgccatagtaatgccaatcgaagaaaaatacatcccataagcgggcgccgataagacctgctatagcgactgtaatggagaaatcaacaatgtgctcgtgccacccacgaccgtcttttttgagtaagaaataggctacagaggcaccgctaatgatggctagtgctaacatgacaccgtaggctctaatcgggaaatcacctatgaaaaatagatattgatgcatatgaactcctttatgaataaacgttcatgcttttataagcatagaaattataagtgtcgatatatgtatgatataatataagaattgttatgtaaacaaaagctagtcagcataaattataggagacatacatgttacgtaaatttgctatggtcactaccttggcagctgctgtattatctagtatttctggtaatactgtacaggctgaagtgttggtgccattacaacaatatttaaatacgaccaaccgtaattatgaggccaatcaatataagacatcttatacaatctatgtaccacagctagaactgaatggtacaaccattacgatgaatcctaaagccgttggagagcccgttaaattgccgattaccaaacgggatggtgccgagtatgttgatgtagaaaatgcaacaccgttgataggtgtcacctatacgaaggatggtgatcacgttcaattgaccgctgcgccagagacgatgcaagtattgcaaaataaacctgtccaaggacctctatcttgggcctttgacccatggcctaaccaagatgcgccgtatgcgaaaaaattgaatgtcagcggagataacatcatctctccaagttggttcaaattgcatagccttggcttagaatctagtcctaatattaatgtggattatgtgaacgcatacaaggccaacggatatcatgtgtggccgcttattacaaatcgttttgatccagattttacgagtggtatcttagccgatgaagcagtgtggaagaaatacgctcaaaatctcattcaatacgcttatatttatggatttgatggatataattttgactttgaaaatgtagactattctgaccgtgataaattgacaagattcgtagcatacttagctgacgaattacataagtataatattcaatcctctgtagatgtaacgggatattctaatagtccaaattggtctcttgtatatgaccgtaagtccttcgctaatagtgtagattatgtcgtattaatggcttatgacgaaacatgggccaagagtactacggcaggaccggttgcaagttatccttgggtacgcgatcatgctgagaagatgttgcaagaggtaccaagtcataagcttgttcttggcattccattctacactagaatttggcatgaatcaggcggtgtggcacggggtgaaacattggccattaaaaatgaatcatcttatttcacaaatcacgcatcaaatattatttggaatgatacgttaaaatcttattatgcagctattccaacaactagtggtaccgataagatttggtttgaagataataaatccttaggatataaattaaacctagtgaaagaattacaattggccggctttgctgcatggcgtaaaggctttgaagatgatactacgattacaatgattcaaggcgttgatttaggtaaaggtacacctaacacagcaccagttgttgaagctcctaagcctgttgttgaaaaaccattaacaaaggctgaacgtaaggctcttgaaaaagcagcaaaagaaaaggcgaaaacagaagctaaagcagctaaggagaaggcaaaagcagaagctaaagctgcaaaagaaaaggcgaaagccgaagctaaagcatctaaagaacgtacaaaagcgaatgctaagactgtgaatgaaaagcaaaaggttgataatgatatagcgtctatcgttcccgctgttcaagtagtaaaaaagcagataaattgacggtttatggtacgaagtagtacaataatactattaattagaatcacaaacagatttgaggaggcacctacatgaacgaaaaatatgtagcccaagatattgagaaaaagtggcaaaagtactgggatgagaaccatacttttaaaactgaatatgacgaaagtaaagagaaatactatgcattagaaatgttcccatatccatctggcaatttgcatatgggtcatgtgcgcaactattccatcggcgacgtagtagcgcgttttaagaaaatgaatggttttaatgtattgcatccaatgggctgggattcctttggtatgcctgcagaaaatgcagctattaaacatggtattgcacctaaaacatggactcttgataatattgagaatatgaaaaagcaacaaaaagcattgggcctttcctatgattgggaccgtgaagttgctacatgtaaagaagattactataaatggacacaatggttcttcgaacaattctataaaaaaggtttagcttataaaaaagaagcaaaggttaactggtgtgaaacatgccacactgtattagctaacgaacaagttattgatggtctttgctggcgttgtgataatcctgtagagaaaaaagatttatctcaatggttcctccgtatcactgaatatgcagatcgcttgttagatgatctcgatacactcgatggttggcctcaacgcgttaaattgatgcaaaagaattggatcggtcgctctgaaggtacagaattctcttttgatgttccctccattaacgaacgtatttccgtatatacgactcgtgtagatacaatctacggcgtaagttacgttgtattggctcctgaacatccatatgtagaacgtttaattgaaaatgcacctaacaaaactgatttagatgcttttatcacgcgtatgcgcaacatgagcgatatcgatcgcacgtctacagaagcacctaaggaaggcatgtttaccggttcctatgcggtaaatcctatgtctggtgaacaagtgcctatttggattgctaactatgttctcgtagattatggtactggtgccgttatgggttctcctgctcatgacgaacgggactgggaatttgctcataaatacgatttgcctattaaacctgttgtttctcacaatggtgaaaactacaatttcgatacatgggaagaatctgaccacgaagatggcgtgttgattaattctggtgaatttgatggtcaaacatctgaagaggctcgtaaaaatattacggctgcacttcatgaacgcggtatcggtgaaggtaaaactaatttccgccttcgcgattggcttatctctcgtcaacgttattggggcgtgccaattcctgttgtatattgcgaaaaatgtggtgaacaactcgtaccagaagaagaattgcctgtacgtcttcctgaagatgttaaatttgaatccggtgcagtatccccattggcaacatccgaagctttcatgaacgctaaatgccctaaatgtggtggccctgcgcgtcgtgaaacagatactatggatacattcatcgattcctcttggtacttcttgcgttacactgacgcattgaacgataaagcaccattcgattccaaaattgctaattattggatgaacgttgaccaatacatcggtggtattgaacatgctatcttgcacttgttatactctcgtttctttgtgaaagttatccatgatttaggacttatcgaagctaacgaaccattccgcggccttttgacacaaggtatggtacttaaagaaggcagcaagatgtctaaatctaaaggcaatgtggtttctccagaagaaatcatcaataagtacggtgctgatacagcgcgcttattcatcttgtttgcagcaccagttgatcgcgatcttgattggagtgaccaaggtgttgaaggttcctatcgtttcttaggtcgcgtatggcgtattgttgatgcgtatgaccaagcagcaaaagaaaatcatacgggtgaccttacaaaagatgaagtggcattacgccgtgaattacaccgtgttatcaaaaaggttacagaagatttagataataacttcaactttaatacggcaattagtgcgattatggaacttgttaatgccatgtatgcacacaaggacaaagcagaatccgtaaatgctgatcttgctaatgagttaacacataatctcgtgttgttattagctccattcgtgccacatattacagaagaattgtggcatgaacttggcgaaactgattctgttcatactatgaactggccaacatacgaagaatctgctcttaaagtagacgaagtagaagtggttcttcaagttaatggtaaggttcgcgataaattaactgtttctgtgaatattacgaaagaagaattggaagcattggctaaagaatctagccgtgtccaagaatttacagaaggtaaacaaatcgttaaagttatctacgtaccaggtaaacttgtgaatatcgttgtaaaataatatttctatatatgatttgttaatataatgaaagcccccaactacataggtagaagggggctttattgtctagagaggttattatggcaaaacgtagcgattatatttcttgggatgaatactttatgggcgttgctattttggctgcgcaacgatctaaagatcctaatacacaagtgggggcctgtatcgtcagcaatgataataaaatcttatccatcggttataatggcatgcccttaaattgtagtgatgatgatttcacatgggaacgtgatacggcagatgataataaatatttctataccgttcatagtgaattaaatgcgattctaaactatcgcggtggctctttagaagggtctaagatttatgtaacattattcccttgtaatgaatgtgcaaaggctatcatccaaagcggcataaaggccgttatctatcgtgatgatttatacaaggatactaaagaggttaaggcttcaaaacgtatgctaaagacggccggtgtagatattattgaatatcaatcgacgggccgcgtattggaaataacactataataatgaatgggatagcacatcctccgcaagctccaccggccgggtctgactccagccttcggcctccgcagggccaaagtcgcttcgtaggacatgctatcccattttatttaagctgttataccaataagcggccgtcgatcatgatgtctacttgttggccgtcttttgtaatgcctttaatattcattttttcgtgaccaatcataaagtccacatgagcgagggagtggttgagaccacgttctttgagttcctcttcagataaaccatcgctattttttagacaggttggataggctgcaccgattgctaaatggcaggatgcattttcatcaaataatgtttcatagtaaattctattggattggctaatagggctatagtggtccacgagggctacttcaccaagatattgagatccttcgtctgtttcgatgagttctttaagaatatctaacccttcttcagctgtgtaatcaataactttaccgttttcaaaggtaaaggaaaagttagaaattggattgccttggtagataagtggttttgtactaactactttaccatttacaccattccattgaggggcacagaatacttcttctgtaggaatattagcattgaatttgataccctctttggagaactcttctccaccttgccaaatatggtcttctggtaattcgaggagtaaatctgtgccattttcacaggtgtatcgcaatgcttttaaatcaagagcgtttaatgcttcgcgacgatgacgtagcttagccatatgatgcgcatatgtttcttttggttctacgtcgttgagacggcataattttaataatgtaagccatagttgatcaattttttcttcatcagatccttcgtagccaagaagttcagcccaaagtactgttggtacagcggctacacaccatgttacggatgagttcatgatggctgtatggtagaatgacagaaccttgttaagattgcgtgagtttaggctaatgcgctctgtagggatacctgctaacgcctttggattggcactgataagtgataaaaaggcagctttttcttctacatattgttcgtaatatacaggaatccatttagccggtgtttctagaaccgatgcatcagcatgtaataagcgttgtcgtgtaattggggtatggcgccaattgatgataacctctttggcacctaattgataggcttcttccgtaacgatgactgcaaaatctttattgtctacatcaacagatacgatgagtgtttgcttttcttgtaaattaacgccagactgcaataaagtacgggcgtatttacgtaataattcttgattcattatagactccttaacatagtaataggatatactaggaaagtatgttcctttaattcgatatcattttgaaaactcctgcttatgtgactaatagagtcacatgtaggagttctttgttgcatatggaaactctagtagtaggaggtgaccatatgaaacaacttattatgtcacataagtggattgtaataatcctgtgtattttagtaggaatttatttcctatggcctattataacagaaggaagccccataatgccagattcatctgtattagccgctgatacgacaaaggggactccaactgaacaacaggataatacgcccctttctatgaatggtgatataaatcaaagagaatcacaacaggaggatggtaaggatagtattgtgtatataaccggcgctattcaatcgccaggactgtataaggtgtcatctagctcgacaattggcgatgttataaaaggggctggaggtgcactaccatatggagatatagagtccatcaatttagcagagactgtgacaggtggacaacatattcacatcaaatttaactttcacggaaatcctgaatcattactacgaaatcaaaagattaatattaacacggctaccgttaaagaactcgattcactacctggaattgggccaaccatggcaaaacgtattgaagagtatcgtcaaagtaagggcgcttttacatctatagaggatattaagcacgtcaaaggtatcggcgatggattatttaagaagatacgcgataaaattacagtctaatttaactatctatttgaccttgaatatgctcatcacctattcggagatagcccattgtatactaagtggtatcatactaggcattttatgtgcctatagctcgcattatgttttgctcgatacgagttggtattgtatgtttggcgctgctggctatctactatatacattggttaaagctgtggctcgctataggttacaatcgtctttgtcaattaaatatatagttgtaacctgcatcatctcatgtgtattaggtggcgtatcatttgtacatgtaaaccatcaaattaatcagtatgtaggacatagtaaattctttttatcacaagaaggcgaatatgcactactcattgattctccggtagatctaaaagtaatcgatggaaaagaatataaatcatttagtgcagtactgttagggttagtgccatacaaggatacggcaaaaggcgtgcatattaaggccgatggacatattagagtaacaatacaagaaaatcctacacatcttcatatgggggattccattatcgttcatggtacgcctaaatctctctatttgacagaagagcgaggcactattgataagcgaaataaggcaattcgtaatgaagatatgggcgccatatttgatggtacctataaggtagtggacttacatactcttaaacagtataagatagattcttatatcggttattatcaacggtgccttcacataattgattcgatgcgtagtgctgttgaagtattgatggaacgttatctatcagatacaactaaatggcttggaattgccttagttttaggtggccactatggagaattaggtcaagatgtgctgcgtcaatttggctacaccggtatcattcatattttatctatatcggggtcccatattgcactgttattttctattgtatatggcctatgtagattaggtcgtattagaaaacgatatgctatgatgggtggtattataatatctatcttttattgtatagtggttggctttagtgcacctgttgtgcgttctaccataatgggaatttggcttgctttagcctatttaaaaggtcgaatgtatacggcgaaacaaggattggccgtgacggctatactatttttattatatgatccgttacttatattggacgtgagctttcagctatcctttggtgccacttatggactcttattatttggtatgccattatatcgatggatcacagtattgccaccgattgtgaaagctccactagtgctctgcatcagtgcacagcttttattgataccatttcaactttattattttcactatttgagtttagcaagtctctttgcagctattattattacacctttacttgatatagctattgttatgttatttggttgtaccataatatccttaattataccaataggtatggtgtggaacgtaatcgactgggtattaactatatgtttatatgcaaatgcgcacctcgctaacagttctatatgtctatggtggataggtaccatttcttccacattaggggtgttatactatggatgtatgggattactatatattaacctagtctcattaaagcttagatttagaactttcacaaaaggaattgtacttatgggaatcggcataattgctatagcttatagtggtattttatataggaatgaaacgattttgcatattgtacctatgaaacagtcaaatgcattcctcattgttaagccttatgaaaaaatggctatggtatatattgatacgcctgatgctattcctatgaaagctagtgaaattcgtgtaagaaatggacttcaaagctttggtataccattgaaaaatgtgcaggtcaaacgatttcaatccacaggtaaaaatactgttttatacaaaaataatatatcgtctgtgatggtctataatagacaaaatggtgaaaaaaaactacaattaaatgatatgaggaacactattttgattacctctcagtcgtatatggtgaatcaaattatagcattacattcgaatcgtcctgtgcttgttagcatgcctcgaggcgcgatgcgagacattgatcccgatgcagaacatgttcatttatggggctatcaatatattccggattatcgattatgaaaggaggactggcgatgaatcaagtatatctaatctatggtaatgaaccacaactcatagaagaagagaaacaaaagtttttcttatctcataaaaatctagatgtgtgcgtattgcatgatgaagcaggtccttccaaaatatcagaacaattgatggaggattccttatttggcgatgccaaggtattttgtcttatcaatttacctatcttgaaaaaagcaggccaaaaagagagtcaagaatgggatgcactggccgagttactgatgaattataccggtgataatccagtacttattatctatcacgatatggtggataaacgattaaaacaaaataaaaagatattagaatctattcctaataaggaatgtaagcgattagaaggtgacgatttattgatgtggattcgtcagtattgcacctctaatggatatacgctgacgcctgatgggcacgactatctatctcatctattggagttatggcaagatgtgccggttgcgtttatgcgtaccgagtttgatcgatattttctgttattagggaatcataagaaaatagataaatcctttttaatggaacatagcagtaattatggagctaaaaatatctttacctttaaagaagctttattaaaacaagatgtgaataccttattagaattatttccgtttatgtttagctataaagaaatcgatcgtgctatgggctatatcgaagggcaattgcggctccaattattggtaagcgaatgtcgtgctgcaggtatgacagctaaacaggtagaaaatttttgtaaagaaaatggggcctcttataagccgtaccctataaaactggcctatgaagcaagttctcgtatttctataaaggctttaaaagcactcttaaaaggattatatgaggtaatattagatagtcgcacaagcaaaggggatatgtggcgatttagggatttatgtttgacctattgtgggtataagggataaaaatgaaagtacgttatcgagtagtaccaaaacagaatagtaaacctgctttctatgtgaattgtgatgataaacaggtaaccatacaagcagcagattcagcatttaaaacattagtgtcattacaagaacgattagctgcttggtacaaagaaaaaaatatttcctttgatacgattcctaccaatgcaactacatcttgctgctttgcgtggaaggtagatgacgataatgaagaatttgcaccatactactatgccggtggttgtggtgtaggtgaatttattgaagacgttgaagcgcatcgtcagaaattagaggaagaaaacatgccagagagaggaaagtcctttgctggcaataacgatgatgaaattgattatgcagatgagtttgtgccatttatggatgcggtggaattggactattttaatccagaccccatatcgtatgagtctgtaactacaagaaatccatctgtatctagtagctcatcatctacatcttcagctaatagcggacatcaacacaaaggtggtaagaaatatccacaacgcgcgcctaaggatgcaccaactgatgagggcatgattttaggtccacgcattgagggcacgacctccagtatcatgggcaccgtagaaacaccaagtgtcatttttgaaggtgtgttcgttggccttgataaacgcgatactaggactggtaaaagtatcgtaaatggcagtatcgtagatgatacgaacagtatgaagtttatcaaatttacgaatagtccagaagaaggggatgccttattaaaacaattaaagaaattgcaaaaggtgcgcgttcaaggtagtgtcaactttgatgatcgatttgataaggactatattttatctatacgtagtatcgaagctatcgaagaagataatataaatgaacggacagaggacagaccagattctcgtgttgagcttcatctccatactaagatgagtgataaagatgcactcgtatcgattaaggatttatttaaaactgtcaaaaaatggggccatcctgcggttgctattacggaccatggtgttgtacaagcctttcccgaagcacaagcacttggtaaagaactaggtgttaaggtaatttatggcgttgaaggatatctcgttgatgatgcggatttagaaaaggaattatccttagacgttgtaaaacgaaaagatgaagcgcctcgatatcacattattttgttagctcaaaacatggtgggcttacgtaatctgtataaaatgatttccatatcccatttggaatactataaacggagacctcgtttacctcgttctatcattgaagagcatcgtgaaggtattcttatagggtctgcctgtgaagcaggtgaattgatgcaggctattgttaaaggttcctccaaagaagagctattaacgattgcatccttctatgattatcttgaaattcaaccacataccaacaatacattcttaattcgcaagggtatcgttccagatgaacaagctcttatcgatatgaataagacggttattgaattgggcgaagcccttaataaacgcgtatgtgctacctgtgacgttcattatttaacaccagaagaaaagatttatcgtgagattatgttaaccgcttgtgggttccctgatgcggatgaacaaccagatttacatttgcgtactactgatgaaatgttagcttcattcccatatttgagtgaagaaaaggcctatgaggttgttgttgcgaatacacgggccatcaacgatagtattgaagacattaaaccagtgccagatggcacatattcacctaaaatcgaaggggccgatgaagctttcacagaaatgtgttatgtaaatgcgaagaagatttatggtgatccattgcctcgtgttgtacaagaacgcctagattatgagctcgactgtatcatcagcaatggttatggcgtgttgtactatatcgctcataagctggtaaaaaaatcgctagatgatggctatctcgtaggttctcgtggttctgtaggttcgtcctttgcagcgaccatgtcggagattacagaggttaatccattgccaccgcattatatttgccctgaatgtaagtggtcggaattttatgaaaatggtgaatacgccggtggattcgatttaccgcgtcgtgactgtcctaattgcggtcatccattacaaacgaatggtcatgacattccatttgctatctttcttggtttcgaaggcgataaggttccagatattgatttgaacttctctggtgactaccaagcgaaggcccataagtacacggaagaactgttcggccgtgataatgtatttaaggccggtactattggtaccattgcagataagactgcatttgggtatgtaaagaaatatgcagagctaagaaatattcaggctcgcagtggattccttgagcacctcgcaaaaggttttacaaatgtaaaaaatacaacaggccaacatccgggtggcatcatggtttgtcctcgtgatatggatgtgcaccattttacgccgattcagcatccggccaataaaaaagagagtggcgtattaacgactcactttgattatcactctattgaagggcgtatgacaaaactcgatattctgggccatgatgatccaacgattattcgtatgttggaggatttgaccggtattgatgcgaagacgattccttttgatgatccgagaacgctaagcctattctcatcaacagagggtatcggattgacgcctgaacaattgcaaggggaccaagtagctagccttgccgtaccggagtgtggcacgaaatttgtacggggcatgctagaagattcacggccacaaaccttctctgatcttgttcgtatttctggtttctcccacggtacgaatgtatggctcgataatgcacaggaactcattaaaaatggtacttgtaaattgaatgaagccatttctactcgtgatgacgtaatgaactttttgattcatcgtggcatgaataagaaaaacagtttcttcgtcatggaaaatgttcgtaaagggaagggcatcgaaaagagaaataaacaaggccaagcgactacggagtttgaaaaagaaatgcgagaaaataatattcctgaatggtttattgagtcttgtaaaaagatttcctatctattcccacgtgcccatgccgttgcttacgttatgatggcattccgtattgcgtggtttaaggtataccatccgttagcattctatgctgcctatttctccatccgtgcaaaagcctttgatttacggatcatgacaggtgatttgaatacacaattgaaagaatttaatcgtattaaagctcttgatcgtggtgccagccctaaggaaaaggatttgatgtccgccttagaggtatctatggaaatgtatcaacgggggtatcgatttatcaacgtagatattcaacattccggtgctcgccgatttagtattaaggacggcgcactattaccaccattcttagctatcgattcacttggtgaaaccgttgctgatgcaatcgtagaagaacgagaagcaaaaccatttacatcgttaaaagacttgcaacgtcgttgtaaggtatctgctacaatcattgaaacgatgaaagaacttaaatgctgtggagatttgccagaagacgaacaaatgtcgttatttggctaattcatctgatttaattaacattaaaaggtgtcatcgtttgatgacaccttttttttgaaagttttgcaatttaattatttcggcagattttagtataaggatttatatttcatccagttagtttttgccatttctttaagttccgtaccacgtccatcaaggatggcgttgatcaagtatttactaaatccttttgcttgttggtatgcaatttttggaggcatagcaagttcttgtttatcaacacggacattgataataataggcccttcattatagtttagagcttccttgattttttcatctacttcgctagagtttgtaatgctaatacctttgataccagctgcctcagcaagtttaccaaaatcaggatttacgaagtctgtagcataatctaagtaaccagaagctttcatttccatggcgatgaaactaagttcttcgttgttaaatacgaatacttttacagggagatttaattgttttaatgacaacatttcacccatcatcattgtaaaaccgccgtctccagaaagggagataacttggcgatttggacatgcattttgagcgcctattgcatgcatcattgcattggccatggaaccatggttgtaggagccaatgatacgacgtttgccattcgttttgatatggcgtgctgtccagataacaggagtgcccacatcgaatgtaaagatggcatcatcagcagccaatttattgagacgatttacgaaatattgagggtgaattgctacaccatcttgttctgcaacagcatagctgtctaaatcattgcggaatttagtgtatgctttacgaacggtatcgatgaattctgtatcatcgcgttgtgtaagatgaggaagtagttcgtgtaaggtatcttttacagaaccaatgataccttgtgttaatggaacgcgtgcaccaagagcggatggattaatgtctacttgaattaccttagcattttcaggatagaatggacgataagggaaatcggtacctagcatgattagtgtatcgcattgctcaatagcacggtaaccggatgtataaccaagcaaacctgtcatgccgacatcataaggattatcccactcaacccattctttgcctctgaaagcatgtacaacaggggcttgtaatttagtagcaagttcaaccacttcgtcatgagcaccggcacaaccagcaccacagaaaagtgtaatgcgtttgccattggttatatgttgtaccatttcaagaatatcctctgattgaggaattacgcgtggcaatttaggcgcatgccatgtaggtaattcatcaatttctgtttccataacggccacatcaccaggtagaacgattacggctacatcgcgattgccaactgcggcattcatggcgcggaataggatttcaggcatttgctttggattagaaacgagttcacagaaacaagagcactctttaaataaattttctggatgtgtttcttggaaatagttgagaccgacttcggattgtggaatatgagaggcaatagcgagcactggtacacgattgcgatgacaatcaaatagaccattgatcaaatggagattaccagggccagagctaccagcacatacggttaatttacctgttaatagagcctctgcaccagcagcgaaggctgcagattcttcgtggcgcacatgttcaaattgaattttcccattacgacgtaaactatcgtttaccgagtttaaactatccccagtaataccataaattctttcaatacctgcgttagctaatacctctatgagtacatctgatatacgtttttttgccatattatcacctctatatgataattaatgttatttagaaatataattcattgtatactataaatagtagtaccttatgattgcatattatgtgacttttatcacaatggattgtatacatcacaaaattagttcaatttctaaaagtgctatataattgagatggatattaataagttttctcatatacaaatgtataatcttgcgaaagtatcataaaagtggtactataaacatataaattaatatgataagtctttggggataggtgaaattccttaccggcggtgatagtccgcgagctatatggcatgaatcggtgaaattccgataccgacagtagagtctggatgagaaaagacaatagcacatatattttgtatgtgtatatatgatgacccaaggactatgtatatagtccttttttattgaggtattatgatgaacgacgaattatatatgaagcgtgccatttctctagcgaaaatggcaactggacatacatcgcccaatcccttggttggtgccgtcgtagtaaaaaataatacaatagttggcgaagggtatcaccataaggctggtgaggcccatgcggaagtgcatgctttagatgcggcgggagacaatgctaggggggctaccttatatgtaactcttgagccttgtgctcattatggtaagaccccgccatgtgtaaagcgtgtcgttgaatctggtattgctcgcgttgtgattggtagtaccgatccaaatccactagtggctggtaagggcattcaaattcttactgaggcaggtatagaggtaactacagatgtatgtgtggatgaatgtattcagttgaatgaacatttctttacatttattcaaacacataaaccgtttgtaaccataaaaagtgctatgtccctagatggtaaaattgctactttcacaggtcaatctcaatggattacgaatgaaagttcccgtaaggacggacatatattgcgagcgtctcatgatgcgatgctggttggtattggtaccatcttggctgatgatccattgcttaattgtaggctcactagagatgaattatatgaagcaattatcaacagacacgatgtatcgatagataatacattagaggtgcatcagccagatattattattctggatagtcaggggcgtacgccaacggatgcaaaggtatttacgataccaaatcgtaaggttatcatttatgtagcgaaaggttgtccagaacagcgtagaattgctttggctaatgttggagcgattgtagaagaactcccaacaaaatcggtgcgtcaaggtcgtaccaccgatgtagctatagatattaagaagatagatattcaagcgtgtttggaacatcttggggaacaagaatacacatcagtgcttgttgaaggtggttccaccattatcagttcctttgttgaatcgttggcctttgataaaattgttacctatataggtaatcttgtcatagggggcgcgaatagtacagctgctgtaggtggtaccggttttgctacattacatgaggcacctacactcgaatttgctagttcgcgaatactagataataatattcgtatagaatcctatcgtttaggaagggagggctcctatgtttacaggcatcgttgaagaagttggcaaaatagtaaacgttaaaaagggtgctcaatccttattattgacgatcggtggcaatacaatttttgacgatttaaaaattggcgattctgtagcggttaatggcgtttgtttaactgccacatctattggaaatcaccaatttactgcagatgttatgccggagtcaataagtatgacgacatttaccaatttaaaggtaaatcaacccgttaatctcgaacgcgctatggctgctaatggaagatttggaggtcatatcgtggctggtcatgtggatggtacaggtcgcattatcaatatgaaacgaacagataatgccattgttttcactatttctgctccaaaatcgattatggattacgtcatttataaaggatctattacaatcgatggcattagcttaacgattatggagagaactgaatcgaccttttccgtatctatcattccacatacattaagcgaaactgtgctaggccatgcgtcgattggtacagaggtaaatttagaaacagatattacaggccgttatattcgtcattttatgacattagatgagcctacacatacaagtaagtctcaaaaatccatggaatctctattagtagagaacggatttatgtaaaaggaggagttgtctccatgaattatacattgaatacaattgaagaagttcttcaagatatgaaagttggtaaacctgttattatcgttgatgatgaaagtcgcgaaaatgaaggggatttaattatcgctgccgagtttgctactcaagaaaacattaatttctttgttaaatatgcacgtggtatcgtgtgcactccaatgagacgagaagctttagaacgtcttggcattcctgtaatggttacgaagaatacggataaccatgaaacagcgtttactgttactgtagaccatgtagatacaacaacaggtgtatccccagcagaacgggcctatacgattcaaaaactattggatcctaatgcaaaacctgctgatttccgtcgccctggtcatgttttcccattggtatataaagaaggtggcgttctcgtacgccaaggtcatacggaagcttctgtagacctttgtcgtcttgctggtttgcaagaggctgctgttatctgtgaaatcactaaagatgatggtgatatggcacgtttaccggatctaatcgaatttgctaaggaacatgacttgaaaattgcgtccgtagcagaactcatcgaatatcgtaaacaacatgaagatatgatcggattaggcgcttgttccaaattaccaacaaaatttggcgatttcaatatcttcgtatttaaaaatgatttagatcataaagagcatcttgcaatcgttaagggcgatgtacaagattgtgaagatgtacttgtacgtattcactccgaatgtttaacaggggatgtatttggttctaaacgttgcgattgtggtgaacaattagaaaatgcactacgggctatcgaaaaagagggcaaaggcgttgtagtctatatgcgtcaagaaggtcgtggtattggcttaaccaataaaattaaagcctatgcattacaagaacaaggccttgatacagtagaagcgaatgaacaattaggtttccctgcagatatgcgcgaatattctttagcggctcaaattattcgattcttaggtattaaaagtatccgtttattgacgaataatcctgaaaaacgccatggcttagaacattggggtgttgatgtacacaaacgtgtacctctcattattcctgctaacaaatttaatgcaggctatttaaaaacaaaagaagaaaaaatgggacatatgttagaagactaatttttctttcgttatatagacatttaatctaaattcataggaggctataacatgatggttcaagaaggtaatttggttggtactggtaagaaatttgccattattggttcacgtttcaatgagtttattacatctaaattaattggtggcgcagaagattgcttattgcgtcatgatgttaaacaagaagatattacagtcatttgggttcctggtgcttatgaaattcctttgattgcaaaaaaagcagctttatctggtcgttatgatgctgttatttgtgtaggtgcagttattcgtggggctactacacattatgactatgtttgtaatgaagtggcaaaaggtattgctcacgtttctttagaaaccggtatccctgttatgttcggtgtagtaacaactgaaaatattgaacaagctattgaacgtgctggtacaaaagcgggtaataaaggttacgattgcgctatgggggctattgaaatggttaatcttatcgatcaaatctaaattaacctttgaaaacactcggtatcgtatgatactgagtgttttttatatcgaaaatatgttcttttactagaaaagatacttaaacaaacatatgttcctgcataatggaaaatatacatatatcatgctatactatataggcactaaagagtgtaatacataataatttgattatatataaggaatgattgaatggattatataaaacgttttactacccgtgaaggggttcgtatgtcattagccgttacaacggatacggtagagaccgcgcgcgtacgtcatgatttatggccagtcgcaacagctgctctaggacgtgccatgacgggtgctctattattggcgggtgattttaaaaatcacgagaatgtaagtcttcgcattaaaggtgatggcccactcggtgttgtacatgtcgatgcattttctgataatactgttcgcggttatgtagatgagccacatgtggatgtgccattaaaacgtgctggaaaactcgatgtaggtgctgcagtcggccaccatggggaagtacaagttacaagattcactaaattggctcaagattatacatctactagccctattcaaagtggtgaagtagcagaggacttggcgtattacctttatacatctgaacaggtgccatctacgattagcttaggcgttctcgtagacccagattatcataccattgtatctggtggttttatcgtacaagctttacctgatgctactgatgctgcattggctatggtagaaaagaatatcaatgaattaggacctgttacagaatatttaaaagaacatcctgatggtaaaggccttgttgagaaagtgctagacggacttactgttaacgaagtctataacgaaccagtatcttttaaatgtcgttgtagtcgtgatcgatttgctggcgttcttatgacattgcgtgaagatgataagaaatccctcttagaagatgaaacaacagagctagtttgtcattactgtaatgaaaagtatcatttctctaaaaaagaactagaagatatgtttacacctaaaggaccaattcaataatagaactttttctatagattgttttatcattatatgcgaaaatataaagatagagtatttttaataggaggcaactatgagtgcaatcggtgtaattggcggaacaggtgtttatgatccgtctatatttgaaaatattcatgaagaatccttgatgactccttatggagagattgattatgttcaaggaacatataaaggtaaaactgtgatttttgtagctcgtcatggtaaagaccatacgattcctccacataaaattaattatcgtgccaatatttggggcctaaaaaagctaggcgttaaatttattatttctacgactgctgtaggttctttgaataagaattttgaacctggtcactttgttttaacagatcaatttcttgattttacaaaaaatcgcgtcactacattctatgaaggtggcgagcgtccggtagcacatttagatgtgacaaatccatattgtcctgagcttcgtcaaatcattgaatctgtaggtaaagaacaaaaattgtctattcataatggcggtacctatgtatgtacagaaggtccacgttttgaaacacctgctgagattaagatgtttcacatgcttggtggcgatacagtaggtatgacaaatgtaccagaggttaatctagcaaacgaagcggaaatggcgtacacaacaatttctatgattacgaactatgcagctggtatttctgaaaatgctcttactcacagtgaagtagttgaaatgatgggcgaaatggcatctcaattgaaagctcttattttaggtacaattgaggtgattgatatgaacgcagattatgcagctcatcatcgcatggctgagtatggtggttttaaattataagagttcgtatccattttgatatgacaatgtggagggagttctcatgaacaatattgaatggcgtgatggtacgctcattttattagatcaaacaaaattaccaactcatgtggaatatttacagtgtaccgattggcgacaagtggcggaggctataaagatgcttcgtgtccgtggagctcctgctattggtgtcgctgcagggtatggccttattttagcggctgtggaggcgaatcgtttagctgttcccttttctgaacagctatcaaccttttatgagtggagtgaagaattaaaggaaactcgaccgacggcgattaatttagcttgggctgttaatcgtattatagcgattgtgaaagccggtccgtttgcgtctatgcatgaaattatagaccgcatcacgcatgaagccattgttatccatgaagaggatgtacaacttaacacacgcatggctattaatggggctactttatttaaaggaaaacaaaatttacgaatcctaacgcattgtaatgctggtgctttagcgacaggtggccttggcactgcacttggtgtgattcgtaaactacatgaacagggacaattggaaatggtgtacgtcgatgaaacacgtccgttgttgcaaggtgcccgtttaacggcttttgaactccatgaagatggtattcctgttacattagagacagacaatatggcggcctatgcaatgcaacaaggtttaattgatgccattatagtcggtgccgatcgcatcacaacggaaggtgatgtagctaataaaattggtacttatggattagcagtgcttgcaaaattccataatattccattttatgtagctgctccatatagtacatttgattttacactcaaagatggtaaggatatccccattgaaatgcgcgctgatgatgaagtgttgacattccaaggtgtgccatctgcgcctacgggtattcatgtattaaaccctgcttttgatgtaacacctcatgaactagtaacagctattattactgaagaaggtgttttaacaccaaactatcaagagtctattgctcgcttacaatccgttgttgtcaataagtagatgtcattacggatgtatataaaacttatcatgttaacgtaagttcttttcataacctgtatattattaattgaagaatgaaggggtacatatgcaatcattaattaaagatatcaatctcgctgctgaaggccgtaaaaaaatcgattgggtttctaattttatgcctactctaaatacattaggcgatcgttttgaaaaagaacaaactttcaaaggccaaacaattgttgtttccgttcacttggaagctaaaactgcataccttgcaactgtgttaaagcgcggtggtgctgatgtcatcgttacaggttcaaaccctctttctacacaagatgatgtagctgcaggacttgttgacatgggtcttactgtatatgcttggtacgattgcacagatgaagaatattttatgttccttaacaaagcattagatcataaacctcatattatcatcgatgacggtggtgatcttgttaatttattacacacaacacgtactgatgcaaaagaacgtttgttaggtggtagtgaagaaactacaacaggtgttcatcgtttgtatgcattggaacatgctaaacaattgacattccctatgattgctgttaacgattctaactgcaaatacttattcgataaccgctatggtacaggccaatcggtatgggatggtatcatgcgtactaccaaccttacagtagcaggtaaaaacgtagtagttgctggttatggatggtgtggtaaaggcgttgcaatgcgtgctaaaggtttaggcgctcacgtatttgttacagaagttgatcctattaaagctattgaagcagtatttgatggtttcactgtattgcctatgatagaagctgctaaaattggcgatatcttctgtactgtaacaggttgtaaagatgttatcgtaaaagaacattatgaagttatgaaagataaagctgttctttgtaatgctggtcattttgattgcgaagttaatgttcacgatttagaacatgttgcagttagccatgaacgtgttcgtcaaaatattgaaggctatacaatggctgatggccgtaaactctatgtattggctgaaggtcgtcttgtaaacttagcagcaggcgatggtcatcctgctgaaattatggacttgtcttttgctatgcaagcattggctgctgaacatgtattaaacaatggtaaaaacatggaaccaaaagtgtatgtattgcctcgtgaacttgatgaagaagtagcaaaaattaaattacactccatgggctacgatttagatgcattaacacaagatcaaattgattacttaacaaaggtaaactaatataatctttaacttgcacatttaattaaccgagtctatatagactcggttatacctatacaaggaggcattatgtcagatttattaattaccaatgtagatgttcttaccgacaatggaacattaaaaaatcatgctgttgcaatagaaaatggttatattactgctatcttaaccggagaagaagcaaaatctgcacaatcaaaggaaacactagacggtaaaggtcaattggccgctccaggtctcgtcaatacacatacgcatatagcgatgggattattccgtaactatgctgatgatttagaacttatggattggcttgaaacagcgatttggccaacggaagctaaattgaatgatgatcttgttaaatggggtacacaactaggtattgcagagatgctacgttctggtacgacgacatttagcgatatgtatttttttatgaatacaacagctgatgttgtgaaagaaaccggtattcgtgctgtattgtcccgtggtctcgccggtgtttctcctacagctgatcaagcgcttgtggaaaatgcagatttattccgtacctatcatggttatgataacgaccgcatcaaggtcctattaggaccacatgcgccatatacttgtccagatgcgtatatggaaaaggttatcgctttgtctcacgaactaaattgtggcattcatatgcacttatccgaaacaaaaggggaagtggaaaatgttataaaagcgactggtaagacaccaatcgctcatatgcttgatttaggtttgttctggaatactacattagcagctcactgcgtacatgtaacagaagaagatatggctattatggttgaaaataatgtagctgtagctcataatccacaatctaacttgaaactggctagcggtattgcgcctattcctgaaatgatagaaaaagggattactgtaggtcttggtacagatggttctgcatcaaataacaatgcggatatgcttgaagaagttcgtttagcagctactttacataaagctcgtctctatgatccaaaggctattcctgcacaagcggcttggaatatggggactgtaaaaggggccaaagctcttggttataatgacctcggtaaaattgcagtaggtcaacgtgccgatatcgtgttgtatgatgtatctggtatgcattggatgcctcgatataatgatgtggcagcacttgtatactcagctaatagctctgatgcgaatacagttattgtagccggcaaggttcttatgaaaaataaagaactattgactatcgatgaagagaaattgcgtagcgaaatcggtaaggctcaagagtattttaaaaactaaaattatatacctcatataacgaaaacccactcatgatatagttcatagagtgggttttgtgttgtctagcgtaatacgaattctatttaatagctttcaccaaaaacataggcactgggatataaaattcatcctcttcgctgtatatacgaggacctacagtaggatcaatagatacagaactagcacccatcttagtgagcaattctatgtcccattgtggacgtgtaaaggaagaaatatcgagcatatgataaatggtatgacaacgttcctttagttcattactcacatgttcatgtgcatgatgtacagattgtggtaaattatgatgattgcgtgcatgttccgcatcatagtttagaattaatccgccaggacggatgacacgcaaccattcagcataggctttatctggatgtggtaaattccatgttacattacgagctacaacgatatcaaatgtattcgtatcaaaacttaaattttcagcatccataacagagaaggtagcatcagaatctaaggattgggctaattgctttgcctcttcaatcatattaggtgtgatgtcaataccatgtactgtatgacccaattcagagagaataatactgaaaaaacctggaccacaaccaatatctaaaatacgtaaagaacggtcagaatcaaaaatatgactcattaactcatcacgccaaagcttaagtttagggctttctaattctttagctcgtaaagagccaaaatcacgagcacggtcactccaataggaggtaataaactttttatcatccttcataggatgatttttttcaaatatatcattcattttttctgttctcctcatttttaatacacttaatagtaccataaaatgagaaagtgccatactataaatatcacacttactccataaataattaattttgagtatgatataatacatctatatttttgttttatgaaaggacaggacaatgattttacagacgggacagcgtacggatattcctgccttttatgggcaatggttaattaatcgcgtccgccaaggatttgtagatgtacgcaatccctataatccgatacagataacacgatatcctatcaatcatgaggttgtagatggtattgcgttttgtacaaagaatccgttgccgttcattccgctcttacatgaaataaatgattatagacagtattggcatatgactataactccatatggaacagatatagagactaatgtaccacaagtggatttagtaatagacggatttaaacacatatctacaaaacgtaatcctcagtccatggtgtggcgttatgatcctattattttaactcacaattatacagttgattttcattttgaaagcttttataaaatggctaagtctctagaaggctacacagatactgtagttgtcagttttatagatatatttgataaggtagctcataattttcctgaaggctatagaccgagtttagatattcaaaagaagatcattaaagaattagtatctatagcgcattctcatcatatgatactcaaaacctgtggagaaggggacgttttcaaagaattaggtgttaatacggagggctgtcttacgctagactgttatgaacgtgcttggaacgtaaaattaaaagcaccgaaacgcacaccagctagacctgagtgtaattgttatttacatggtgatataggtgcttatgatacttgtagccatttttgtcgctattgttatgctaataggaatcaggctgcagttcatcaaaatcgcttattacatgatccgaactctagcttgcttattggtacactttcaaaaacagcaattattaaagagagtgcggaaaaaagctggatagtagatacaaattacacacaagattctttattttaaggcgaattatgacctgcttttacgcctatagcgttgacgtatcgtgtaaaatatagacaaaaggggttgggtcacctcaagaatataagagagttaaactacttttaattgtttatgtattattacaaggaggtggagtatgatcacctataagactgacagtaaagattcattacaatcatctgaatcgtctatgccagtactagctatgtgttatgattttgataagaccttaacacctgatgatatgcaggcacaaggctttatccaatctgttggctatgatgaagagcaaatcaaacagttctggcaagaatctaatcaactggctaagaaaaatgatatggataataacttggcttatatgtacaagatgattcaagaagcagtgggccgtttttatgtaactcgagaaaagcttatggaatatggcaatcaagtggaactatatgaaggtgttcgcacttggtttgaacgtattcgtgaatatggtttagaacacggtgtacgcattgaacattacatcatatcttctggtttaaaagagatgattgaaggtactgaaatggcaaaaaatggggctttcaaaaaaatctatgccagcgcatttatgtttgatgataaaggcgtggccgtctggcctgcacaagctatcaattacacgaataaaacccagttcttattccgtatacaaaaaggcgtgttagatataaatgatcccggtgtaaacgattatatccgtcctgaagaacaacgtgtaccgttccgcaacatgatttatataggtgatagtgatacagatattccttgcatgagtcttgttaatatcaatggtggacattcaattggtgtatacgacccagatagcaagaataaagataaagtatataaaatgatgcaacatcatcgcattcgttattacgcaccagcagattatacagatggttctgatttagatactgtggttaaacaaatcattcagaaaacagcggcttatgaagcgttagaacaacaatatgtacgtaataagcatgaagcagaatcacatagataggagttgctataatgaatacacaggatatatcaaaggaatggatagacacatttaatcatctaggcagtgaggggaaattaaaagcaccagttgattatcatgccatattcgaagctgatgaactatttggcaaaaaattatatacattgcagatgggacatataacttttcctacaggtcatattgttgcttgtgatcctttaacacacttagctgctgttgataataagacatatatacgtactgtagaaccaggaacttatctgatagaaacaaaagtagctgaactagatacagattattatcgttatgtattatctagggtattatttaagaatacaacacctgtccaatatgagttagcccttaaaggtcatgagaatttaagcgagttagaagatggtgaaagttatattggcttccctgtagacgcaggattagcaaccattgtagatgaggccactgttcgtgcatataaagaatttgatcgtcagtggtatgaacaacatcctgaaggcaatatttatgatgattactttgatgagctatttaaattaaatgccatagcgtatcctaaatttcaacgaccaggtggcgattggattaacttcaaaataccaaacaccgatttatatgtaccaatgatacaatctggctttggtgatggtttatatcctgtatattgggcttttgatgaatccggtgatatatgccaaatcattattgaatttattagctgtagctctaatgattagtaataaaagggttataggacaaaaagtgtgtgtgactaatcccaataagttggaaaatctgtagacatatgtagctcattccaaacaggagcatcaccccattgagggattgaacgatctatttggcaataatcagataaccgtttgtagatagcagcaatcgattcatctgtaggcatacaatttaatatatctgaaatagaaagcggtcttggtgagtgcatatagcaccaccaatagaccgcttttagtcttctttcaagtgaaaggcccctatgagcccgtaacatacttcttagttgagcatttactccaccttcaatacgattatttgttgtaggtattgtaatatcaatacattccaaaaatgtaaataaagtttgttgcctaatcagacgccataatgatgattcagctttaagcaaacgctcatgtgtagagcgtttgtttccgaattcatcaatcgtcatttctcgtaaaaaatcagaatatgtcattcgccacgccgaaagtttattaatccatataaaagcttgatccattgttttcacattaaataaatctttagcaagagtataaaggtcctttcctgctaacgttttaggtctacttgtcgtatatcgtctaacctgacaaaaaatgtgaaacaggcatctttggtgactgctatgaggccaaactttacgtaatgctttaggcaaaccattagcaccatcagacacaacgactttaggttcggcaatccgttccattaaacactgccaagctctagcatgctcataacgacagacataccatcctagaacatgagtatcattgcaacaaatcaatacacataaattcctagctaagtaaattccatcaagatataccacatcatgtacttcttccacttttggtggcaatggccatatggaccaaaatttagcggttttacgcctgaatgtacgacctttaccaggcatatcagcttgaatatcggtgctgaataaccaattcaagaataggcttaactctttacttaaattattaattttaacggtaaatgccaccttacaatgtttgcaaaaccaacgctgagaaccagattttaaaacaccgtgtttaatacatgtttcattacaatcaggacattttatttgtcgcataaactcttcctccatatttgtttatatataggaagatataacctcattttaatcagtaattacaagggttaattgatgtttttacccacactttttgtccaccctcaaacttctccagaaaaagattaaacccttataacactagtaaatatctagtgttataagggttttcacacacactttttgtcctataagcctaataaaaatagtatatagatatatgaatacaaaaataaggcgcttagcaatgctaggcgcctttaatgtattaattttatatttgattattagatgccaaaaatccagttaataactacacgtaaacaactgagacctacaacgatttctgcaagaaaacgcaaggaatgttccatgccatttcctagattttttaaactgccaattttagctttacttacgatatcacaccagcacatataattatcctcccttgagagtaatatgagaaatatacatagtttatatgactattttacaactgtattcgataaatttcaatataaaaaataaaaattatgataaaataataataattattattgtgttaaatgaaagagggtatattttatgaggagaatttttgttgctttagcaatacttcttgcactaggcaatacggctgaagctaaaaattatattacgttagaatcaccatcaggaaatactattgttgatgaaacaggcaagtggattttaggtccttataaagatttacatgtaaattacattattgactttggagaaagatatgcgtacgcttcattttatgataatagtcaaaaacgctatattaatttaaatacgatggcttatttaccatcaggatatgattatgagttttcttatgagtatgcaaaggctttgacaaaggatggatttaagttagtaaagtctgatggtacttatgctataaatgatgttgttagtgcttattattattgttcggataatttaatatttggtaaaaagggtgagttttggtatctttataatataagtacaggttcattagtgatagataatcctattacaagtacatgggaaaatgtaaatacatattataatggatctggaggggttgtattattaaaaatagaaacagcagacggatatgtcaaatatgtaactaatgatggtatagaaatagatgaagatactgcgattcataatataaatacatataaatatagactcatggatggaactggtaatggagaaggaaatggttatggttataatggaattagatatagtcgagaaccgtctactcaattcataccattttccattgttgataaaaaagggaagactttatatggtattagattatcgaatgataatgtattaattgctcctaaatacaattatatagaacctttaggagatgattttaagtattttattgcagcggataaacataataaatatggtattataaatgttgtagaccaagtagtcataccatttaaatatgattcctgtaaaagattaagtgatcgtagctttgtgttaaaaacagctgaaaaatcttatatttttaatgcagaaagtggaatattagttgataaggcttatgatacgattgacacatcgaaaccaatttatatgattgataaatttactgtagccacattagaaaataaaaaatatataattgattctaatgatggtcatataatattaacattgccagaaacaattgatgatattacggcgtattatgataatttatatgtagttaaatttggtaatacatatggtcttatgaatatgtatggtaaaattttagttaatcctgagtttaataaagttactattgatgagcctatattcaataactatatgaaatacttatcggaacatgatgattaatttattgtaaaaaataaactagcttatagaaatataggctagtttttctttttttacaattacttccgataacgataatttatcggaagtaatttaaagcataaaaattgggcctaacctaggcccaatcaattcttttaaggtttttagtttttacgtttaaatgtatatggttcgtattctacttcgtttttacgaccagtccaccaagaccataacgcttttgcgattttccatgcaatacaacctacgatgacacctaatactaatcccgttaatacatctgttggataatgtacaaataagtacactcgtgcaaatgctactacgcaggctccaattaacgctataacgccccagaatttctttgctggacatatattacttaatcctaagtacaatgctgttgcagccgcaaatgatccaaaactatgccctgatggaaatgaatatgtagttgctgctggtggcggtgctaccaagtgtacttcaggaaaatctacaaatggtcttaaacgcgctacatgaggttttaacccttggtcgcctatgatgaatactaagactaaggaaatgaacattccaaggccaattacgcgatattttttttgaatcattaatataatagaaattaagatccataaagcacctgcactggtaatttttgataaccagtacatgattggtgttaaataggaactaataaaatgttgttgtatataaaatatgactgtatggtcaaattgtaaaatggtatccatagtaaacctcaacttatgattttaattgataattattgagaatgaaatgtgtaattttagcgtttttaggtataaataccttactacaagttaaaataatagcctaatctatgctttcggtcaatagattaggccatatttaatagaatgttaatatttatcttttagttttaccctttggcgtatctttttttgcaggttctggtgctgcaggtctcttagtgataatcgtatcaactggatcatatgtagactcaaatacgtctgtttgagaaatccaattactatatgttattgtacgatacgtattaattctaaacccaatgtgaccttcttctgtactatcctctttggcagaagggtctattttagtaatcgtttgattaggaatatctgtacgatcaccgacactaatggaaacggattttggtacgtcttctggtacgcctatgatatatatagttagttggccattattcataacacttaatacatagatattatgggcatagggatttttaaattgaaagtctaaataaccataagcaacggttgcatcacggcctgcaggaatatagctaacaggttcaaaatgaggcgtccgctcaataatattcataccagatagtaatgcagtattaaataatgtagagctaacttggcaaataccgccaccaatacctggcactaattttccatcaacaataactggtgcatcatcatagccagcttcggcagtgcgttcacccacaacatcgttaaaggaaaaaacctctccaggtttgactaatgtaccgctaattttagttgatgctagctcaatattatgagttctattggtgttagacgtatcaaaatttgtagtataactacctagaacagctgttaatggttttacatcatcgtttgtcacacggactgtatccttagatgtaaattctatagaaatattattgaaatcattttcttctagttgtgtctttaatttttttattgtttcgtcaatatcaacacgttttccttcttttgaaggcgtcatcttaacttggccgttttcaactgttaagtatgcatcatgacctgatacatcaatttgttttgctagttctgttaaatatgcttttgcagttacttcatctagtttatacactggattcatatgcactttataaataaaggcagtgattctatgtataaggagcgtttttaaatcatcttcatagccataggtaaaaatcttagattctgtactattggtatcaagcgtaattcccaaatcttttacttttacttgtcgtgtaccttgatttggaattgttatagtaattgttcggttattattatcctctgtatgaattaaggcgcttacagcatctctagaatatccagagatatcttgctccccataatacaggccatatgtaattgtgccatctgtaggaattaagctacaaccactagtaaatagacaagaaccgattaatactgtacataataattgttttaagttcatcattatatctttcaaataaaattcgagaaaatttcgttcaaaatcatctaattatagcataattcgacatttctatgtgatacaataatagcatagtgttagtaaaaggattatatatgtcacagtctaaagaagaaaaaaaacatttttatttgcgtcataatgatgcgttaatgaacagtacaaaattatcgatgaaagcaaaacaaagcattttactttcaaaggctgaaaatacagtaaatgcctatgagtcagattgggatgacttcgttgattggtgtaattaccaaaaggcatcctattttccagcaacaccagaaacaattgtcaattatattaatgacttagcagattatgcaaaggctaatacgattgctcgtcgcattagtgccatatcagaaaactacaatgcttctggggctagagaaaatccatgtatgtctcctcttgtgaaacaagctttacgagggatacgtcgtctaaaaggaacctttcaacaaggaaagacacctattttgctagaggatattgaagatattttagagtgtatcgatggtagtgatattccaaagatacagaaattacgagataaagcaattttactcattggatttatgggtgcttttagacgcagtgaaattgcagccttaactgtagagaacttaaagttttctccacaaggccttgagatatttgtcgcttcatctaaagctgaccaagaaggtcaaggtgccattgtagcgattccaagtctacaaggttctccattggatgccgtacgagctttaaaaaaatggttaactgccagtggcattacatctggacctgtatttcggggctttactaaatcaatgtcattacgaaaaacggcaatttctgataagtccattgcagagattgtaaaaaaatatatttctcttatcggactcgatcctgccatgtatggtgctcatagtttaaggcatggctttgctacgactgcagccgcttatggcgtcgaggaacgtaatatcatgcgtcagacgcgacatcacagtgtaaatatggtacgccgttatattaatgaggcaaataaattcgtcgataatcctatctcaacaatttttgaaaaacgattaaaataatattatataatgaaaatggctagtatagatggttttctcattgaagaacatctatactagccatttcgtatatatttaattttgagccatatagtccatagctcttgttggactatcagttttatatacaggcacctttattttggtccctggtgttaaattaccagaatcagaaatattatttaattcctttactgtatgtactacctcacgaacatccacattagatgcagttgaacgtgatgcaatatcccataaagtatctccagattttacagtaatctcttgaacactatgtgattccatagcaggagttgtttgttgataaccgataaccattgcaaaacagatagcaagcataatcataatgtgtctcataatacattacctctttaatatatcgaacataaaattcagaacgtttgtttgtttacaataagataatagcacacaaacggatgttcggtcaagtattttaagaacaaatgtttgcaaaagtgtaaaaatacctatataatagggatataaagaaaataattatagtatacacttttacatatcccatttttagtacatatatggaggttcctgtgagacgcccagctactgatattaatacaaaacaacgtcgtatattagagtttattcgagattctttacataatgaatatcgttgccctactgttcgtgaaatttgtgcttatgtaggtcttagctctacgtccactgttcaatcacatttaaatacattagaaaaatttgggtatattaaacgcgatcctaataaaaaccgtgctattacgattttagatgaaggaaaaccgaaggtttctgtatctaaagagaacaatgaaactactagctctgataattttgaattccttggtgcgggattgaaacaagttcccctcatcggtacagtacaagcaggcacaccaattacagcggttgaaaatttagaggctacattgaccttacctgttcagcttacaggtgattctgattgctttatgcttcgtgtccaaggggaatcgatgataaatattggtatgtatgaaggcgatatgttaattgtacgtcatcaaaatacagccaataatggcgatattgtggtagctcgtattgatgatgaagcaactgtaaaacgtttttataaagaaaatggtcatattcgtttacagcctgaaaatgataattttgatcctattattgttgatgattgtcatattgaaggacttgtaattggattagtacgtgatagaatataacaaaaagacggcaacatatgttgccgtctttttgttatattgagattttatttctacgtatactagcgaaaattgcgccagatatattatgccatacactaaaaatagctcctactagagttgcgagagggtttaaggcaaaattagttgctgctagcgttacggctaacccactattttgcatacctacttctattgctaatgcagtagttttatcgtattttaatttaagaatttttcctacacctaaacctaatagtaatcctaatatattatgtataccaaccacaataagtgttagtaacccagaaattaatagtttatccctattaactgctataatagctgctattaataagataatagcaatcattgaaaatatggggcttatactggttaatgtattaatatgtgatttacaaatatattgaataacaccacccaataagattggcacaatgatgactttcaccatcgtaatcatcataggtagcaatgcaacatctacccaagcgccaccaatatataagattaataatggtgttacaatgggtgctattaatgtcgatgtaattgtcattcctactgatagtggtacatcacctttagcgatataggttataacgttactagccgtgccaccaggacagcaaccaactaatataacgcctattgcaatatctggcggtaaggtaaatgcatggcaaattccccatgctaacaaaggcatgattgtgtattgtgcaagaacaccaatgcaaatatcttttggatgtctaaaaatattacatagattttcaaacttaatagtgagacccataccaaacatagcgattcccagtagaaaaggagtatacgcaacagcccatgtaaaatattctggcattatataggccaaacatgaaaagcctatgataaggatcattaagtacttggaaattaaatgagttagtgtttgtaaatagttcataacttctcctctttaatttgcatcaaaagagaagttatcgataagtcgtgtagatccaatatatatagccatagcgactaatactggagacgtaatttcatgaaccggttgcattgtattagcatcaacaactgaaacataatctatcttggctaagggctcagtattaataatttctgtcatagtattaatgatactatcagcagaagcaccatgtttaatggtttgttttcccatttgaatagctttatataatatggtagccgcttttcgttcttccttagataaatatgtatttcgagaagattttgctagaccatccgattcacgaacgattggcactccaattatattgaccggaaaatttagatcataaaccattttacgaataatggctagttgttgcgcatctttttcaccaaagtaggcattggtaggttgaataatattaaatagcttcgttacaaccgtacaaacacctttgaaatgaataggtctactaataccacacaatgtatcagataactcaacaatatttacaaatgcttttctatcatgatacatttcatctgacgttggagaaaatataatatccgccttatgggcttcacaaagggatttatctctattaatatcacgtggataagaatttaggtcttcgttttcaccaaactgagttggattaacaaatatagatacaatgaccttatcattatcctttctagcttgatctatcaatgcagcatgaccatcatgtaaatatcccattgttggtacaaaaccaatagaatatcctttatctttccaatggtttactatgctgcatatattttcgattgtagttataatttccataataatgcctccggtacttataaattgtaaatacgaagatagtcctatacagtctactgtaattcgatcaaaaacagttagtcttgatcaactaataaaccatgtttttcatagttttttatatgacttatcttattattttcatctacaaatacaacaagaggcttatggctctctacttctttttcatttagttgagcataacacatgataattactttatcatgtacttgcacatgtcttgctgcagcgccatttaagcatataacaccactgcctgcttcgccagcaatcgtatatgtgctaaaacgtgctccattattaatgtttacaatttgaacttgttcatattctcgaattccagatgcattcaataaatctgtatcgatagtaatgctcccgacataatcaagttctgcttgtgtcacagtagctctgtgaattttaccttttaacattgttagttccatgttaaactccttgtgttttaatgtaatcgccttatggtcgattcgaaatatcacaatcattttgtttatcatgaattaacagtagactagagtatagttaaaaatactatctccatgtgagattatatcataatacaatctttataagaaaaaaatatatttataggcatataaaataatatttataatgtatttcttataaaataaaaccagtagttataaatcatagctactggttttagtatcgtaatattttattgtaaatattcagctaatgccttatcaatgtatgcagcttcttcttgagaaggttcacacataggtaagttgaatatacctgctggtaaacctaattttcgagctgcatatttaactggaattggatttgttgtaatgaacatagctctagtaatttcagctaatttttgatgtaattgtgttgctttttgattattgccctcttcaaaggctgcaatcatatcgttcatatcttgaccggccacatgagatactacagaaataacgcctgtgccaccaacggaaagaataggcaatgtaagaccatcatctccgctgtataccatgaaatcttcaccaggcattaaacgcttaatttcagaagcaatcatcaaattaccactagcctctttgatggcacaaatatgtggatattccttatggaggcgtgctagtgtagctggaaatattccagttcctacgcgaccaggtacattgtataccatgattggtaacgttgtagcctctgcaatagatttaaaatgcaaatattgaccttgttgattaggcttattgtaatacggtacaacaactaacaatccatcaataccaggaatcgtagatacttctttcacaaagtctacagaaccttttgtatcattggaacctacattagctataatagtacctttatcaccgcacgtttcagcaatcgctttaaataaagtaattttgctttcacgggatatagtaggattttcacctgtggtaccacaaacaactaagccatcagaaccatgatttaatagatgctctgcaatggcaactgaattttcaatgttgactgatccatcttcgttaaacgatgtaatcatagccgttaatacacgaccaaaggttttcatatgtttctcccccttgatagatattaaaatgcttccttttctaccaagtattctgcgatttgcaatgcatttagagcagcacccttacgaatttggtcacctacgatccagaaattcatgcctttatcattgtataaatctttacggatacgaccgatttcacagtcattttgattagatgtatatagtggcataggatattcttgttctgctggattatcttttacttgtaatcctggaaatgcagcacaagccttgcggaatgcttctgcagatactggttcttctgtttctactaatacggattccgaatgagagcgatatactggaacacgaacagttgttggcactacttgaatggtgtcatcatgaagaattttgtgtgtttcatttaccatcttcatctcttctttagtataatcgttttctaagaatacatcaatttgtggtaacaaattgaacgcaattgggaagtgttttggtgcagaacctgttggcaacaagttagcagtcatttccttgccttcagcatattcttttacttggttttgaagttcttcaataccttctttaccagcaccagatacagcttggtatgtagatactacaatgcgtttaattggagaaatatcatgcaatggttttaagccaaggctcatgatgattgtagaacagtttggattagcaatgatacccttatgtttcaaaatatcttcagggttaacttcaggtacaacgagtggcacctctggatccatacggaatgcactggagttatcaataacaatagcaccgcgtttagcagcttctggagctaatgttttagaaatagagccacctgcaaataatgcaatatcaataccatcaaaggattcaggttttgcttcttcaaccacataggttttcccattaactgtaagttcagtaccagcagaacgagcagaagccaatagttttaaattttcataaggaaaattacgctcttcaataagtgtaatgaattctgcccctactgcaccagtagcaccaagaattgcaagattaggttttttcattgtgtatctcctcaattaatcaattgttgttcagtattataaataatgttctaagccatatgttaagcctggtttagaggcaattttcttacatgctagaacgacaccaggcatgaaggataaacggcttaagctatcatgacgaattgttaatgtttcatcatagccgccaaataatacttgttgatgtgctacataaccaggaagacgaacgctatggatagtaacattgtctacttttgcaccacgtgcacctggcaaactttcacgtgttaaatcttcagaacctgtcacatttgcagcctcttttgcatcattgattaatttagccgtcaaaatagatgtaccagatggcgcatcatatttatggttgtgatgtaattcgataatttctacatcagggaaatatggcgctaattcagcagccactttcatcatcataacagcgcctaatgagaaattaggtgctaccaaacaattggcattatgttttaaaccgatttcattcaattcgttgcgttgttcttcagttaggcctgttgtgcctattacaatatgcacgccagcactaagaatttttttggcattttcgaaaataacagcaggatttgtgaaatcaacgataacgtcaggtttattatcgctcaatacttcgtcaatagtttcagccattgtgatatgtaatggttcaattcctgctacagtgcccacatcttgacctgctttagatggatcgatgccaccaatcattgtcaattcagaatctgcatgtactgcttttacgacttcgcgacccattttgccgcctgcaccgtttaccattactctaatcatatttacctccaaaaaagccagtggaggcatccactggcttaatatatacgatatatgacacatcgttcattaaacaagaattatgatagcactccaccaatgtaatattggtgacagtcgtctacctattaaatagacaaccagcacgatgatttggctgtcatcccacttcggcaagtacaccttttatcatgaatcattgtttgccggctcctcatgatgactatttatacccgcgcctctaccttattattgagttaatataataagtataagtaattatgcgtatttagtcaatgaaaatggtcaataagttcttgtgcagcagcaagtgctgtatgagacattcccttgccggacatcatggatgcgatttgtgaaagccgttcttcctcgctcaattcagataatgtagaaatagtgcggccttcttgttcttgcttagataagtgataatgctgttttgcaatacttgccgtttgtggtaaatgagtaatacagaatacttgatttgtcttagaaagagctaagattttttcagctaccttcaacgctatatctccacttataccgacatcgatttcatcgaatacaagtattttgtgattatctgtacggaatacagattttagtgccagtgcaatgcgagccaattcaccaccagatgcaactttatgtaatggtagcaactgttcgcctttattggcggtaaataataattcaattgatttagcgcctaatggtaaaagttcttcactttcatctatgaaaaaacgaatatcccctttttccatacctaaatcaacaatttcagctcgtagttgtttagcaattacatctgcattttcacgacgtatagaaattaatgctgctaaagctgtttttgcaatcttttctttttccactaattgttgttctaaagcaccttgttcacaaacttcggattctaattcctctaaacgttgttgcgccttttcttcataatttaatatatcttggactgtttcgccgtacttctttttaagaccatagattacagagtctctatcttggcagtatgcatagcgttcttcgtcataactaatagaatctcggtatcgatcaagagattgagcagcttcttctaattgaaagtatgcggaattaacgagttcagagatttctttaacctcatcatcatattttacaagatcatttacttctaccttgatagcattaactgtatctaataatggattcctgcctccataaaaagcatcataacatgaaccaagtaccttatcgatatgatcgaagctatctaaacgtttcagttcttcagcaatagattcatcctcgcctatttgtaatccagcctcttctatttcatcgatttgaaaacgaagcatatcaagttcacgggctcgttcagacatgtgctcagataaattatctagcgcttgcttggcttctttatattctttataggctactttatattctttataagccttactaccagcctggttataaccatctaaatactcatgatgtgaatcaggatttaataatttttgattactgtattgaccatgaatatcggctaataatagaccaatctctttaagcgcctttagaggaatgggttgatcattagccaatataatagatttaccagatgtattaaaggacctagatagaattagttgattatcctctaccaatatattttttgattgtaataaatctaataaactttggtgattggcaatatcgaatatgccatctataacaaaactatctttaccatgacgaataaactcgctgctagcgcgttctcctaatagaatactgaaagcatccattaatatggatttacctgccccagtttcgccggtaaagatagttatgccatctttaaatgaaatattcatttgctcaatcaacgcaaaatttcgaatgctcatttgcgtcaacatataattactaatccttcattaaatcttgaattctagaaagaattgcaggtacctcagcttcggagcgtgcgataagtaaaattgtatcatctcctgcgagtgtaccaattaattcagaccattttgcatgatcaatagaaaatgctacagattgagcagagccaggaatcgtatgtagcacgacctgatttaagctatgatcaaccttgatcaaggaatcttggaataaacggttaatacgactacgtgataatactacattttcttctggagataatgcgtatcgataatgtccatcgccagttggtattttaattaacattaattctttgatgtcacgagagacagtagcctgtgttacttctatgccttcttgtaataaagccgctgctaactcctcttgtgtttcaatcgccttagactgaacaatttccttaattttgttatagcgatagcgtttcattttttgctccctttttaaacttgcacataaaagagaatagtatctttcttacattattataccatatattcaaaattaatatatggtatattccgtatataccatacgtgttatgcatattgtactaataattaataattagttaatttatggagttttcacctcttataaacacaaataatatatggttcatctatttatagcgaatttatgattaacaatttttacaggtgtgttgcataaataaaaggccctttaatgggtcttttatttcgtattatgcatttttagtatagtaaaagtatagattatttactataagtataagatggctgttatgggaattatcgtttttgaattaaatataattcaggtggattgttagcttgatttataggatgccaatggcatacattatactttgcttgatctaactgtgagatatacttatgcaatgcttctttctcttccataccctcaggtgtgccaggatatgctacgatagtaatgattccatccttagcgagtttaggaaatgcattgtttagagcttcaatcgtattatgagggcgtgttatgatgctatgatctccaccgggtaaataccctaaattaaatataattaaatcaatggtattttctttgatttcttgatgaagtgcaatgtcgtgagaattgtgtaaaaatgtaattgttacatttgactgcaatttcttggatgctagtaattccctgctagcactgacagcctgttcttgaatgtctatgccatataaatgacactcagattgagctcgttctgctaaatacagtaaatcgtggccattgccacatgttgcatccactacaacagaggcagatttcataatgcgatcccaaataagatgttgaaattgaactgcattgttgatattaatcatatgcgttcacactccttataataactcgtccctacgagatgctaattttttaaataatgtgccaaagaagcattgatctttaaatcgaacaaataaacaatacacaggattcgatgaaatatgtaaagcttctttattagtaaatgaatagtcaaatgtaccatctatgcatatatgcagttgaggttcacgatcaggcattgtaatttgaatggtatcatgttcttctaagaccatagagataccttgaattaaatgtggcgcaactggagttataataatagaacgattatctggcttcataataggaccaccagcggataaattatatcctgtagaccctgtagctgatgaaataatcagtccatcagaaggatacatctgcgtatgttgtccatttacagctaaattgatacgcgccattttagctggttcagaacgtgtaataacgacttcattaataattgggactaagtcttctcttgttccgtcttccctatctatataggcatgaagatgtcctcgtttttcaattgtatagtcaccttgagcaatgcgtttaatatgactttgtaattgatggacttcaatttgatttaagaaaccaagttctcctaagttaataccacatacaggtatattataagagaaaatttgacgtgctaaatggataatggtgccatcgccaccaaaactaaatgctacatcaatatgtttaaaaatctctggtctaggaagtacattttcctttggtatttgtaataccttgtaagtatcaggtctttcaagatcatctggtaaatatacttctatttgctcttctctacagatatgagctgccattttaagaacggccatgattgtacttttacccatattagggaaaaaaccaatacgcatatatctatctcctatagcatgtgagcctcatctacaactgctgtaattaattcatcagttatagataatgcaccttcttcagatttagtaaaatatcctaaaaactcaatattgccttccgtccctttaattggtgagaaggttaatccgtgtaaatataatttgcaatcgtaagcaacctgtaatatacgtgaaagtacctcttcatgtactgctctctctcgaacaatacctccctttccgaccttttctttaccggcttcaaactgaggcttgatgagagctactaatgaacctgtattttttaatagtgtagtagctacaggtaataccttatcgagagatataaaagctacatcaatagatatgaaatctacaagttcacccaattgttctgcagtaaccgcacgtatattttgcttctccatattgattacgcgttcatcttggcgaagtttccaagctagttggttatatcctacatctattgcaaacaccctggatgcaccattttgcaatgcacaatctgtaaatccacccgtgctagctccaatatcaatcatgactgcatcggttaaatcaatgggatatatttgaatagctttttctaattttaagcctccacgacttacatatggtaaggtattacctttcactgtgagatttgcatctacaggaacctttgtaccagctttatcgattcgtgttgtatccataaagatttgaccagccataatagcggcttttgctttttcgcgactttcaaataaacctcggttaacaaggagaatatctaaacgttctttattactcatatgacaccattatacacatagaaatattgaatataagctattagaatacctaatactaaaccaccaaatacttcaactggcgtatgacctagtaattcttttaatgcaatttctcggtcttttaaaataacaggaatatttcgtttactaaaatactccacaatttggtttaatatttgtgcttgtcgaccagcttgacgacgtacaccagacgcatcatacatgactacaatagaaaatactaatgctaccacaaatatatcagtaataccattatttttaaagtacaaagcggcagtagtagaaattacaaaggatgtatgtgaactaggaaatcctccggaacctactaaacgttcaaaacgcaatgtacgataacggacaagttgccataagaatttaatggcttgtgctgaaaaccagccccaaaatgcggcttgcgctatataattatgacaaatttcctctaaaatatggtacatataactttatcctctaatgtttaatgtgtacgatccaataaataatcaataatagcacttagtatatgtgtatcatcatctattgttgctaaagcagcatgtgccttttgtgcgactacatgtgcttcattacgtgcctcgtcaagccctaacaatgaaacataagtagatttatcttgtcgtatatcactaccaggtgttttgcctaactcttcaatggttcccgttacatcaagaatatcatctgtaatctggaatagcaaaccaagacaattggcatatgtcatataggcggcatattttgcttggtcagcattagataagatgagccctaactcaatggccgcattaaataaagcacctgtttttccactatgtaaaacttttaattcctcaagagggatatgttttccttcggatagtaaatcaaaagcttgtccgccaaccatgccttcaggaccagctgcggtcgctaaacattggatagccttgattttttgctcagctgatgcggttgtatttttactacaaagttgaaatgcataggtcaataaaccatctcctgcaagaatggccataccgtctccatataccttatggttggttaaattacctcggcgataatcatcattatccatagctggtaaatcatcatgaatcagtgagtatgtatgaatacattccaatgcacataggaactctttatataatgatgcatcaaccttcattgcatctaaaacagctttggttaaaataggacgaattcgttttcccccttgtaataaactatagttcatagattcatataaacgtttatattctggtataggggaatttaatacggcacttaaccagtgttcaatcgattgtttgctagtttctaaatatgtctttaacatagcttattactctccgatgcgtacctcttcgataatctgttgaatttcaccttctacagaatccagcatatctgcacattccttgactaaggttaagccttttttatattgatttaacagctctgacatagataattcaccatcgtcgagttgacgaacgatatcttcaagagctttatattttttttcataacttttcagtgatgttgccatcctgtaatacctcctctacaactgcttttatagaaccatcatgcaatgtaattttaaatacatctcctttgaccatattttgaattgaacttatggtatgaccctctttttctattttggaatagcctttcaccattaaatggattggattttgtagtgataattcctgtgttataagtgaaagtttatgcttttcatattgccatcgttgtgacgctaaagtttgtaatttctccttataggattgtaagaggaaattttgtttatgcagtaattgtaatgcaggaaacccgaggcgacgattaaaaattgtacttaattcaatacgtttttgctgtaatgtttgatccattacatactgtaaataatcaagtttttgttgtaaatgctgttgtagtgtagtcaatggaagcactgcaatttctgcggcatgactaggtgtagcaccacgcatatcagcagcgtaatcagctaatgtataatctgtttcatgacctactgcagaaataataggtgtagatgcattgtaaatagcttcgataacaactctatcattaaagcaccataaatcctccattgaaccgccgccgcgaccgacgataatgacatcaacatctggatctttatctgcagcttcaattcctttagctatgattggacccgctgttgttccctgaactggtacagagaataatttaaattgcataagcggatttctatgttcactaatatgtaatatatcgtgtaaaacagcacctgtagaggatgtgacaataccgatacaacttgatagaactggtattggttgtttatgagcatcatcaaaatagcccaatgcggataattctctttgtagcgcatcgaattcaagctgtaatgggcttttagaaccaacctgcatatccgatgcgataagatttaaacggcccattttgttatagaaattaacggatgccttgattgttactaataatccattttggaatgcattagcgagtcctttactttgaaccgtactagaccacatcgttacatctatagatgattcctcatcctttaaggaaaaatacacatgaccactactatgacgcttagcatttgttatggtaccactaacatagacattttttaggagatactctctatctattgttcgttttattaagttatttaattgggtaatactcaatacattcacgatatacctacttttgtgttgctaaaaatgccccataagcgtttcccgtagcattgtcgacggagaatttaggatttgcaaaatgaacagttacgttattcttatgacaaaaaccatttagacgattgcgtagtatagaattactcattacaccaccaacggcaattaatgttgatactggtgtatgtttgagatgataggttaataatttttccagagaatttcctatacaactaaatagtgccttactcatagatgcaggtgacgcccctttttcgatattacgcagtgcagcactacaaggaccagcaaagctaatccatccttctttaacagaggaaggtagcggatcatacgtatctgtttgtgaagcaagtagttctaattctttgccacaaggaaattgaatacctaatgcaacacctacacgatcgacaaattgtccgccttgtagatccttagaaccaccgataatagagctttcaaaaatccccttacctttatattctgttaaaacgagttctgtagtaccaccagaaagatgtaagctatagaatggaaacgtagggacatgtccaacttcccttagggctgctaaaatatgattttcttgatgagcaaatttatacattggtacttgcatcatatgacttagtgatctagcaaaaccatgaccaacaagaaaggccggcatataagaatcatcagagcgtctaggaaaagcactaacaccaatacccgataatggaacttgaggtaattcttcgataagacgaggcaatacctttgtatgttgaaacaccatgttagattgttgaagtcccttcattcctggctttacatctaatatttttcgagcttctcctactatatttagttcatcatcaataatggcacagctcgtcgtataacagcttgtgtcaattcctagaaaatattgtttcattatttactcttattataagcatctagaatcgcattgattaatttataggatgcatcagaaccaaaggattttgctaattgtacagcctcattgataacaatagatggagatacatcttcactattgtagttgagctcccaaatcgcaagacgtaaaatggcgcggtctactttatccataagtacaaatttccgttttgtgcaatatggttcaagtattgtgtcgatttcttcaagatgagataacacaccatctattatttggtttgcataagcaatatccatagacaacgagatttctccgtctgggaaaatcacatcatcattagaggtatgaaattcattagcgtatagaacttggaatgcatattgacgtgcttcacgtctatttctttttttagacatattgtctccttattctttgataattccttcaatatgtacatcaacctttacgtgatcaaggtcaagcgtattctttagtgtttgtttaatttcagactgcaattgttttgctatatctattacattgtatccgtatagacaacggatatacacattaatttcgataaagccttttctatgctttacattaatgcctggtaaatttttttgtccaaaagcgttcgttataccatcaacaatttcatcatataagcgtggacttaaagaatgaataccaggaattgtacttaagggcttaatagcaacatcaatgatgacggaatctgcaatatctactgttgctgtatctaagccatagtttaatttatcgtcttgactcataggccctcctattattcattacgctgaattggttcaggtgtaaaatcatcaaaaataatatcttggactacgatgtcaattgtttcaacttctatttcagtgtaattgacgagtgcagttttaatccgctcttgtaagcgcagtgcaatatcaggtatgcgatacccataggagatacttacatataatgtaactgaaattgctccgtcatcgttaaaggaaatctttacaccttcatgggcatttttacgtccaaaaaaggtattaaccccatcattaaaggtagaactcatatgatggattcctttagtatccaatgcggtcatactaataatagtagcatatacattgtctgcgattttaattttaccagtttctaactcagtatttttcttagtcatataggcctctttcaaaaaagagcacctgtccctatataatgacatagacgacaagtgctcagcttaacaaagatatatgggggactatattacatttaaaagatctggcccactatatcaatgaaatagttttaggcacgttcgatgtattgaccagtacgagtatcaatacgaagtacatcatctacttcgataaagagaggtacttttacagtgtagcctgtttccaatacagctggtttattaccacctgttgcagtatcgccacggataccaggatcagtttcaactacgcgaagttctacagctacaggtaagtcaataccgattacaataccttggaagaacatgatggatacttccatgttttcaagaaggaagtttttagcatcacctagttgttcaacattcaattccacttgatcatatgtttcgttgtccatgaatgtgtatgcgccatcagcttcgtataagtattgcatacgacgacggtcaacatgtgcttttggcactttttcaccagcgttgaaagtacgttctactacggaaccagtttgcaagtttttcatttttgtacgcacgaatgcagcacctttacctggtttaacgtgttggaaatcaactacttgccatacattaccgtcgatctcaacggttacacctgggcggaaatcattactggaaatcatctaactcttctccttctaaatacctatttcgattaactcttttggactatgtgttaataattcacagccatcagctttaacaataacactatcctctattctcaatccgatttcaccagaaagataaatacctggttctaccgtaatgatcatattttcggaaaataccgtatcggactttgcattggctactggttcttcgtggatttctagacccacaccatgtcccgtaccatgattaaactccttggtatatcctcgttctcgtatatagtcacgacatactgcgtcaagttctttgcctgtaattcctgcacgaactgctgcaacacctcgtttttgagcttctaaaactatactatacaaattcttttgttgctctgatgcggggcccataacgacagttcgagtcatatctgaatgaaaccctttatacacggcgccaaaatcaaaggtgataaaatcaccggcatctataatcttatcactagccacaccatgaggcatactagagcgattaccggatgctacaattgttgcaaaagaaggttcctctgaacctcgttttaacatttctgattcgagtatgatacgcgcgtcattctccgtcatacccacctttaattgcggtaataatgctgcaaatgcatcgtctccaattttagcagctttacgcattaattctaattcatcttctcgttttacagcacgtaattttgcaaaattgatagatgtaaaattaaagcgttcatctaaagtatcacataaggtttcatatgtatcaacaggcatatattttccttcgataccaaagagaccatcgtggatgtgattgtcattaaaaatatctacaagagtatccataactgatgtttcatattgaataacctcatagccttcacattgttttgtagcttgctctgtatatctaaaatcggtaatcatgaaagctttatcttgtgtgacaatagcaaatcctgtggtacctgtaaaaccagcaaaataatgtaaatttatagggtcaattaaaacgacaccagttaattcttgttctttaatatacttttgtagctgatttaatccgttcataatcatgctcctagtctataaagtacaccttataataccataaaatgcctatattgaatagattttcatgctattttttaaagtctactacatcttggtcatctatttctgaatatgtattaatagcctcaatgccatttaatgtaatatgacctatggacaatctttttaaataagtaacttcgcctccagcggccccaatcatacgtttaacttgatggtacttgccttcttcaatggttatatgtagagactgttcagaaagaacgtctatattagccggtttacattgggttccatcccctaatactattcctgtttctatacgttcaagaccatcttttgtgagtttaccattaaattccacatagtataccttcggtacatgtttgtgtccattaatgatagaatgcgcccaaataccatcgtttgtgagtaataatagaccttctgtatctttatctaggcgtcccacaggaaatacacccattttcttaaactcaggtggtaataaatccatcactacaggatgcgtaggatcttctacagccgtaatatatccagcaggtttatgaaatttaatataatactgttgttttgttgatatttgtacgccatcaactgcaatgatatcatcatctatatgtatagattggtctttttttaagataacagcaccatttacagtaacacgtccatcccttataatttggtgaacctctttgcgactaccaaaggctttattggctaatagtttatctaatcgcatcttaattcctctttcatagcatttgaaagaatcaattatacatgccctcttaaattatctacgtgagcagtatcatttaataagtttaaaatattatggtcagatggtcccataccattgtaaaatacgcgattaattgctgtattaccttggctgaaattccaacagtgaccaatgggaatatcaagcattttacataaaagtgtacgaatcgtcccaccatgacaagttattaaaattgtttcgtcatcatcattttggcttataaattctgaaaggccattccatgcacgattttgtacttcttgaaagctttctccatttggcagcttgacaatatcaggttgtcgatacatttgatcaataaggcctggccatcgttcttcgatttctgagaacaataatttttcccagtcaccaaaatcaatctctcgcaaccgagaatctactgtaatatcgatatttcgattaccacgaatcgtttctgctgttacgagggctctagataggtcacttgataaaatacgatcaaaatgtacattcttcaatgcatgagcgcaagcttttgcctgtgctattccattgtcattcaaaggaacatcggttatgccttgatagcgacctatcttattccattctgtttcgccatgtctaataatatataatgttttcatgttgtgttcctatttctcaaatatggtacttaataaatgaataagttccacgttgtgtgcatgatcttttatagcaatccgcatccattttggacctaaccctttataattagcacagctacgaattaatagattatgtttttctaatctagtttgtacatctgtaactgaaatatcaggatcattaatttccattaagatataatttgcagatggcttatagactactaaatctttaatagcagataatgattcatacatatactttgcttcattagccaataccatcttactatcgttaatatacttagtatcggttagtgcggattcagtataagcttgtgccaatgtatttacagaccatgcaggaatatattgacgcaattcttgtattaatgttggattggcaaacactgcaccaatacgaagtcctggtacagcataaaattttgtaaaagaatgtacgataattacattgtcatattgattaatgagctcgcgcatagagtggctattgtctcgtaacgattcattaccaataaaatcaatgaacgattcatcgataacaagtaagctattagcatcttttaacatttgtgctaatactttgattgattgtttatccaacaatgttccatctggattattagggttacctaaaaatacgataatgcgtccatcttgaccttttaattcagcagcaaatgtttgtaatgctaaataaggtacttcaaaatatggggtgccatcatcattttgtcgctgccgataaaaaatttcccttaccggtatgttcgcagcatccatagaggcttggtattcagagaagccaggcgcaggaacaaaagcccctgtaaatccagataatcgtccaactgcatagaggagctctgcagctccgttaccaagaagtatagaatctttttctataccatatacatcggcaatagtattcataacatcatcatttgtaacatctggataatgagatatatatcgcaatcgctcgtttagtgcttctaaaccttttggactaggtcctaatagattaatattggcactaaaatcagttacttcagatagatttattttgtggtcatgagaaaatttaaagatatttccgccatgtgtatctggcataggagatcctcctttatcgttttatatatgttagtccttcatttgttgtttccacaatatcaatatattgtaaggtaggtaattttttttcgatgtatcgcttacattcatcgatagccgtataatcacttggaaataatagacccattattgtaccactgtgagcaatgattgtaccaacgctatgaaaagcattaccaatgtcatgaaattcatataaatttggtttatataaaatacgttgattagcaaaggcactcaatgtagcggcctgtcctatcaacgtaatatcatgtgtttctagaccttttttgaagagctctagtgattctctaatgataggctctttctcctgtattttatggaataaatctttttgctgattaaaagagatggtatcaatagtaccaccttcatcaaaaattagtatttttaaaggcggacacgttcctaaaaaattacagatggacccatttatataatcaaattgtgtaataccaggataaaaagcagcatccgtcggctctactgataaacagatggtttctagctcttttggtgttaatgctctattacatgataaagcagtggccattgcggctactgctatatccgcagagctagatgccattccttttccttgaagaatatctgatcttatatagatagcagtattgtcacagctgggaatatgtaaaatatcctttactaagttgcgagcttgactagacttaggttgtaaggagcaataatagtgtggcaatggatgtgttacctggctcagtgcataggaatagcggttgattggacatgtcacaagaaatgattgtccatcaatggccccttggataaattccccacaagtgcctggcgcacgaacataataagtcactaaatcctccttacacaataaaacaatctatgtataattaaataattaaagaataggagctttcacaacagaagataataatgtcaacgtaattatatatactaatatcaacaagacctctgttacttcaacaacgaagccatatgtatcaccagtagttccaccaagttgtttaacaatatagtgattgataatacgattaatgatatagctcacgatcattgagaaaatattaatttccattaatccaaccaaagcatatgctaaaccaaagagagctatactatatggtataaatggaatcgaaagcatacttgttatacctaaagcgattgcatatagtaatgataaaagtaaacaaataataataggcatacagaaagtagaaatcgtgctccatgtaatgacatgttttggtgcatatactgcaaaggcctgccccatacccgattttcgagcatatggataagagcgaatacttaaaatcaatgtgtatctactcatgagaggcatcattacaagtataataggtataaattcaggtataggaattgcagttaacagttgccattttaacaatgtgataaatacaaaagctacaaccccaaaggaaccaacacggctatccttcattatttctagttttttctctctttcacggccagaaaaaagtccatcacttgtatccattaatccatcagcatgtaagccaccggtgaacaaaaattcactgataacgataataagcattaaaggcataggtgacaaaaattgagagaatataaaataaattagggttaaaaatataccgatgatcaatcctacaaaaggaaatgtagcaacagacttaccaaaatcttccatggaccattctgtttgatttactatttttagtctagttagaaattgtaaagctataaagaaaggtgtcatctatgtattactccataaattgataagcgactatggtggtgatgattatcataagtattgttgacaaatacatcatatatatacatcgagtaatatgtagtcgatttagtgtttctaatgcatcacccatatattcacgaaatgtcatctttttaaagtactggttatagccgcctaggcgaatgtgcaatgcccctgctacaggcgcttctgcatagccaccattagggctaggatgtttataggcatcgcgaagaccaatacgaaatgcggatttgccatcaaatcgtaatataaaggcagaaataactaataataggaatgttagtcgtgctggaatccaatttaatatatcatctaaacgcgcagctacacggccaaagaacatatatttttggttcttatatcccaacatggaatccatagtattagctgtgcgatataatatagctcctataggaccacctagtataaagaaaaatagtggtgaaattatgccatcaatagtattttctgctatcgtttctactgtggcccgagtgatttcactttcatcaaggtcttctgtatcgcgccctacaatccatgaaacgcgatgtcttgcatcatcgatacgaccttgtttaagcaatctattaacttcaaatccagccgcacctaatgaacgaggtgagattgtaatgtacacgatgagaacttgaataaaatattctacccattcattaatgagactaccaatccatagaatcaatgaggctatgatataaatggttaacaatataaatccaactgcaataccaccataccaaagtttttttgtatcattatctgtatctttataaaatacagcctcataaaatgatatgacacgaccaattagggcaacaggatgaaacttactattgggatccccaataatcgtatcaataataaatgccaaaattggaatacacacatagttgtagtgtttaaaccactctaagagaatgtttaaatccattaatatcacccattatcctttaatagagtcataatgtaatccatatccaaatgttcttctacaatgtctgctaaacgattatatgcattgtttttatgttcgaaataatggaaaacaacaggcgtttcatctaatcctttacgtaaacgcaattgatttataataaaacgacggaattcatcattatcaaagacaccatgaatgtaggtacccataacttgatgacgaccatcgataaagccatctacgaccgttataggaatttcactacgtttagtaatggtaaaacaacgttttacagtatcatcatttggtgttgtatcccccatatgaatttcatagcctacgagttcactaccagaaaatgtaccgttaaggaaatgtaaattctcaacatcaaatgtgacttgatgtgtcgttttttgatccttcatggttgtagtagagttaactaaaccgagaccttcactctcctcaatatccccttccatgtgatgcggatcatatatagcagtaccaagcatttggttaccaccgcaaataccgattacaggagttcctttttccgcgagctttttaatctcattagctaagccggagttttttaaatatgttaagtcagccaatgtatttttagaacctggtaaaataatcaaatcaggtgtaccaataacatctccagaaccgacaaaacgaacggatacatctggttcatagttcaatgcatcaaagtctgtaaaattagagattttaggtgtttggattacagcaatttgaatgtctttagaacctacattctttttattttccaaagctacagaatcttcttcatcaatatcaaggttttctatggcaggaataacaccaactacttttttacctgttttttcttcgatgaaagtcaatgctggttctaataacttaatatcgccacggaatttattaattacgattccctttattaaatcgcgttcttctggttcgagtaattctaatgtgcccacaatagaagcaatagcaccacctctatctatatcggcaatgagaaatacaggcgcttgtgtcattttagcaatacgcatgtttacgatatcattagcttttaaattaacctcagcaggactaccagccccttcgataacaatcatttcaaaattttcatcgagaaaggcaagagattctttgaccttatcaagagctgttaaggagtaatgggtatgatattctttagcactatacacaccaacgggtttacccattaatacgacttgagatgactgatttcctgtaggtttaagcaatacagggttcatttgtacaataggatcaataccagctgcttcagcttgggctacttgagcacggcctatttcatcaccccatttggttacataggagtttaaagccatattttgtgctttaaatggcacagttttatagcccattcgataaagaatgcggcataatgcagtacataaaatacttttgcctacattagagctcgttccttggaacatgatttttttagccatttatatgaacctcctgagattttaattctatggttaccccactaatcgttaaatacattttattggcagcactagcaacctctcgatttacacgaccagttatatcgcggaaatatcttgccaatttattctccggtacaatacctaatccaatttcattggtcacaaaaataacagttttatcattactgttattaatttcctgtaataatagtcgcagctcttctaaaataatagattcaatacgattagaatcttcctgcgtattgatatccccatgagcgaagacgtgatttgatgtaaacattgtaagacaatcaatcaagatgacatcacttacattcttaatttgttcccaatttttgtgtaagtatagtggaatttcgaaggtaatccactctttaccacggcgcaactgatgctttttaatacgatctttcatttcgtcatcaaaagcttgccctgtagcaacatatgcctttcgcccttttaaggataaggctaattgttctgcaaattcactttttccactacgagctcctccggagcatagaataattgtagatttcataaaccacctatacaagtatatataatttctgtatcattattagtataacaaaaggagatacactatggaaattatgaatatgaaattaaaaatgatgtctaccctttgggaaaatacctatcgtgtagctattgaagatggtcaaggtggatatattggtacatgtcgtgtagttgttaatgtaccgctagacccttctgaattacctcctaatgcacctattgtggaaccacaaatgtttgtattagtagaggatttttcttttgatgcatctaaaattataaattttgagacaacattagcagatttattgcgtgaaaaatttagatatcaaattcctcatatcttctttttctatccaagtccacatgatgtattgaatcaagaaattacacaatcttaataaagaaaaaagctatgtgaagacatagctttttttgtttattcttctccgatttcttcttctacacgacttaatatgaagcataaatcagatagtcgatttaagtatcgcaaattagattcatgtacgctttcaccagcgtctaatacacgccataaatcacgttctgcacgacgagcaactgttctagatacatgtaagtaggcagaagatttattctcaccaggtagaataaattctgcaagaggttctaattttgcatcaaaacggtcgataaccttttccaaatgttttacttgttgatctgttatttgtggtgcttgattcaagctagcaatatcagccattaacgtccataaggaacgttctatatcgagtaattcagcttgtactcttacgttctttgcataagctcgagctaatcccaagaaggcttgaagctcatcaattgtaccataggcttcaacgcgaagagaagatttctttacacgttcacctgtataaagacctgttgtaccttgatcacctgtttttgtataaacactactactcatggccgtacctcctaattagatgttatttatattctgggaaccataaatgaatttcacgtgctgctgaatcaactgaatcagatgcatgtacaacattagaatccatagttaaggcatagtcaccgcgaatactaccaggtgtggcatctacaggattagttgcaccattgatagtacgtacagaagtaacggcatttttaccagctagtacaaaagctagtacaggtccagaagtgataaaatcaaccaattcaccaaagaatggtttgtccttatgctctgcataatgttcttgtgctaattcttttggagtttgaagtaatttcatagctttaatgattaagcctttacgttcataacgtgtaagaatttcaccacagatttgacgttttacaccatctggtttaataagaactaaagtttcttccatctttaaacctcccttttattaaaatctataatgtggatttagagatagttttttcaatctagcaatacaatccttagtactaggatgtgtgctaaaaagattcgacaaactagcaccaatacccatcataggattaattataaacatatgcgctgtagcattattggcattaggtaatgttccatatttagaatattcttcaattttagccaatgctgatgcaagtcctaatggatttttgcttaacatagccccaccctcatccgctaaatattcacgggtacgagaaatactcatttggataatagcagctgctaaaggtgccaaaataaccataccaatcaatgcaagtggattgacattatcatcgcgatcagcagagcggccaccaaagaacataccaaaatgggcaatagtagatatagcgcctccaataatggcagcaatagtactgattagggtatcacgatttttaacatgtgttaattcatgacctaaaacgccagctaattcatcatctgttaataaacgttgaattccggctgttacagctaccgcagcatgttctggattacgaccagttgcaaatgcatttggtacgtccgtagggatgatatatacctttggcatcggtagtttaccgtttttagccaattgttcaaccataccatataatttaggatttgattgagcggtaacttgttgtgcattgtattgtgctaacacaatcttatcgctataccaatacgatgatattgacatgcctgcagatatgatgaacattaacatcattccacgagcgccgccaaaagcatcgcctaataatactagtatcactattaaagtggctagtaacattgttgttttaaaattattcatagaatcctccaacataagtttttggactatgccttaactagatttattataccacattttgaatagttgtggcccctattgtatctgcctctaacacatataccttgttttcgatgccatggaactcaaagatttgtcccattgcttcagctactgtttgtacatgagctttatctgtatatgcaattaaggtagaaccagatccactgatagttgcaccataagcgcctgcggcttttgctgcagagaataccttatcacaatgaggaatcaacgttttccgatacggtacatggagattatcctccagtgcaactgcaagattatccaattggttcgtaattaaactagttacgaataacgatgcatgactcacattttgaacggcctctttaaaaggcacatgatttggcaatacggatcgtgcatattctgtggaaaccaatacctctggcacaacaacggcaaaatgtagtgactctggtacagggataactgtattcaacactttatcttttaggcctgtagcacaacaaagattaccaaaaatggctggtgccacattatctggatggccttccatacgattggcaatgatgagtaactcttcttttgaaagtggtttatttacgagattatttgctagtaaaagcccacctacaatagcagtactactactaccaaggccacgtgatggcggaattaatgtttccgaagtaatatgaccatattgtattggttcttgtgctttagcaaatacttgttcaatagctattccgatgagattttttttaggatcttctttttctaataaatcagcgccatacccatgaaatgtatagctaaaagatgtagcatttgcatcaggtgtaaattcaaaaatattatatagatttaatgctagtccaaggcaatcaaaacctggtccgcaattggcacttgtagcaggcacttgtacacgaattgttgtcataatattacgcttccataattctgattacactacatacatctttcacagatcgcaagctgttaaaagaatcaattaaatttaaaatataggaatgtggacatttagaagtcacaatagcaagtactgctgtttcaggatctttatttcgttgaacgattgaaagaacagagattttttgctctgctaattttgtagcaatctttgcaagaacaccagttttattatcaacagctaaccgcatatagtaactggattgtattttacctggggaataaatattcttttggtcaaagtagaatggtttaaaacgtcctgtagattcaaaagctacgtttttagctacttccataatatcgctaacaacggagctgcctgttggtaaactaccggcgccacgtccatagaacatggcatcatcaatgccattacccttgatataaattgcattgtacgagccgcgtacagatgcaagtggatgtgttaatggtacgaaagcagggtatacattgagagataaaccctttgacgattcttttgcaatgccaataagtttaatattgtatccgaattccttaccaaaggaaatatcttctgtatcaattttagtaataccttctacagttacatcctcgaagaatatacgacggttaaagctaatggatgctaaaatagcaagtttacgagctgcatctaaaccttctacatcggcagttggatcagcttctgcatagcctaaatcttgagcctcttttaatatatccccgtagcttaatccttcatctgtcattttagataaaataaagtttgtagtaccattcatgataccaacaagttcagtaatgcgattaccgccaagggaatcgtataatgttctaataattggaatgccacctaatacagaggcttcaaaacgtaaatctacgtggtttttatacgctaagtcaaataaatatgggcctgcttctgctaataaatccttattggctgtaacaacactttttccatgttttaaagctgcttcaacacaatctttcgcaaatgttgtgccccccattaattcaacgacaatagcaatcgattcatcattaagaacatcatcaatgttagtcacgtattgtgcagtgcttggtagtgtaatatttgtgtatttatctgggctgcgaacaaatatttttgaaatctcgatagttacaccgcttctgttagtaatcaaatcgacattatcttgtaataaattaaaagttccttgggaaacagtaccaaatcctaataaggctattttaacggtcttcataatggtcctactctcttctgactggtcaatataatatttatattatgcttgacctaaaatttctactttaataattcctttcatattgcgaatatcatgtaataattcctctaaggaaccttgcaagtttttggtttcgaaagaaatactactattagcaataccctgtaatggaatatcttgatttatggtcaagatacttccgtttttatcggctattgcttttaaaacacttgataacatacctgattcattggacattgaaacggtaatgctaacaatttttccttgagcaatctcaaaaaatggaaatacataatctttatatttataataagcagatcgacttaaatccattttctcaacagcttcatttatggtttttacttcacctagtttcaaaatctcttttactttaatcgttttcttaatcgcttctggtaaaatatcttcttgaactaaataaaatttgtcctttttcggttttgtcatactaattctccttacattaattagatgtttcctgagcaacaaactgacgtccatataaagttaatactgcatacatacctataaaaaatggtacatattctgccatcacacgccacgccacagctataatacctacagtgccactcggtacgaatggtgcaaaaagtaaaatgaataatccttcagcaatacctgttccccctggagtgggtgcaaaataaagtattaaatttaacaatatcattctatctaatatcgtaataattggtacatcattagtaaaagcaaacatcaatgccggtgctatacagtataagcataataaacttaatcctgattcgataaatacaataaaggattgagtaggttttttatacaataatgcaagcccttgatttagtgtttctaatttcgccaaccaatctttagtcttatgggccttaaaacgttgtgctaaattatatacgaatttcctcatatataccgtttgtaaaagatatgttcctaataaggtagccaatacggcaaaaaaagaaaatagtaataacatatctcttgaaatatatggtatttctatggagtcatataaaaacacaatcggtaacatgacgactaaaaacatgattgaaaaaaccgtacgtatcaatacgattggagttcccttacttatcgggacatcatagcttcttaatacgagtacttgagccacagctccaccactggcacctggtgtgagcatagccataaaatagttactaaatataacccgaagtacagcttttattgataaatgataaccgccaatttttacaaggcgctgcaatcttaatccatcaaaatacatccctaaagcaagtgcaataatggcaagcaacaaagattcaccattaaaagttgttattgttttaagggcttctaaatcgatagtataataaatgattcctaaagatacggcaaaaagtaggacaaacataaatatgccgcgtctcatcatcttactcataacaaatcaccataattaatgagttctatattatgttgtgaaatatatctacgtacattatcggatgtcatagcagataattcatcttgccaatgataaccccaattatattgctttcttaaaacttcattactaatgcctggatgcgtcataatttcatgggccccagatagagagctaacttgttctaaaatcgataataattctgtttctcctaaagcaccaccattaatcataccccagaagtattgtgtaaagtaaattcccttgtcgcgaatgctaggcaatgcttgagcagccacggtgctcaaaccacatttccccataatacgaacaggattatgcacgccatttaaaaatgttattttttcatttggcacccgtatagctttaattttatatcgcatagcatgctctaaaactataggtagaatactaggtaatacatgcatatgttggtgtccatcaatatgagttacgtttacaccagattccataattttagaaacttgctttgtaatctctgttctcacttcatcataattaatagagccactatatatgcgcttcataaactctatataattatcaacaaaaacaccttcgtttgttacaagactaggaatttcactaggatcacttacaggggcgattcctcccaccaaagctatgtgaatacctatacccaactttggatattcctttgccatatctactgcttcattaaaagcagcaccacttgccaatatagatgtgcttgtaatagcacctttagtatgccctacgataataccttcatttatagctgaatgaaggccaaaatcatcagcatttataattaattttgacatatgcgtgcctctttattcgtaaaaacgggaaaacaatgttcacccagaaaagatatatgttattttaacaaatacaggtatataaaatcaatacaatatagcaatacttgtatactggaaacggactttttatatcgttttcacataatttatatacccttctatcatagataatcatattttatactactatagaaaattatataccctgtcatcaaaaatgatcgatgacagggtatcgttataatatatattaaatttgttctcttactttatacatacatagggcggccgcaattgatacgtttaaagattctatatcaccatacatgggaattgtaatagcctgatcacacatttcaataatttctctagacactccattcccttcattaccgagtataatcatggttcgtttaggatatgaaatggtatgataaggttttgcattttctagtgaggtaacataggtttttatcgtattatcctttatgaaatcataaaattcagataatgttacatcttcaaaaatcggaatattacaaagcgcactcatcgtactacgtacgcatttttcgttataaggatctacggttccttttaacaagaatataccttttgcaccagcagccaccgctgtacgaattatggtacctaagtttcccggatcctgtacaccatctagtgcgacatataatccatcctctactatcaatgaatgcaaatcattaacacattttttcgctatacctagtataccctgtccgtttacagagtgctcaattttatcaaatattggatcttgtactacatagacggaagaaacagtaaaccctttttgcactagtggttctaattcacttcgctttgattctctaattaaaatagagcgcaaacaatctttttttcctatatccgttacagcacgaattccttccaccgtatattcaccaaatttttgccgatattttcgctgttgtaaactgataatatgttttatagtcttattgtctttcgattgaatataatctatttttggtgattccataactcgtaaaaatcccccttatgttgcataagctcatcaaatgttccatcttccacaatcttaccataagaaagaactagaattctatttgctttttgtacagttgataaacgatgtgctacatttataattgttttttcaccacgtatagtttcaatactttcttgaatttgtgattccgtatgactatcgatatttgccgttgcttcatcaagcaataaaatcggtctatttaaaatcaacgttcttgcaaaggctaataattgcttttggccatctgataatagcgatcccaaatatcctactgatgtttgatatccatctggcaaagattcaatcatatcgtgtaatttgacctttttagtagcgtctataatagtgtccatagagatagaagaatcatataaattaagattatcttgaatcgtacctttaaataagtatgcattttgaaatacatagcccataatatttctaatcattgaagaatcatattggctaatatcatgaccattaatataaatattgccttttgtagggcgcaatatgcccatcaataatgaaagtaatgttgattttccactaccagatagtcctacaataccaagatactcccctttttttactgtaaaagaaatgttattcaaagcatatacatcactgttatcataggagtaatacacatcttttaattcaatagtatcaatcgttttaaattcattgggaacagttgttatcaactcgcgctttggttcatccaaaataggaatcaatcgttctgcaccggccaatgcactttgcaaggaattatatttatcagcaatttctttcataggttgaaagaatcgatccatatattgtataaatgcaaataccgtgcctgcatctgctacggattctaatagatttgtcattgtaaaaataacaataagtgctacaaagaacaaaccatctacgagaggtctaaaaatagaaaatgttgtaacctcaaatataccggcttttaaaaactcacgattaacagaatcgtaccgttgttcaatacttctttcacctaaataagtttttacaattaatatgtaattcaacaattctttgatgctcgaattagatgctgctacagaagaacgaacttgtctaaaagcttttctggaaaacttttgatacacccagataataaaccccattataggaatcaacaaggtcataacaattgctaagggcacattaatagcatacataaaagctaatatgcccaaaatcatcaatgcactgcttatgagttttagcaatacatctgtatataatgtacgcaatgattctacgtcattggtaatacgggtcacccaattacctataggcaaagactgaaaatcttcggcggatttatgaagaattttttcaaataccgtactgcgtatatgaaaaataattttctgcccaaatgtagataataaatagttttgtaagagaataaagacaacgctgccaactatagttaatgcatatagtccagcataatgctgaatagtattcaaatctttcatagcaaagcctaaatcgatagcttgtttagaaagatatggacgtataagcgagcataatagattactaataagggctatactagccaaaatgagtagccataaataaggcctaatatattttgttaaatatgtaaataggcgccaatcattatactttagtttcattattgggcctccttattttgagctgtatacatctgaaaatataaaccgtttttacacattaactcatcatgtgttccaacttcgcaaattctaccttcatcaaatacaatgatacgatccgcatgcttgattacctctagtcgttgagatatacataaaatggttttatcctttgtagattgcaatacttgtaacattttatctacagttatggcatctaaagcagagaagcaattatctaataataagtaaggtgcatttttgtaaaatccacgtgcaatattgatgcgctgtttttgaccacctgataaatcgcgcccttcctctgctaatacgcttaatggattctccaaatcctttcctaagtcacgatataattgagcttttttggctgcttcagcaacggtaatatgatttttattttcatagccgaagctaacattgtcagcaattgttgaacttagtagatatgattgcgttggtacataagaaatcgagtttctaacagtaccaatgggcagtgtcgtaatatcttgattattaatataaatagtctttgatggtgctttttgaagtcctaataacaatttgaagagtgtacttttaccagagccaggcttacccactatacctacaaactctccttttttgaatgtaatattaatttgacgtaatacaggtgatttagattcatcataggtgaaatttaaatattttatatcaatatcgcctaaaccaagttgtttaccatcagtgtcattacattctgcagaaagactcataaaatcaataattcgatcaagggaggccatccccttttgaactatggctactaatgaacccaaagaaatcaatgggcctataataagcataataaaagcattgattgtaacgaactcaccgacagtcataaggccttctacggctaacgtaccacatatatacatactaatactgatgcatataaatggcgcaatcatagttaaaggcgataaaatagcatcaagaatagctacactcatattatcggaataatttttcttgttaatacgattaaacaatcctcctataatcgattctttattaaaagctcgtataacatccatgccttggaatagttcttgcccaaattctgtcatgtcactatatgtagtttgagcctgacgttgtttctttcgtaaacgccggcctagtgtaaaaattgaacctaaaataaaaataaccggtgtcataatctttaaggctaacataaaatctattttttgaattaatatgatagagcccaatatagaatataaaataatatcaacaacgatcataacacctaaacctagggcaacgcgtaatgatgtaacatcatttgtcatcaaagccattaccttaccaggtccattaacatcataatatgtagtagggatttctaaagcacgagcacataatttttggcggaataaatactccatgcgtcggatagatcctaataatgttctacgtgatataactttcaatatagtaataatgattaataaaccaataaaatacaatatataatgggttaagccctctttattatgactcaatgtatcgatggcactaccaattaattgtggtacaattaaaaaagctacatcgattgcgattagcatagttaaaccgatgagataatatataccttcacggcgaaaaaattccttgaaaattgcatatggattcatcgactacctcctgttttctttctatcgtaccatttactacataattcttctaccaaaaacattaaactaaactatatccaaaattaatagcaaactatatcgaaaaaattagtttactaaaatggatagaaatggtatactaaccatagaaacattgtttaatctatttagtatataaactcttaggaggaatgaaacatggaaaaacgtactggtgttgtaacatttgcaggtaaccctattacattggtgggcccagaaattaaagtaggtcaacaagcacctgatttcacagtattatctaatgatttacaacctaaaactttgaaagattatgaaggtaaagtaaaggtaatttccgtagtaccttctcttgatactggcgtatgtgatgcacaaactcgttggttcaaccaagatgcaacaggtttatctgatgatgttgtagtattgacaatttctatggaccttccatttgctcaaaaacgttggtgcggtgctgcaggcgtagataaagtagaaacattatctgaccacaaagatgcttctttcggtacaaactatggtttcttaatcgaagaattacgtctattatcccgtggtgttgtagttatcaataaagataacaaagtaacatatgttgaatatgtaccagaagtaactcaagctgttaattttgacgcagcattagaagcaattaaagctgatatctaatattatctacttattaaggccgtacgtcgtacggcctttctctattcatgggagttatgtatgtggattaaattttcaaaactattattaactattaaaaatatcgccctcctcggcgttggtatagccttgtgtatcgctttagtcaattctcttattaatttaggtggtattacatgggccaatattaatggtgaaagcacatattacaatcttattgaagaattaattaccttcttcctctatttcgagtttattgcgttgattgtaaagtactttaaaaataactttcactttcctctcgattttttcctctatattggtattacggccattgttcgatctgtaattattgcccatgatacagcctttgacatcctcatatgggctatctctatttttgtgctcgtatgtagtttagtattggtaaaaagatatattggtcatgatgaataatataattatttatgattctataatactcaaaaaggtcctaccgattttcggtaggacctttattcatatccaaaggattagaaaatgtttttgctgtaattagcgtatttagcttctaactcttccattttgtcattcatttcgatttgtaatgcagatgcagtatcataatcctcagattgtaaagcttctacaatacgtgtgaacaaggatttgcgatcatcgctatcttttgcaagatagaaacgtaagtcattaacttctgcaaagcgtttgtcatcaatgctattgcgactatctgtgtgaatggaaaccattttacgtactgtatccatattatcaggaatgatacgatgagccaatacgagtttccaacgtttcaagatggatgcaatgaaggaatccattaagtcatgagcaaatgcatcaccttgtgccaatgtatttacaagttcaggattatttttataacctttaatgttttcccatactgttgcaggcgctacgccgaacatttgattacgttcttcttgagtgtagtcttcaaatacatctttttcagaacggaatgcacgctctttaggtaagtaatctgcatcttgaccagcttctttggaaagttctgcttccaattgtgcttgcgttttaccacttgtaatggcatatttcataccatcaaatgcagagatgaaaatcaatgctaatgcagtgtatgtatttgtataagggtttggagaacgcaattcataacgtgtagccattggattgtcgatatcgcgaatcaaaccgcaaaggattgtacggttacggctaggttcagaaggatcattacctaaggaagttacgatacaaactggagcttcgaatccaggtttcaaacgattcaaggaatctgttgtagagctgatgaatgggttaatagcttcatagtgtttcaatagacccatgattgcaccaatacctaatgagctagcagattcttttttcatatcttctgggctgaacaagttaacaagttttccagattttaattttgccattacgccaaagtgagtatgttcaccagaaccagcaacaccgataattggttttgcattgaatgttacatcaagaccattttcacggaatacttcacgaacgataatacgagcttgtaattcgttatctgctgtttgtaatgggttaccagagaatttccagtcgatttccaattgttccaatacaacggattcatgaccatcttcatcaagtttagcttttacaccaccaacttctttatggcccatttcagctaccataccgtatttatcaagacgttctacggcttgttctaatgcagtccgaacagtaccgtgtgtacgttgccagtattgttcttgcaaacgttgagaaacggacaattcttttttagtaactgttttagaaggtgtttttacccagaattctaattcagtagcagatgtgaaaacaatatctaacacatcatcagctttcacatgaggcataccaggtaaacctttttctttgatcaaggataacaattctgcacgaacatagtcacagctgcgtttcaaaatagaacgggaatctacatagcggtaattatgcatcaagaatgcaggaatacgaagtgtaccagttggcaaacctgttgcttcatcaatgttttcgtagttgtaatcaacaaaccagtttacacttgggtcgccccacatatcaacacgagcattgttcaatgtagcgatatttgtcaatactacagaggaaccatcagtttgaacagcacggccttcaaagaatgcttcataatcatcaaagaatgcagccattgggattttttcatctgtatcattaccagctaagtcgatacctactaaagatacgaatttaatttctggatgttgttctaatagagataaaacaccttctttaccatattgacctgcaggaatgtaatacaataattcttttgtagccatatttgttcctcctaaactataaaaaaagactccaacaatatagatatacaaattgcatacctatccagtggagtcttcattgactaattattttcttgagtacatattaccatagtgagaaaattcttgtcaacaaatttctatagaattttaccagaatattaacctagtaattcttttacgatggtatttactaatttaccatctgcacggcctttagtatgaggcataacatgtttcataacgttacccatatttacattatctccgcactcagcaatggctttttttacaacatcgcgaatttcatcttctgtcatttgcgctggcatatatttttgaagaacagctatttcttccttaacatgactaattagatcttcacgacctgccttttcaaattctgtaagagaatcttggcgtgttttcatttctttagctaaaatgcctaatacaccattatcatcaagttcaattttatcatttatttctgtatttttaatggcactattgaccatacgaataacagataaagctattttgccttcttctcgagccttcatagcagctttcatatcttcttttaattgatcttttaaactcatgggaacctcctatacgactcaatcattaaatacatattagcaccttagaaactaatatataaagaaaccctaattctggatttcatgaagccatgaaaaggcagaattagggtaatcatcttatgctctgaatttgcgttttcttgctgcttcagattttttctttctttttacgcttggtttttcgtagtgttcgcgttttcttacttcagacaaaacacctgctttttggcaggagcgtttgaatcgacgaagagcactttcaagcgtttcgtttttaccgactttaatttcagacatctatatccctccctccaaaattaatctcagggaagtgctgataattttatttacgcacatatacatattatatgtagaacactaggttctgtcaatatataccgctatattttataggaattttattacaaatcaatattttttgaagtcttactacttcaaaattaataatttcctattacaagctattacgcttcaggccaacccatttcttcgccacctaatagatgagcatgcatatggaatacactttgaccagcttttgcgccagtattaaaaatcaatcgatagccatccttagaaataccaagttcttttgccacatcacgaacaaatggtaataaaccttcaacatagtcttcattcttctctgtaatatgagcaatattagcaacatgatttttaggaacaatgagtacatgaactttttttacaggttcaatatcataaaaagcatagaatttatcgttttctaatactttttttgatggaatttcaccattaataattttacaaaaaatgcagtcgctcatggggacctcctctatcttattcaatgattacaaaatctttttcaacagccaccacagtaccgcctataagatcacctatagagtgttgaccatctgatttaactctaccatgaatatattcatttgttaagcctgtataatatccattttcctctttttcaatgaggatttcaccaggtttacctatacgagatgttgcatacgcatgtaaacctttttcgcttagatcatttaaaagtgctacgcgagccttcttaacggcttctggtacttgatttggcattgttgcagccggtgtaccttcacgaatagaatatgggaatgcatgaatatgagtaaagccaatttcttttaccgtattcattgtttcatcaaagtcttcatccgtttcttgtggaaatcctgcaatgatatcagtagtaattgataaatctgggatgcgatttcttaaattcttaatcaaatctttatattcttgaagcgtataatgacgtttcatcaatgttagaacatgatctgaccccgcttgtagaggtaaatgtaaatgtggacatacgcgcttatccgtagccattaattctatgagttcatccgatacttcaacagactcaatagatccaaaacgtatgcgatgtaaatttggaatttctaagagggcttttaccacatctgctagcgtaggtcttcctggtaattcaacgccatagtttccaaggtgaatcccggttaaaacgatctcatgaaatccatgttctactaaacgtttcgcttcatttacaatatcatccactttacgggactttagtttcccacgcgtataaggaatgatacaaaatgcacaataattattacaaccttcttgaattttcatgaaagctctcgatttatcagattcattaccaaataatggcatctcttcaaaattagactctttcatgatatcgcgaacagcattaatttgacgttctgttgtttcgagttgttcaacaagttcaacaatttttgagcgattgtttgtgccaataactagattaacgccatcaatggcagcaattgcatcaggatcaagttgtgcataacaacctgtaacgataacataagcatcttgattttgacgtttagctttacgaattaattgacgagactttttctcccccatattcgtaacagaacatgtattaataacgtaaatatcagccttagaatcaaaatcaacagcttcataatcatgttgtaaaaataaccccttcatagcatccgtatcatactgattgacacgacaccctagagttgtaaaggcaacggttttcattgcacctcccatttctttatatagacatcatatagtatatgtatatagtattttatagttctaattcatagtgaaccatcgataatgcagcaatcgcagccgtttcagcacgtaatatagtatgacctaatgtaactgattgtccaccacattctataatatcattgatttctttctcttgaaagcccccttcagggccaatacaaattaagatatccctattagttgaatcactattaacagcctttaaagcatcttttatggtatagcccgcttcattttcataggcaaccaactttaaagattcagattcgatgtctaatacattcgaaaggggctcacccacaacgagcgtaggtagctgtgtgcgcccgcattgttgagaagcttccaacataatcttttcccaacgactatattttgactgtaatttttttgcatcgtacttagcaacacagttcgatgtaggtacaagatatacggtatcaacattaagctctgtagctttttgtaaaacccattctaatttttcaccttttaaatatgattgtactaatatggttctatgcatagatgtaggagaatcaatgtattctataagactagcttgtgctaagccatttatctcatcattaatctgatagataccgcaacggttatcgctacctgtgacagtaattggtttctctatattatggcgaaatacatgtaatatatgatgagtcacatctttaggtaatacaatggattcatctaatggtgtaggaataaatatctttttcatcgtttttccagcgcaaatgtatgccaaggtccagcaatgcgctcctcaataatatgccactctttattaatataaggcataatctcatcataccgatcatcaataataccactaatgatgagaatacctttatcatcaagttttttaccaatttgtggcaataaaatttttaaaggatctactgttaaattcgctaaaatcaattgagcggtacccttaaaatcagtatccaaattaccacaaatgatatcagctacgacatgattattatcacaattaattcttgcctgtttagctgcatattcttctatatcgatacctacaagatgttttatacccaaatgagcagctactaacaacagaatacctgtcccagtcccaatatctaaacaagtaacagaatctaaattcatggatttactataggcctgtaaaagttctgcacaagttctcgtagtttcatgagagccagtaccaaacgatatatctgaatcgatttcgataatagttttattctgttcattatcatattcttgccatgcaggtttgattattaaattaggtagtatttctgtaggttctatatactgttgccaagaattgagccacgtagattcatctaatatatgtgcatctattgatgtgatttcgatattgctttcgttaagacgcccctttatatcagacacaatcgtgttaggatctaatgatgcatcagcataaagcgttaattgtactaaattcggttgattatctacatcttcttctataattccattgtctgcataatcgccaaaaagagtagtcacctcatcggtggctactctttcgcagacaatagatatttctatccattgcataaatgctcctttactattgatgcgcaggaacaaaccattcacgcatcagagctgttcatttagttaaacgatccttgattttctcgaataaactcttactaacttgtaagttattcacatcttcattgccttctttggcaaatcgaagtaataattcacgttgtgtttcagttaattttttaggtgtttgaaccgtaacgactacgtgttgatcaccacgttgttttggattgcgtaaataaggaatacctttgcccttaagtctgaatgcagttcccgtttgagtgccttctgggatcttcaattctactttaccatctaaggtattcacttgtatagtcgctcctaatgcagcttgtgcaaagctaattgtaacacgactaataacatcattgccatttcgttcaaattctttgtgagggcgtacgtaaatataaacgtataggtcgccttttggaccacctaatatacccggttcaccttcatttgaaacgcgtagacgagatccgttatctacaccagctggaatcttaatatcgatttttcgttttactaagatttcaccagatccacgacatttagaacatggtttttcaatgaccttaccagagccatggcaacgagaacaagtacgagcagattgcatacgaccaaatggtgtattttgaatcacaacctcttgaccagagccatgacaattagggcatgtatcaactttagatccaggttctccgccggtaccgtgacaatgattacattcttcatgacgttgaatgttgattgccattgatttaccaaaggcagcatcctcaaaggatatatctatgtcttcacgaagatcattgcctttttgaggcccatgttgttggtgtccaccaccaaacatgccaccaaagaaatcaccaaagatatcactgaagccaccagcttgaccaccgaaaccgccaaagccaccttggaaaccaccggcgccagcgccgcctccttgtttgaaggcgtcgtggccgaattggtcatattgagcttttttagtttcatcagacaatacttcgtaagcttcgttagcttctttaaactttgcttctgcttcctttggattatctttatttacatctggatggtattggcgagcctttttacggaaggcttttttaatttcatcttgggttgcatttttgctgacccctaagatgtcataataatctcgtgccattagttaccaacccttcttatttcttatcgtcatcaactacagtgtaatcagcatcaactacattatcgtcagcttttgtttgttcaccttgtttagcatcaccagcagcttgttgtgcttgttgagcagcagcatacatttgttcagctaatttgtgcaaaggttgttccaaagcttcactatcttttttaatatcttcaatgttgccagcttcgatggattttttcaatttatccttagcttcttcaacttctttcaacaatgcagcatcgccattaccttcaagatctttcaaagctttttcagcttggtatactaaggaatctgcattatttttaacatctaattcttcttttctagctttatcttctgctgcatgagcttctgcttctttaaccatgcgttcaatttcgtcttctttcaagccgctagaagaagtaattgtaattttttgttctttttgagtacccaaatctttagcttttacatgtacgataccattagcatcgatgtcgaaagttacttcgatttgaggaaccccacgaggagctgctgggataccatccaagttgaaacgacccaatgttttattatctgctgcaaattcacgttcaccttgcaacacatggatatctacagatggttggttatcagctgcagtggagaatacttgagatttagatgtaggaattgtagtgttacgatcaatgatacgagtaaatacaccgcccattgtttcgataccaagagacaatggagttacgtcaagtaacaatacatctttaacttcacctactaatacaccaccttgaattgctgcaccgatagctacgcattcatctgggttaacgtttttagttggttctttacccaatacttttttaatagcttcttgtacagctgggatacggctagaaccaccaactaacaacactttatcgatatcagatgcagataagccagcatcttgcatagctttacgagtaggttcaatagtagcttgtaccaaatcagcagttaactcttcaaatttagcacgagtcaatgttacatccaaatgtttaggaccagtagcatcagctgtgatgaatggcaaattgatgttggtgctagctacgccagacaattcaattttagctttttcagcagcttcttttaaacgttggtcagctaatttatcattggataaatcgataccagtttcttttttgaattcttcaataaggtagttcatgatacgttggtcgaaatcatcgccgccaaggtggttattaccagatgttgccaatacttcgaatacgccatcaccaagttcaagaatggaaacgtcaaatgtaccaccgccaaggtcaaatacaagaactttaccatcttcgtctttatctacaccatatgcaagagcagcagctgtaggttcattgatgatacgaagtacttcaagacctgcaatagaaccagcatctttagtagcttgacgttgagcatctgtaaagtatgctggaacagtaataacagcttgttttatatgttcgcccaaataagcttctgcgtcagctttaattttttgaagaatcattgcagaaatttcttgaggtgtataagatttaccttctacagttactttgtagtcagaacccatatgacgtttaatagaaataattgtgttttctggattggatacagcttgacgtttagccaattgaccaactaaacgttcgccattttttgcaaaaccaactacggaaggagttgtacgtgcaccttcttggtttgtaataaccgtaggttcgccgccttccataacagcaacacaagagtttgtagtccctaaatcaataccaattacctttgccataatatatgacctcctaatacttataatctattcaacaaccttaaccattgctggtcgaatacaacgaccatccacagtatagccagtttgcagtacttcacataccgtatcagattcatattcatctgatggtacgcgcataattgcttgatggaaatttggatcaaatggtttaccaactgcatcgataacagctaaaccatgcttagacaacatagccatcaagttttgatgaatcatgataaatccatcaaggaatacctttgtatccccttctgcaggagcttgtacagctcgctcaaaattatctaatacaggtagcaaatcttttaggacatcgcccttaacaaagcctgccaactgttctttttcttgattagtacggcgtttaaaattttcaaaatccgcttgtaagcgtttataacgattatcaaaatcggcttttaattcttctaacacctcacttgcatcaactacagactcttcagcattttgcacttccgattgttccttcgttgcttctgtaggctcagaaatttcttcgtctaccacatcttgtttaattttttcttcagacatgccttatcctttctatgtttgatttcttgccatcgtttccattaaatgtttcatataggaaagcatattaataattcgactatattccattcgcgtagggcccaatatagccaatgtaccaagttgattattatcttgagaaaaatcagtttgaataagactcatatcacttaatgcttccatttgattttctgaaccaatcttaatcttaattggtttgtttgaattatcttgcaatatgtgacctaattcttgttgttcttctaataatgaaagtacaggctgtaccttttcaaccgttttaaattccggttgtcgtaacaactcagtagtaccaacggaataaaataaacgtcgctttgtgatggcccttaataaggtttctccgatttgtaataatacggattttgaaccgtctatgtgtgcgataattgcacttatttgagccgatgtaatatcacgtaaaagcttattttgaacggcattgctaaattgtatagctaatcgttgtaattcatcagctttcactggtgatataaaatacatcaattcattatcaagtgcaccggttgcagttattacaaccataacagcttggtgagcatcaagaggtaaaatatgtatatattttaacattgcttgatcatgtccaggggctaataataagctcatactatgactgatttgagaaactaatcgagccatatgtaataacatttcattgccagaaagctgcgtatcattccatatagaatggatttgtttcacatcctcattctccactggaccttgatgcatcatagaatcaacgtataagcgatagccttttgacgatggtattctaccagctgatgtatgaggtttttctaaatagcctaaatcctcaagatcagccatttcgtttcgcaccgtggcaggactaatacctaagttataatttttagcaatcgtcctagaaccaacaggctcagcagattttacataatcctctataatcgctcgtaagatgcgttgttttctttcatccataatgacacctcacttgttagcactcaaaatattcgagtgctaatcgcatgtataatattaccatacaaaaataaaatgtcaagtaaatttatccttaaaaacctaataaaatcaagtttagtcaaaaagacaatgtgattttacagaataataggtcaaaaagacaaccaaatagatatggaaaaatagtcaaaaagacaaggcctatctatatttataaggttttatagaaatataaatagctcccagtcaatttgatatgtaccccctttactggacactcagtaaagggggtattttcatgagatatagttatgaatttaaaaagaaagcaatagaattattctatcaaggtgaatggccagaaacaccaaatggagtatcgcctcattcttttcatgaacaaataaggtattgggctaaacaagaggagttgcatggtccagatattaataagttttatggagtaaaaaagaattggtctacagaggataaatatgagttagtatgtcaagtattagctggggaatctttacgttccgtagctattgttgctggaattaatagtggtctactatatcaatgggttcataaatacaagactttgggatacaatggtcttatcaataagcctaaagggcgacgaccaaaggattctgacatgaaagtaacaaagaatatttcacctagacaactcaatgagagtgaatacgaggaactcattcgcttacgagctgaaaatgcttatattaaagctgaaaatgaagtcataaaaaaagagattgccttgagagaagaaaaggaagctgcgcgtctcaaggcgaaaaagcagcgattatcaaaatactccgaaagcaaggatatcaactaaaatatcttttaaaagctatgggaatggctaaatccacctattattttgagctctctaaagtagatcttgtagatgaaagaaatatacaacttaaagaggaaattcaaaagatttttacagagcataagggacgttatggtgtgcgtcgtgtatatcaagaacttcttaatcgaggttttatagtcaatcataaacgagtacaaagacttatgaaaatcatggggctcgcaggaaagagaccaaaagaaaaatatcactcttataaaggtcaagtaggcaaaatagccgataatattatcaatagagactttagtacaacagctccatttcaaaaatggactactgatgtatctcaatttaactttccatggggaaagtgttacttatcacctatcttagatatgaacacgaatgaggttatttcctatgacttggcattaaggcctaatttagaacagatttctcgtatgttagatagagctttcaaaaagtatcctaatctttcaggattgatttttcactctgatcaaggatggcagtaccaacataaatattttaggaacgcacttaaagaacatggaattattcagtctatgtctagaaaaggaaactgttatgataattctgtaatggagacatttttcggtaggttgaaaacggaaatatattatggctgtgaaatggaatatccatcattcaatgcttttgcgggggcaattgaagaatacatcaactattacaatgataaaaggattcagaaaaaaacaaaatggatgccccctgtaaaatacagggaagcatccatgtgtttaggctagtaaataatatgtgtccaggaaaatgggtacatatcaatttatcactaggagctattgttaaattataaagttttattttctaatggattgccaagacgttctaacaatttccccatccgttcctttggttccccattttctgcataccaatcgatcagtatatcagcagccttctttgcttgttcaacagataatttacgcattagtattttccctgcttcagggcgcataccagtattaccacctacggcgagcataaatccttgagatgtaccaataaaggcaatatctttaaccatagaatcaggacaattacgaccacaaccactaattcctattttacatttgtgacttgttttacgaccataatgtttacgttctatataatctgctaattcagcagtctccatctgaccgtttttacattttcctttacctacacaggcaattaatgaattgacacctctatgaataaccgtagtaaccccatcaggtaactcagcaatcaaagcctctttatcatccttatcaatacctgtaatttgtataccagtcactacatgtctaaaggaaccaccgtatttttcagctaatgatatacatgctttcatttggtccaaagaaaattcattatgtaatccatgtattataacagatgtcttcatctctcctcctaaataagcatgcatattcatcatcatcctatttattctaacatgttacttattgagaaactatgagaaatcttactcttttatgaattgactaaacacataatttccatgcttagcaccttctggcgtaagataatataagtcgccatcttgtattattaaattcttttcaattaaattatctaaaatagagccatatatatcttctaatcgtatattaaatctgttagcaaaatcgactgtattgattccccacttggttcgcaagcttaaaaaacaataatcttctctagctcttttggaatcgataacttcctcatctacaacaggaaattcaaagcagtctatttttctagcataaggcatgacattgcgattattagctcttcttacactatcaaaaaatgaatgagcaccagcaccaaaacctaaataatcacaatattgccaatattttagattatgtttactataggccttatctttcgcaaaattggatatttcataacgctcaaatcccaaatcttgaatcccttgcatcatcatgtcatacatcgtatcctctgttgattcatcaggtaaagaaatgactcctttatcaaccaaatgatataatcgtgttccttgttctacttgtaaaccataggtagaaatatgattaataggcaatgtactaacaatatctaaatttttattaatttcatcagttgtttgattcggtaatccatatattaaatcgatattaatatcttgaaatccttccttaaaagcccattgaactgcatgtatagcatcctcacgattgtgacttctatgtaaacttactagagatttatcattaaaagtttgaaccccaaaactgatacgagagaatcctaacttatgcagcccctttaaataagcccgatctacctctccaggatttgattcgatggtaaactgacaatcaggagatacattataggtagttttaatggtattcaaaatttgttctaactgtaataaggataattccgtcggtgtaccgcctccaaaataaacagtatctacaagtttagtacgagatttaggatatgcatcaccgaacatagtcatttcttgaaccaaggcatacagatatgtatcgtaatattcctctaaattttgatacgctgggaagtcacaatatatacatttttgtttgcaaaacgggatatggatgtatatccccatatcccgctgtacaaacaaatcgttacgatttgtttccatattaatcttctacctttaaaattgccataaatgcttcttgtggaatctctacagaaccaacagctttcatgcgtttcttaccggccttttgtttttccaagagtttacgtttacgagaaatatcgccaccataacattttgctaaaacgtctttacgccaagcttttacagtttcacgagctacaatttttgtacctactgctgcttgaataggaatttcaaacatttgacgaggaattaattcttttaatttctcagctaatgcacggccacgtgtagcagcacgatccttatgaacgatgatagataatgcatctacaggttctccatttaacaagatatccatcttaaccattggagattgtttataaccaatcaattcataatcaagagatgcatacccctttgtagcagattttaatttatcaaagtaatcataaatgatttcgcttaatggtaagtgatatacaacggatacacgcgtttcatccaagtattccatggattgatattcgccacgtttatcttgagacaattccataatagtaccaacaaaatccttaggtacaatggtcgtagccttaacatatggttcttcaatataatcgatttccgttggaggtggtaacttagcaggattatccacttctagcatttccccatttgttttatataccttgtagttaacagatggagccgtagtgataagtgttagattatattcacgctctaagcgctcttgaataacatccatatgtagtaagcctaagaaaccacaacggaaaccaaagccaagagccaaggatgtttctgcttcatattctaaggcagcatcattaagctgtaatttttctaatgcatcacgaagattttcgtagtctttagactctgtagggtagagaccacaatataccatagatacagccttgcggtaacctggtaatggttcaggtgcaggattatcagctaatgttaccgtatcacctacgtgacagtcagctacattcttaatacttgctgcaatgcaacctacagaaccacatggtaattcttggacaggcacaagatttggtgtaaagataccgagctcagttacatcaaaatccttattatcatgcatcatacggattgtatcttttgttttaatagtaccttcttttacgcgtacataagcaatagcacctttataagcatcaaagcggctatcaaaaatcaatgctcttgttggttcatcagatttatctggtggtgcaggcaccttatttacaatagcttctaaaatatctggaatgccaatgccagatttagcagaacataatactgcttctgatgcgtctaaaccaatgatatcttcaatttcatgtttaacccgatcaggatcggcagaaggcaaatctattttgttgataacaggaataatctcaagatcatgttctaaagcaagatacacgtttgctaacgtttgcgcttctacaccttgtgcagcatctacaacgagtaatgccccttcacaagctgcaagcgaacgagatacttcatagctgaaatccacatggccaggagtatcgataaggtttaaagtatactcttctccatcttgtgctttatacaaaattcgaacagattgcgctttaatagtaataccacgttctcgttccaaatccatggagtctaggacttgcgcttccatttctcgtttttgtagagtaccagtatattcaattaatctatcagcgatggtagatttaccatggtcgatatgagctataatacagaagtttctaatctttttcgttgacatactatatgaacaagttcaaggaacttgtattctcctttctaacatacgcgatcgataacagcacctcctaataattgagtgccattataaaaggctacggactgacctggtgtaatagcccgttgtggttcatcaaagataacctccatcgtatcgtcgtctaagatacgtgccgtacaaggcgatgggttggctgcgtaacgaattttaccttccgcctttaactctttatggattgtatcatctaagaaattataaaacttacaaatcatacgatttgtaaaaagtcgttcattaggacctacaataacttcattgcgttcaccattaaagccaataacatataaagggtgtttataagcaatgcctagtcctttacgttgaccaatcgtgtaattgaataaacccgtatgctttcctaatatttcaccatcttcagtaacaatattaccagattttggtttggttttcatttcttctactacgagtttttgataattaccatgcggtaagaaacaaatatctacactgtctggtttcttagctactggcaaatcatattcagcagctaatttacgcgtttctgttttacattggccacccaatgggaacataagatgactcaaaatacgttgattcatattgtacataacatagctttgatctttagttgggtcaacacctttatgcaattcatataaaccagtgtcttcattataattaacctgtgcataatgaccggttaccatatgtgtagcaccaagttcaagggctcgattgagcatcaaatcaaatttgatatttttattacagaatacacaaggatttggtgtgcgcccataagcatattctttcacgaaatagtctactacattctcgtagaatacatcgcgagcatcgataacatgatgctcgataccaagaaaatcacacattttcttagcatctgttacagcgagaggcacctcatcatacgatgtcccactcacccatagccatagggtaataccaaatactttatagccttgttttagtagcattgcagcagttaaagaactgtctacgccgccactcatagctacagcgataactttttccatactttctccttttaatgatctcttgatcataaaactaatcagggtgaaagcctgacgtgtaaaacactagttcggtgtaaaagtccgagtagtattgctatgaaattatagcaacttatattatagcctagaacgaggtatattgaaaagatttgaaacaaaagaatctcttcccatcaaagaaagagattctaattattatctatgttttaataattcctctgccgcacctaaaatgccgagcatagaatgttcaaatacaagaccaccttgcatgaagattgtatatggagggcgcacaggaccatcagcactaagctcaatagatgacccttgtacaaaggtaccgccagccatgataattttatcttcataaccaggcatatccccaggaattggatgcacatgcgcatctacaggagagtaagcttgcatgcctacacagaaatgctccatttcctcgccattttttaaattgatggcttgaatcaaatcataacgctctgcatttaccttaggaaatacttcatatcctaataattcgcctaccgcagctgtatacacagcacctttaagggcttgtaatactacatgaggagccataaataggccttggaagaatagacgatagccaggagcataagaacccatatgatcaccaagccctggagccgtcaattgatatgatgcatcttcaactaaatcctcacggcccacgatatagccaccggttggtgctaaaccaccgccagcatttttgatgagagaacctgccatgatatcagcaccggcctctaatggctcttgaagctctgtaaattcaccgtagcaattatctacaaagcaaatggtttctggattcttagctttcacaacatcaacgatcgctttaatatccgcaatcgacaatggctcacgagtactatacccacgagaacgttggataaccacagcacgtgtattggaattaacagcctgtcctatagcgtccaaatcataggtattattgttaaggggcacttctgtataggtaaaacctttttcaatcaatgaacccttaacaggacgagtatagccaataacggattgcatagtatcataaggagctccaacggcatagataaattcagttcctttagagccatttcccataatagccatcagtgtagtggctaatgcgtgagtacccgatacaaaatgtggccgcacgagagccttttcgcctttaaatacataggcaaatacttcatctaatttttcacggcctacatcgttataaccataaccggttgtgcctgtaaaatgatagtcagatacttgacactctttaaatgcttctaatacctttttcgtatttgctaatgcaataggttcaaactttttaaattgtggttcagccatttcaagggctttactacgtatttcttctaatgtcattctctatcctttatctattaaaatcttgagtcaattatattacaagccataccataaatttcggcttctgttgtttgtgagtctatggtaatccattctatgtacggcatacgtttataccacgtaatttgtcgttttgcaaagtgacgcgtatttttctgaattaaatctacacatgcgtcataactgaataatccttctaaatactgaacaacctctttatagccaatacctttaaaagcctgacaatttgggtttactccactttttagtaattgtttaacttcatccactagacctttttcaaacataatttctacacgacgattgattcgatcatataaatcactacgttctcgttgtaatccaataactgggcctttataggataaaccctcttttgtttgctttattaacgatttataatcaccagcagtcatcaattcaatagcacggtacaaccgatgtttatcggtatatttaatttctatgccacctttttctgccaaattctgagcatactcacgtaatccatctacgccatattcagtatataactcatctaattcgtttcttaattttgtattaggctttatatcattaaaattatagttttctaacaaagactgaacatataaaccagttccaccagataagattggtacaacatgattgtcatttaattgatctattaatgatttggcttgttgttgaaagatagaaacactgtaatcatcgtcaggttctaaaatgtttataagatgatgaggtacagcagctaattcgtctgttgtcggctttgcagtaccaatatttaaatgtttatacacctgatacgcatcaccagaaatcacttcgccattatagcctttagccaatgctaatgttaagtcagtcttacctacagctgtaggacctacaattgttattaattttttcattgtaaccccttatcactgtaaacaccatatcctatacgactatacttgccgcccacccatgtggatggtgaaaaatctttaaatacagaactaaacggtcgttctttaataataaaacctaatcgacaaacgcgtctagcttcctgaatcacagaatctgtgattctaccttccgaagtatgcccacgcaacggtttaaattgaggactttcttcaataggaacttcaaacatagggtcaaaatataatatatctacactatcgttaggtagcccctgtaaaaagctttcaaaattatcatgacgagcatcaatacgacgtagtgcatttgttacagtcatatcctcatgagtataatgtttcaatccaaaccatgtagatagccatatagaatatgacgcttctaatcctataatatgtgcattagggaatgcataggacatgataatactatcactgccaaggcctagtgtacaatcaactatagatatggaattagatgattcagttgttaacaattctatagcgtttacaaggtggtcatcatctccgcgttgtaagcgtaaaatacgcaattgagccatggataaatgaaatctatgttcctgttcttcattaaaatgaattgtcaattgattcttagaaacaaccgcaataggtgtatcctctaataatagttcagaaataggtctcttttgacgatttagatatactaaatctaatgatttagctaattcttttgtttcttcttttatcgctgaagacgctttttgtgaagtagtaataatcatattaagaccttaagaataacttacccaattcatcaggtgtaaatttaataattgttgggcgaccatgaggacacacataaggtttatctgtatggaataaatcttcaataagtgttgtcatttggtacatattaagattatgtccagatttaatggcccccctacaagatgcataagctagcatttcatgacgcaattgagctttagtaggctgttcatggtcatgcaaaaaagtaaatacataagataaaatttcctgagctttactttctactagatctacaggtgcaccaactaatttgatttgattaggaccgccaagctctacctcaaagcctaaatccaacaaagcgtcctgttcattctcaacaagattcatttcatcctttgtggcattgctataagtcggtacaagcaggctttgcattggtatagcttccgaagatttacataaacgatcataacggacacgttcgtgtgctgcatgctgatctataatatataaatcatcaccttttttggctaatatataacaggatgcaacctgccccattggtaaaaagcctgatttttgtatatctctagactcatcttctatatgctgttcttgtatttgatggaatttctctttatcttccgtcgtatagctagtataagctgtgggaactgatgtaaatgaggattcctcaaatgtttcctgttcatacgtcgcttttggagctggtggtgtaaaccctttttcttttaaggcatctacaaaatcgcgtgtatcctgacgtaatacctcatatcccttagtgcgccgtccgccaaaaaccttatcatagtcaatggctgtagcaatatgttcagccgtatcattatgatcactcaaaacttgtggagcttggtacgagttatagccactaccttgtgattcagtttctaaaggttgagtaaacgatgatgattcacgttcataccgttcatgaagagggttatttaaggcatttagaattgcatgatacacagctttaaatatgattttatcatcttcgaatttaacttcactcttccgaggatgtacattgatatccaccatactagccggtacagttatatgtagtaaaaccaatggatacccagattttggtaataatgcatggtacgcattatctatggctttcaaaattgttttatctgatataactcgattattgacaataatagtttgccaaatacgcgtgctttttaacaatgttggttttgatacaacaccttcgatatagatatgttcactttcataagcgataggaaatatatcattcttggtcttataaccgtataatgcagctactgtatcttgtattgagccagatccgggtgtaataatggctacacgatcatcaatagttaatttaaaagcaatgtgcggattacttaacgccaatttaccaacaatgtcttgaattttagatgattcagttcgttcggttttcagaaatttacgacgagctggtgtattaaaaaataattccttcacttcaattgtcgtaccaggtgctgcaccataaggaatacaatcagtaaaggttcctccatcgatgaggatacgtgtaccaagttcttggtctacagttctagtagtcaaaacaaaatgagaaacagaggcgatactcgccaaagcctctcccctgaaccctaaggatgcaatatcgaataaatcctctacattttgaatcttagaggtagcatggcgcaaaactgcaaggcgggcatcttcttctgtcattcccttgccattatcagtaatgcgcatatatgcactaccaccttcaccaatttccacttcaatcgatgtagcaccagcatcaatagagttttcaatcagttcttttacaactgatgcgggacgttctacaacctcaccagctgctattttattgattgtagtttcatccaaaacatgtatggttgccattatttaccgcctccattacgcgcctctgcttgtaactgatgaattgcatttagcgcctctataggtgtcatcgtattcacatctatagccaacaaggaatccacaacagaatgggtgaataaattgccaaaatcatcttgttcgatagatggtttagtatacttaacaacagaatctgatgttataacgcgattatttaaatcatcggtgtcggtattttgttcctctaaggattcaagaatcacttccgctcgtttcaatacttgagctggtaaacctgctaattttgctacgtgaataccatagctcctatcggcaccacctctaataatacggcgtaaaaaggcaatatcttttcctttctcctttacagctaccgtgtaattcttcaaacgagggtatacgtcctccaaaggtatcaattcatggtaatgtgtagcaaacaatgtttttgcatgaatatgtttacaaatatgttctaccacggcttgtgcgatacttaaaccatcaaaggtactggtaccacgaccgatttcatcaagaataattaaactcttagaggtagcattttcaagaatataagcaacctctttcatttctaccataaatgtactttgacctgtagaaatatcatcactagcacctacacgtgtaaatacgcgatctacaggagaaatagtggcctctctagcaggaatgaatgacccaatttgagccataatcataagtatcgcaacttgtctcatataggtagatttaccagccatattaggtccagttataagcataaattcttcatcatcatggttgagtactacatcattaggaacaaaaacctctctttttaagaatttttctatcaccggatgacgaccatcacgaatattaatttgaccattcataacgatattcgggcaaatatagttagactcataggcaacagtcgctaatgatgcaagtacatccagttctgccaaagctctagctgtttcctgaacctttttaataacgcctttgatttgatcgcgtaaatcttgatagagctgttgttctaaggaaacaattttttccttggcacttagaattttaatttcaaattcttttaaatcaggtgtaatataacgctctgcattgactgtggtttgtttccgaataaaataggccggtaccttatcaatttgagatttacttacttcaaagaaatatccaaaaaccttattatattttgtttttagtttgaggcctgtttcttctctggccttatcctctaacttttgaagccaaacctcactattggtggctaaggatcgtagttcatctaattcttcgttatagccatcccgaattacgcgtccatctttcaatgttaatgctggttgttctgcgatagctcgattcaataaatcatatatatcagcatgatgatcaatgcgagtattaatagatgacaatgaaaggccagaaaattctttaagaagattcttaatttgcggtaatacttggagggattcacgaagcgatgtaaaatcgcgaggcgatacagaacctgtttcaatacgacctacgatacgctcaaaatcataaatacaatctaaataaccttgaatttcgcatctttcaccattgcgagatatgagttccgcaacagcagcttgacgtcgttgaatagtagatatatccgtaagagggctttccaaccattgttttaataaacgggcccccataggtgttaatgttctgtcgagcacatctaataaagtcccctttacaccgccatcccgcaagttgtgtgtaatctcaagatgacgcaatgaggatgtatctagaatcaaacgattgcctacatccatctgatgaacataattaatatgggctatttctgttttaattacatcttgtaaatataagagcataaagcctaatgcagctaatacatcttcctccataaggcccatatcttgaaagtgattatttgcaagtttacatgcaaaatctacactttcaaaggaagtaaatggagacaatactacattattaaattgattatgaatgaaatcaacgatagattgtggcaaaatagttccttcaggaacaatgatttcagcaggtctatacatgctaagagaatcatatatttgacttatattgtcttgaggtacacgatcccaaatgacctcacccgtagatacatcggagaatacaagaatccaagcctctttaactaaatagaatagagctaaaaagttattactccgtgcatcattaccattttctgtcattacggttcccggtgtaatgacttggataacatcccgcttaacgatgccttttacggccttagggtcctctaattgttcacaaatagcgaccttatacccttttttaaccaaagtttctatgtaactttcagcagcatgaaaaggaacgccacacataggtgttcgttcctcattgcctgttggtctacctgttaaggtaatattcaattctcgagatgcaattaatgcatcttcattaaataattcataaaaatcaccaagtcggaaaaatagaagctcatcgctatgtcgcgatttaatatctaaatattgttccatcattggtgttactttttttgccattcttaccccttttgaatggtaccgtagcagacccatgtttgtgctttatcaatataggctggtacagtatcaccgatagttaactcatcatcttttgggaatagtaccattttattcccggacgtacgaccgaaccacatggtttcatctttagcacttggaccttctacaataatatcaaatactttgccttccatagttttattgagttctaaagaaatttcattttgaatatccatcaattgttgtagacgaacgcgttttacttcttctggaacttgctcatccatggtagcagcaggcgtaccagaccgtttagagtaaataaaagtataagccatatcgtagcgaacatcttttaataattgaagcgtctgttcaaaatcttcctcagtctccccaggaaaacctacgattatatcggttgttacaactacatttttaattttctctctacagtaggataataattctttataatgttccaccgtataatgacgattcatcttctttaaaattctatcagaaccggattgaattggtaaatgtaaatgcgtaacgatattactagagcgccccaatgcatcaatcattgatttggtcatatcttgaggatgactcgtcatataacgaatacgttcgatgcctgggatatgatcaagggcatctactaatgtgccaaaatcggtaccatctttaaaatctaagccataggaatttacattttgtcctaacaacgtaatttccttaaacccttttgcacccaactctgttacttcttttacaattgcttctacgggacggctaatttcgcgaccgcgcacatgaggaacgatgcaataagtacaaaatttattacaaccattcataatcggtacccaagcaaaaaatgtaccattaggttttgcctgtaattctggaagtactgtattatccatgtcaacattgatttgatgcttatgggtacgttgaacctcagcaatcatttcattaatatgttgaatattatgagtacctaggacaatatcgatatgaggtgcgcgtttaaacatttcagcttgatttttttgtgccatacaacctgtaatagcaatgatcaaatttttatttttttgttttaaacgttttaattcaccgatacgaccaaatactttcgtttctgccgtttcacgtactgcacaggtattcaataatattaaatctgccgattctacatcatcggtcggtatatagcctactgtttcaagttgatgtgaaagacgctcagaatcagcggtattcatttgacaaccataggtatatatataatatgacttcattctatctcctaaatatgttttataatcttacgttttgtttctacaatattttttacttttatagacatccgctctacagacatgcccgtaatatattctaattcgttgcgtacagatttttgtacctgttgcatcattggtttaactggatgaccttgttcaataacaactgacatatctaatattaaaccattctgccctttagagctctttttgaaagcgatgtctgatgaggcatcaacaccaggaaccttttttaggccatttctaattaatttaatgatgacatcatcatcaaatgttagacgaccataataactaaaggctggtctaacaacggaacgttcaaagccttcagatccaatttgaccaattttatcaggatcttgtttacgcaatgtacgtcgtctccaaatcgtcttaattggatcgataagatatcctttaaagtgaggctttaattccatggttggcacaggaataatatgcttaccttcctttaaacgagcatactgtgctttttcaatttctttaggggttgccacatcttcgatgcgaatatatcgatctggttcttgaatccccaatgcctttgtaatttttttgaccatattatcggatgtaccgataatcatcaatcgattcggcttgataacatctaattgactacgaacctctttaacttgaaccggatcttgaaatatagcacgacgaacagcctttaatcggctagattcttttttggcagaaaatccagctacaattttattatcatgaattaaaataccatcatcaataatgcattccacactattttcatgagctagtacgagagcccgatgacttttaccggtcccactaccacctacaaaagcaataacttccatagtacacctcacatctataattacgcagatatacaacgtatgcgttcaataaattgatttactagattactatctacaacatattcacctaaatgataagggtatcgattaggtattccatgataatcagatccacctgtaacaaataaatttcgttcttttgccatggttaaatattttatttcatcatcataatcatgtttagaatgatatacttctacaccatcaaaactatagtttaatagttccgcgacatactcatcattacggactaatttgggatgcgctaatacagctagtccatttgcattatgaataatatctaatatttctggtacttctaattttactttaggtatataacacgggctttttgaatttaatataccatcaaatacatcttgtacatctttggcatagccatgatctattaataatctagcaacatgtggtctaccataggacttagtatttggatataaattttgtaattcagaaaaagaaatgtcatagccatgagcaatacatcgactaataatttcttttattcttgattcacgtttttctttgaaaaattcaatgaatttccgtaatccttcatcatgatgattaaatccataacctaagatatgaatatccttacctttatagtgaccactgaactcacaacctgtaataatttgaatagaactattattttgtaacattacatctataccagcaatttcatcgtgatcagttaatgcaatcattttcaaatcagcttcaatagcatgctgtaatagctgttctggtgtttctacaccatcagaaaatgtagaatgcatatgaaaatctacacgcataattacctccaaattattacattaccctatcattttattatgacttattccgcttgtttattcaagtttttacaaggtattaactaaaagttttcaatatgaaattgaatgaattcacatatatataaatataaaaattgcgattccaatgagctttcactagaatcgcaatttaattataattggctcaataattcttgtaccttgctagatacttcatcgattggacaattaatagcttcacctgttttacgaacgcggatttcaacctcattgctttccaacgtatttttacttactgtaatacgcaatggatagccaataagatcagcatctttaaacttaacaccagcccgatctttacggtcatctaataatacatctactttattgtttaacaatgtatcgtaaatagatgtacttgtggacattagagcttcatcttttgcgttaataggaacaataactacttcaaatggagctatagcacgaggccaaacaataccattttcatcatgatattgttcaatagctgcagctaatgtacggctaacgccaataccataacagcccataaccattgcattaggacgaccattttgatcaaggtatgtagcttgtaaactttcagaatatttagtacctaacttaaatacttggcctacttcgatacctttactgtattctaaaggactatggcattcagggcacacatcgtctttagtaatcaaacgaataggtgctacgataatatcttctgtattaaaatcgcgtttaggattgatattaatgtaatgagcatcagctttattggcaccaccacaaacattgtaagtttccataacagattcatctacaacaatagcaaaatcatcagtttgtttaagacctactgggctgataaaaccagctgtcaatccaaccttatccaattgttcaggtgttgccatttcaggctctacagaaccattaacagcatgttgaacagccacttcgttcacatcatgatcaccgcgaaccatagctagaattactttatcttcaatagcatatactactgctttaatagttttttccaaaggtaaattgagcatttctgcaacagcttcaatagtagatgcatgaggtgtatctactacttctaattcttttaaagcttcttctgcttgcttcataatgccaggtttaccgatttcaatattcgctgcatagtcacaagcggaacagtgaataatatctgcttcaccagcttcagcaatagccataaattcatgggtattgctaccaccaatagcaccgctatctgcttctacaggtctaaaagtaagaccgcaacgagtaaaaatacgactatatgcatcatacatatttttgtaagatacatctgccgctgcatcatcaatgtcaaaggagtaaccatccttcatgataaattcgcggctacgcattaaaccatatcgtggacgacgttcatcgcggaatttactttggatttgataaagattaactggtaattgacgatatgaattaatttcattttttaccaatgttgtaatcatttcttcatgagttggtcctaagcagtactccacatcatggcggtcattgatacgcatcatttcagcaccatacgcattccaacgaccagattctttccaaatctctgctggttgcaaaataggcatcataatctcttgtgcaccagaacggtccatttcttcgcgaatgatagcttcaatttttttgatgcttcgccagcccaaaggtaaaaaactatataaaccattagcaaccttacgcataaaacctgcgcgcaacataagctgttgacttaccacatctgcatcagatggaacttcccgcaatgttggggcatataatttactggctaacatacaattactccttatcaattgtttctaaatattgatctatttctctaaataaagtatctactagttcagattcgggtacggtttttaaaacttccccttttctgaatacgataccttgacctttgccaccggcaataccaaaatcggcttccctagcttcaccaggtccattaacgacacatcccattacggcaaccttaataggtgcagaaatggatgctagacgttcttctacaatgcttgccatatcaaataaattaacttggcaacgaccgcatgttgggcatgaaatcatggtagctccaaagtttctaagacctaaattgcttaaaatacttttacccacctcaatttcatgaatagggtcacctgttaaggatacgcgcaaggtatcaccgataccatctaatagcaatgcaccaatacccattgccgatttaatcgtaccttgtttaatggtaccggcctcagttacacctaaatgcaatggatatggtattttatctgaaagctttctataagcttctaccataagtggtacttcggtagctttaatagaaatcttcatttgtttatagtccaatttctctaaaatacgtacgtgttccaatgcggtctcaaccataccatcagctgttggatgacctccataagcgtctaatatatgttgtggtaaagaaccagcattgacaccaatacgaattggaatttgcttaggtttagccttttcaataacggccaacaccttatcctctccaccgatattgcctggattgattcgaaggccatctacattattatcaatggcttctaatgctaatttataatcaaaatgaatatctgctataagaggaatagttattcctgcacgtactgcttttaatgcttttgcagattccattgtaggaactgcaactcgaactaattcacaaccagcatcagctaatcgattgatttcagcaattgccttttccgtatgtacaggatcagtagtaatcattgactgaatactaacaggtgcatagtcgccaatttttacattgcctacatagataccatttgttggttttctagtaatcatatataactcctaactatgacttatttatagtaattgtagtatatcttttgcagtagcatatacaaatattgtaactaatagcgcaataccaatcatttgaatatacatcaaagctttaggcggtaatttacgtcttgtaatggcctctattaaaatgatgatgagatgcccaccatcaagaactggtaacggcaaaagattgataacacctaaattaatacttagcaatgcagcaaaactcaatagaggtgcaaagccttgttgagctatagaacctgccatatgtgaaatgccaaccggtccagatacttcagcctgctctgtacctacaaccatttcacgtagtccatctaccatagctacaataatatatcctgttttctgaaccgctagtatgaaagaatcccctatactatgaggtattgtttcatacgcttgatatatacctaactttggtgtatccttttccatctttggaattacagtagtttcaactgtttcaccattacgatttactacaacggtaacaccatgattagctgtgcctttcaaacgttcagaaatctctgaccacttggaaataggttggttatcaatggaaagtataatgtctccaccctgtaattttcctaaatctgcagcaccacctgtaataacactgccaattataggcttatcagtagaaaccattgtccccactgtagcatttaggccgaaataaatgactatagccaataagaaattaaaaatagcaccagcagaaataacaataagttttttataagctggttttgtatagaatgaaccatcatctaatggctcatcaggtgtcattccagcgatgcgattgaaaccacctaacggaatacaacgaacagagtataaggtctcgccatactgtttttttagcaaaacaggaccaaaaccaatagcaaattcatcaacacgcatgcccgataattttgcagttataaaatgacctagttcatgaataaacacgattagaccaaatacaaatattgtggctaaagccgtaatcatactatctcctatttataaattctgaagcttttatgcgagcccattgatcgatagctagtaagttatcgagagtaaaatcatcttctcttcccatggattccaaaacagcggtaacgattttatagatatcgctaaatatgatttttccatctaaaaatgcatatacggcagtttcattagctgcattaaatacggctggcttaaaaccaccaattttaccaacttcatatgctaaatttaaagcaggaaaatcatccactctaggaggcataaactcaagagtgtgtaattctttaaagtccaaatgtttcatatcaaggtgcatccgtttaggatatgttaaagcatattgaattggttcacgcatatcaggattacccatttgtgcaaggatagcaccatcatttaaacgaatcatagaatgaataatactttgagggtgaaccaccacatcgatatgatcaaaatcaaagtcgaataaccaatgggcttcaatgacctctagccctttattaaataaagaagcagaatcaatagtaattttgctccccatattccatgtaggatgttttaaacaatcctctgccgtagcagaagcaatacgttcactaggccaggttcgaagtggcccacctgaagcagttaatatcaatgaatctacattcgatttagtttgtccttccaaacattggaaaatagcactatgttcactgtctataggtaaaatagcaacattatattccttagcaagtgccgtaattaaaggtccacctgctaccaatgtttctttattggcaaggccgatagtcttgcgggccttaatggcctctacagttggctcaataccaacagcaccaacaattgccgtaaccaccatagtagcttcttgaattgtggctgcactaatcaaagcttctttaccacctataattttagtggaaccatgataacgttctttaagaagcatatatgcttgttcatcaactacaccagctattaatggattaaattcattaatttgttgttctaataaatcaatattacggtgagcaactaatgcaacggctttaaattggtcaggatgttgcttaataacatctaatgtttgtgtaccaattgagccagtgcttcccaatatacttacatacttcataaaagccttcttttctgtttatgtttattatgcaaaacataaaattaataataatgtaaccggtgcagtaaacattaaactatcaaaacgatctaaaaccccaccatgaccaggtaatagtgtacctgagtcttttacattacataatcgttttaatttagattcaaataaatcacctaaaggtgctaatacaccacaaatgatgccaacataggcacctatataaactggtatatgactgattacagcatacacaataccagttacaacacagccgataaaaccgccaataaaaccttctaatgttttattaggacttatggacggtacaattttacgtttaccaaatgcacgaccggcaaagtacgcaaaggtatcgctagcccatgttgaaaacaataataaccatagcataactacgccccaactttcaccaacaataggcattgttaatgaactgtagagccagtcatgacgtatcaataataatgagcctagtcccattactatatatagcaaaccaaataagctataagaaacgctactcatagaatatgtattttcaccaaatgtacacattagataattggaaataatggcgaatacaaagcaagccatacttactgtataactgccaaaccacaaggatatcatgatagcgataattgaaaggtatccccacaataccggtacacgaacatgtttagccttacttagcagtataaattctcgccatccaataagtgctaataatgtaatgagtatatcatatgttaagccacctagtgtaatggcacctaatgcaataataaacccgataactgcagtgataacacgtgttttaagcatcgattattcctcttgcaagccaccaaaacgacgttctcgtttttgataggctgctatagcttctaataatgtttcttttgtaaaatctggccaatgtaaatcagtaaaccaaaattcggcatatgctaactgccataataaaaagttactaatacgataatctttgctaggacgtattagtaaatcgacatcactaaactcttgcgtatacaaatgactgctaacatattgttcagtaatatcttgaactgcaagttgtccctctaacacagattgtgctattccttgtacagtccgtactatctcatcacgcccaccataattaatagctaattgtaaggttaggcctgtattattcttagttaatgcttcggaatcagaaataatcgtttgtaattcttctgaaagtccttgaatatatccaatgaaacgtatacgaacattatgttcatgcatatattgtacgtttttttgtaaatattctttaatcaaggccatcaaaagagaaacctcttgctcaggccgtttccagttctccgttgagaatccatatactgttaatgcttttacaccgatttcatcagcagcaataacaatttcttttaatacatcagcacctgctcgatgtcccattgaccgaggcatgccacgacgctttgcccaacgcccattgccatccataataatagctacgtgacgaggcacattgtgttcatctatattaactgtagatgaggtatggcgtttaaatagtttcctcagcatacattacctccagagtatgtccaaaatcacttgcaaccataggtctatatagaatgatatgaagcatatcctcagattcagtgattcttgcgacataatagccttcagaggctatctcaaaaaagcgattaaaattatcgcctattattaccttaaaaggaatatgggcagcctgcaattgagactttgcaagctgccaaggcattccaataagactactagaattagtcattatacttctaatacgtccttttctttaacggctttcagttcatcgatttgtttaatctttttatccgttaatttctgaatttgatctaaaccatctttagcatcatcttcagtaatcgttttagctttttcttctttttttaatgcatcattagcatcacgacgaatgttacgaactgctacctttgcatcttcagctttcttatgaactactttaacaatttctttacgacgttcttctgttaattgaggaattgtcaaacgaatagccgtaccatcattacctgggtttaatcccaaatctgattgtaaaatagctttttcaatagcaccaatcatggatttatcccatggtgcaattaaaatcatacgaggttctggtacagaaatattagctacttgattaattggcgtaggagatccgtagtaatcaaccatcaccttatcaagtaatgcagtactagcacgaccggtacgaatagaagcaaattcatgctttaaagactcgatggacttattcatacgttcttcttgttgttgcattaattcttttaattccatagtggtttattctccgcgaacgatagtccctacttcttcaccttttgcagctttggtaatattaccaggaatatccatgctgaaaacgataatagggatattattgtctttacataatgtagtggatgtagaatccattacttttaattcttttgtaataatgtcattatatgttaattcatcaaatttaacggcattaggatttgtttttggatcagaatcatatacaccatcagcaaactttttagccatcaaaattgcatcagcttcaatttctgcagcgcgcaatgcagctgttgtatcagtggagaaataaggtttcccaaggcctgctccaaagataacgatacgttttttctccaaatgacgaattgcacgacgacgaatataaggctctgcaatttcctgcatttcaatagctgtttgtacgcgagtatccacaccagcttgttctaatgcatcttgcaatgctaaggagttcatcactgttgccaacatgcccatatagtcagctgtagcacgatccataccttgattgctaccagctaaccctctccataggttaccgccaccaacaacaatagcgatttctaaatcagtggattttgccaaagctgcaatttcttgtgcaaacttttcaactacatcagggttaataccaaaaccttgatcacccgctaatgcttcaccactcaacttcaaaacaatacgtttaaagtgtctttttgccatttgtatactcctctattgcaaaataagagaacacggtacggtgttctcttattatgtattaattatttaccaacagatgccattacttctgctacgaagtcatcttggcgtttttcaatgccttcgcccaaaccgtagcgaacaaaacgacgtacgttgatgttttcaccgatttttgcaatattttcattaatgatatcagtaactgttttgtcaccatctttaatgaacgcttgttctaataggcaattttctttatagaatttttcaatacggccattcaccattttttccaaaacagcttcaggttttggtttacgaccagctttaacgtcttcttcagcttctactttagcttgttccaacaatacttgtttttcatgttcgattacttcagcaggaacctcttcacgatttaagtatgcagggttaacagctgcaatttgcatagcgatatcgcgtgctaagctttggaaatcatcagttttagcaacgaagtcagtttcgcagttaacttcaactaaaacaccgatacgaccaccagcatgaatgtaggattgtactacaccttcagctgcgatacgaccagcttttttagctgcagcagccaaacctttttcacgaagaaggtcaaccgctttatcgatattaccgtcagtttcaactaatgctttttttgcatccatcatacctgcgccagtcatgtcgcgcaattcttttaccatagcagcagtaattgccattatttgttcctcctagtactaattaaggtaaggatatagtccttaccctaattatatatgttatagatttatctttcaaatgctaatcaattatgattaagtgctaacagaattattctgcagcttcagcattgccttcttcgaaggattcgccttgacggccttcaagaacagcgtcagccattttaccagccaataattttactgcacggatagcatcatcatttgctgggattgggaattcaacttcatctggatcgcagttagtgtcaactgttgcaacaactggaatacccaattttttagcttctgcaatagcgattttttcttttttaggatcaactacgaaaagagcacctggcattttaggcatatctttgataccgccaagatatttttccaatttttccatttcatgacgaagaccgataacttcttttttaggcaatacttcgaaagtaccatcttctgccatagcttccaattgttttaaacgtttaatacgagtttcaattgttttaaagttagtcaacataccgcccaaccaacgttcgttaacgaagaacatgttagcacggatagcttcttctttaatagcttcttgagcttgttttttagtacctacgaacaagattacttcgccttgggaagcaacttcacgtaagaaattgtaagcttcttctacttttttaactgttttagacaagtcaatgatataaataccattgcgttcagtgaagatgaatttcgccattttagggttccatcttctagtctgatgaccaaagtgtacaccagcctctaataattgtttcattgatacaactgccattgtggcacctcctgttaattaacctccgccgcttcatccttcgggtcacccaaaattaggcacagtaccgaagtccactgacgtgcatatttttcatacttagtaattttaacaaaaaaatattctaaaagcaagtaaagagtcagtaattacaaaagaattactgactctttatatcatagtatatatctacaatacaagacttatgatttttactcgaatctagatatattttatattagttattacgtattgcttcgatcatcttcgctctatcaggagccccaaatacagcagatccagcaactaacatggtggcacctgcatccttaattggtatgcaagtaatatcgttaataccaccatcaacctctataatagcatcattattaccagctgaatccaataaaagtttcgcttgttttactttttctacagcccgtggaataaaggattgtcctccaaatcctggattgacggacatgattaaaatcatatccaagtctccggccacatcttctaacatcgaaactggtgtccctgggttgagcgcaacccctgctttcataccagcggatttaatctgctgtatcaatcggtgcatatgaggaactgtttcttgatgaaaggtaaagtactcaacaccaatttttgcatattcttcaacataatcagccggattagtgaccatcaaatgtacatcaaaaggcaatgcagtatgtgggcggatagcttttacaataggtccgccaaatgtaagattaggcacgaaatgtccatccataacatcgatatgaagataatcagcaccagcaagttcaacacttttaatttcatcacgcaatattgaaaaatctgcggataacatagatggagctattttaatcattttaaaacctctttctttggttttgtatatcttttcgaatattcgtgtacgcatcatagcgactttcaaaaattttatgatttgccaaagcctccttgataccacaaatcggttcatgctcatgataacaaggattaaatttacaagcttctacataatcagaaaattcagggaatagtgtaggtaatcgttctaatgtaatatcagtaaattcaatagaactaaagccaggtgtatccatgataaatgaatcagcatttaaactaaacaatgaggcatgacgtgttgtatgcttcccacgtttaatcttatcgcttatctcacccgtctggaatgcaaatttttcatccactgcatttaagaggctacttttaccaacaccggaaggtcctgcaaaagcagtaatcttgtgttgcaaatgattacgtaattcatcaataccgatatgatttatggcagatgtagtgataacatgatatccaatcgatttgtacttatcgattaatacatctgtcgatgcatcaccgacatcgtacttatttatgcacaaaatgaccggtatatcagcatgttcaatcattaccaacattttatcgagtaataactcattaatgtcaggattatgagaagcaacaacaagaataacttggtcgatattagcgacagcaggacgtatcattgaattgtgacgtggcaagatagtctcaacgaatccatcttctgaaaactctacacgatcacctacaagcaaactatatttcgactttttaatacgtccccgcaccttacattcatgaatggttccaaattcatcttgaatataaaagtaaccattcatatttttaattacaatacctgtactcatacggcctctacaacgcagtatcttgaactaatgcaccatttaggtacacctgtattcgaacattgcccacaccagatacattttttacgatacggtcaccaggtttatttgtatcatcgtatataacggaagatccatcatcatcctttacgacaattttgacttcttgatttttagaaccagacggaacagttatatctacagtccctttcgttctattagaagagctttgcttagagtcatcttttttggaagaatctccctttaattcagtagctaagtttaagctactaccttcagaaacctcttcaccagcttttatactttgttctgtaacaattgatttatcatctactgaaccagcaatctgattaacaccaatattgttagagctcaatacttggcgagcatctttcaaggtcataccaacgagatctggcattttaaccttcttagcttgtgctttatttacaactaaatccacagtagtgcctttggataccttggaatcaccagaaggactttgtgcaactataacattatcaggttttccttcaacagatccttgtgagattttacctacaactaagcctaaatctttaagacgttgacgtgcttgatctacagtcaaaccagaaagatcaggaactgtaatatcaccaacacctttagatacgactaaatgtatagtacgctgttccttaactttttccccagcaccagggctttgagaaataacttgtcctgctggaacatctgtattagttacctcacttgtcgatactcgtaagtgtttatcttccaaaatatttttggccacagagacttgtttacctactacatttggtacatcaacagtggtattactccaaaaattaccataactcaagaatgcacctaaaaatgcaatcaagaaaataacggcagcaccaagaactatatatttttgtggtatagatgcaatcttactaagcatagatttctttttttcctcattaggcgtaggatcatcgatatcactgaaatcatctaatgtatctggatctacagccggaatcatttgtgtcgcaaaatcgtatggttcatgacgttgtgtttttcccattgtaaagccttgagataaacgtaagtcccccatcatttcagatatggaatcaaatcgatcagtaggatttttagctaatgctttcatcacaaccgcttctaacaatggtggtatagaaggattatatcttgtaggtggaatgaccttttctcgtacatgttttaatgctactgcaatcggtgtttccccttcaaaaggaaccttgccagttaacatttcatataaaacgacacctaaggaataaatatctgtatttccatcgacaggttttccactagcttgttctggtgaaagataatgagcagaccccattatagaatttgtgtacataacagtgttagtggtattcatagcacgtgcaataccaaaatcagtcacctttacacgacctgtatttgtaataattacattatgtggtttgatatcgcaatgaacaattcccattgcatgggcatgttctaagccctcaccgatagcaatagtaatcttaacagcttcgtcaatggataatcgatgatgacgggtaatatattctttaagtgtttctccgtctacatattccataatgatataatgcatgccttgatcatagcctacatcatacatattcacgatattaggatgatttaacttgcctgcagcctgcgcttctcgtttaaatcgacttacaaattcatcgtcactagcaaagtttgaatgtaaaatttttatggctactggacggcctaataaagtatcttcacctttatatacgtcggccattccgccaacaccaatcttggtcaggatacgatagcgattatccagcaatgtatctttaatcttcataatatttataactctccatatctagattagatagttcctactataatggtaacattatcaccggcaccagcatcatatacatcagcaatcaatgtatttaatacctctgtattatcatcaatatgatgtaatacttctcgtattctttcatcgctaatatacccagataatccatctgtacataatagaattcgatcaccggattttacaggtagtgtaccactatcgacatgtaaatcttcttcaacaccgacggctctagttaataaattacgttgcgggtgtacaatcatctcttcttttgtaatttcaccagcatctaataactgttgaaccatagagtgatccgtggtaatttgcgtcaattcatcatttctataaatatagagtctactgtcgccgacactagcccaaagtagattatcatctaccttagcaaccacaacagcagtagttcccattccactaagccgttcctctcgtgccacacgattaactatgcgtgtattcgcatgtaatatagcatcaactaaggacgtttcattaatggtaggagtagattgtaaatattcttttatttcatcaacagcataggtgctggcgatttctccgcctctatagcctcccatgccgtcagtaacagcacaaatattatcactaataaaaaagcgatcttcattctgttttctgactaatccaattttacttaaacctacgatattattcatgaatctcctctttccgaccgtgggctacttttaattgtccacatgcggcttgaatagcatcgcccatttctttacgaattgtaacagaaacaccataagaagcgacaatatccttaaatatgttcatatgtttactagaaggtttatacaaattaatatgttcattcccatttacaggaataagattgacatgacaattaggaaatgccttgccaatgtttcctaactcatgagcttcctctaacgatacattaattgaatctattaaaatatattcaaatgttatacgtcgctgtgttttttcataataatattttacagcatctaaaacctcgtctaatttgtatcgagatccaacaggcataatcttacgacgtgtttcatctgttgtagcatgtaaagataacgctaatgtaatcggaagatcctcatctgccaatttataaatattaggaacccaaccacaggtagaaatagtcatttttctataactaatatcaaatgtcatagggtcgtgaataagttttaacgcctgcaatacattgtcataattttgtaatggttcaccagcgcccatgacaactaaagagtgaatatcttcttgttttaaagcactaaagagaacaacttgacctacaatttcaggaaccgataagtctctaaacaatcccccctgtgtagatgcgcaaaaaacacagcccatagcacatccaacttgggaggaaacacatacagagttaccataatgttgctccattagaacggcttcaattctgctgtgatcagcaagttccaataataatttctgtgtttttccatcaggtgatacagattgagtaatcactttaggaatcgatactatgcaattagaatccaaccaatctctcaaggtcttagggaattgtgtcatatcttgaaatacaaaaatatgacgatgatatatgtaatcaatcaattgtttcgcacgaaatttttgaattttatgttcctcaaataacgcttgcaattcaactaacgatttacccaacaattcaatcatgagtgctcccattcaaagctaacaacttagttaagaaatacgttgcattttaaccataaagaaaccatccatatcatctgttggtggatatgttgtaatcataccactatttgacttaagtgggaaattctccaccacaggaataatagaaaactccttatgtttctgtaaaaatgattcaactacctcttcgttttccttgtagttcaatgtacaagtggaatatattaaatagcctttttccttaactgtcatagcagcgcgttctaaaatggctaactgtaaagatggtaattctgaaagtatcaattcctgttttcgccaacgcatatctagtttcttttgaagtatgcctaacccagagcaaggtgcatctacgagcacacgatcaaaatacgaattccatgaatctggtaactttgtggcatcctgtacttttgtatgaacaatagaagctcctaatcggtcagcatttgaattcataagttcaatcttatgttcatgtatatcacaactcattaatgaacctacattatccattaaagttgccatgtacattgatttaccacctggagcagcacagcaatctaatatacgctcaccaggttgcggatttacgagacgtgctactagcatagatgccttatccataaatgtaatataaccttttataaatgcctcagatttttcaaggctaccacaatggctattaatataaataatatcctcgtaattagaatcctgtgtaacagcccatccttgttcatttaacatagttaaacattgtggaatatcaataagaatcgtgttaatacgtgccgtcaatttaggctgttcattaaaccatgcacataaatcttctgttttgtcacgaccaaactcacttatccataaattgataagccaaagaggaatattgtaaatgaaagaaatagcttctatatcattagctgctaaatcttcaataccaatactatcttgttctcgtataacggatctcaatatggcatttacaaagccagatagacctcgtgttaatttcttcgctaatttaactgattcattaactgctgcactttccggtaccttatccatatagataatttgatatatacctagtcgtaaaatttctacgaccatagaggacaatttttttataggacgtttggcaaaatgtacgataatagcatctaaataattgcgtctacgcaccacaccgtatacaagttctgtaaagaagcgtctgtctaaatcagatagattatattttgaaatatagtcctgtaaaacaatattagcataggcacccttacgattgatatcagataatgcctttacagccaataatcgtatattctgtttttgtccgtttttagcaatttcgttcatagttatccttatcaatcagtaactctacagcatctcgtaccttgttaatatcaacagtcgtattacaacaaggtccattagggcgttcatttaatactccgataacaggaataggaaatacatcagccataccacttgcaagatctcgttcacaagctatagcaataatcgctttaggttttgcttctttaaccttcatacgagccaatgtaccaccagtgacaactataaattgacaaccatatttctttgcgattttcaataaccctcctacctgacagcgaccacattgcttacagttgtatacatcatgtgtcaccttatgaatacaggtattctcttgaagacaatgaggtgttaataaaaggatacgttcaggaggtactttatataaattcataaccactagatgattaattaaatcaatcatagcttgacgtaattcatctttttgtatgcttatgaaagtctttcctagccctaatgataatgggaaaagtaaataaataaatcgattagctattcgtaaaactataggatgaatatatctaaaacctagagaagcaatagctagaacaaaccaaagtccccaaatacctaatattaagagtccacctatactttcactaataaaagctaagttgtatgatattcgttctaatcctggccaaactatatacattgaaaagccgatgattattgaaatgaataaacaagatagagccgataattttaaatataatgggtatcttttgtaatatatattacacttcgtcaaatgcaataccacctttaatttggtgaccattaataaaatcttgggcactaatacgctttttattttctggttgtacctctgtaaggagaataaaaccttgatcaccagtcgacacaacaagtccctttgctgtatgcactatagttccaggagatgcaaattctacaggaatctcattgttatttacaaaaattgtggtcatcttattgtttacagatgtattctcaaccatttgagcagaccatatctttaaccgtttcccctgtaagaaagaataacatccaggtgctggatttaaaccacgaatcaagttgacaatcttatgtgctggttgatgccaatcaataagccccatttcttttgtaatcttagaagtgtggcttgctaaagcgtcatcttgaggtgtggctgtaatttcacctttcacccatttatctaatacaggagaaatagtgcgagcccctaattcagcaatgcgctcaaataaagcgcctgttgtttcgtttggaagtatatcaatttctgcaatatcgataatatcccctgtatctaaaccatcatccatatgcataatggtaacccctgttttagtatcaccatttaaaatagcataatggataggtgctgcccccctatattttggcaatatagatgcatggatattaatacatccatatttaggcaaacgaataagccatggtggcaaaatcttaccgtaagcaattacgacgataacgtctggtgcaagatcaatcaattccttttgaacagcatcatcacgtaatgttataggttgatacacgggcaaatccaaagataacgcagcttctttaactggtggcatttgaatctgcttgccacgtcccttttgtttatcaggttggcaatatacacctactatagagtgaccagccttaactaatgcgcgtaacgtaggaacagaaaaatctggcgtgcccataaatactatgcgtaatggattattgttagacaatttccttttcctccggatgatctgcaatacggcgtaagtttgtagctttttcaataaataaatgaccttctaaatgatctatttcatgttgaaaaattctagccaaaaaaccttcagctttaatcataacttttttattatgtggatcaataccttttacggtaaccttttcaaaacgttccacatctccgaaataacctggtacacttaaacagccttctagcccaatttgacttccttcaccatgaataatttcagggttgataagcgctattaatccactaccagcatgatcatcaacaactataatacgtttggatacattaacctgcggtgctgccaatccaacaccttccgttttatacattgtgtctgccatatcttcgattaaagcacgcatttttttatttacatgttctacaggttctgcaacctcttttaatatgggatgtcccgcttttactacttcaagtactgccatatactcctcttatcaaatagggtctacatcgataagtagaccttcttgtgtaaaaatccaagaattatatatataatcttttacggcatctaaattttctccgcgaatcataatcgataaacgatacatatcgcgaatctttttaatgcctgcttcataaggaccattaacatcaatcgattgtgatttaaaatttgtttccaaatcatctacaattttttgagcaatcgattcagccatttcttccttcgcatgtcttataaccatataaatcatttcgcgaaatggtggataccctaagtccttacgatttactatttcttcattgtaaaagcccaaataatcatgagccttactctttattatagcataatttaaaggattatatgtttgtataacaacactgccaaccttatcaccacgacccgctcgtcctgatgtttgcgttagtagatcaaatgcacgttcagatgctgaataaacaggtatatttaagacagaatcagccgtcaatatacctacagctgttacatccttaaaatcatgccctttagaaaccatttgggtccctaataaaatatcatatttatggttaccaaaatcttgaagaatttcttcgcccatatccttatgcttagttacatcttgatctaaacgcgcaatacgagcgcctttaaaatgtcggcgtaattcttcttcaactttttgtgtgccagagccaaagaatttaattcttttactatgacatttagggcatactgaaggaattggttcatggtgctcacaatagtgacaccgcaactcttcaccggcttgatggtacaccatagcaacctcacaatgaggacacataatcgtttcaccacaatcacgacacatgacaaatgtgctgtagccacgacgatttaaaagaataatcatctgatttccatccgctaatgtacgctcaataagatgtgtcatagcatcggagaacaccgagtagttgccacgaatcatttcttctttcatatctacaatttgaacatttggcatcggttgatcaaaaatacgggttggcaactctaacagcttatattgtccttgtaaagccttgtaatacgatgtaatagcaggtgtagcagagcctaaaataacaggacaatcatgagccatacctctccataatgcgacattttttgcattataacgaatcatatcttcctgtttataagatgtatcatgttcttcatctaatacaataagcccaatgtcttcagcaggcgcgaaaacggcagaacgagcgccaataatgatatggctatccttccttcgtatacgttcccagttattatttcgctcactaatggttagtttactatggaaaacaacaacttcatcgccaaaggtagaaacaaaacgacgaacaatctgatcggttaatataatttcaggaaccagaataatggcggttttaccttttcctatacaacgagcagcagcttttaaataaatttgtgttttaccactaccagttacaccatgcaaaaggaatgtattatacgattcaaggtccatcatctgcttaatcggttcatatacaatttgttgtgcttcagttaacggaattgtttcttcgccactcagcaattcggtaaaagaagtttttgtatctttaaagcgttcttcaatatgaatgccatgctcttcaccgacctgtttaataaccatataagaatagcctttggctcttaataaagatttaggagccccacctacctcgatgagatagttagccaactcacgctgcttgcgcttcttaggacttaattgattaatcttaaactctggcgttacaacgagccattcttcttttggtgcatcgtaagattttaatgttttatgcacagtaaaaagacgtaaagcatctccaaaggaacacaaaaaataacgactaattttctgtgccgtatccatcatttcccgagtaaaccaaggatcactatcaagaatatctattatagaacgcaaagtaaatgttggtttctctaatagttcttcatacccaataaggatgccctcttcacgactaccacctaagggaactaatacacgagtccctgctttcacatcaccaaatttctctggtaacaaatagcttaacggtttatgtaattgtttggcaggtctattaataataatacttgctacgcgcattagttcacctcctctaatctaattattataacatatcctagaggagataaaaaaagacttagtagacaagtctactaagtctttactattataagccagcttcgtgacgtaaaatatcagctttatcagtacgttcccatggaagatcaacatcagttctaccaaagtgaccatacgcagccgtcttacgataatgaggctttaacaaatcaagcatttcaatgatacctgctgggcgcaagtcgaaatgtttgcttactaattcttgaattttttcttctgcaatcttagcagtaccaaatgtatcaactaaaatggatacaggttttgcaacaccaatcgcatatgctacttgtacttcgcatttatctgcgagacctgcagctacaacatttttagctacgtaacgagctgcatatgctgcggaacggtcaaccttggaaggatccttaccagagaaagcaccgccaccatgacgagccataccaccatacgtatcaacgatgattttacgacctgttaaaccagcatcaccatgaggaccgccgataacgaaacgacctgtaggattaatgaagaatttagtgttttcatcgatgaattctgcaggaagtgctgcatcgataacatagcgtttcaaatcatttttaatttgctcttgtgttacttctgggctatgttgcgtagaaataacgattgtatcaatacgtttaggttgattgtcaacatattctacagtaacttgtgttttaccatctggacgaagatatgttaatgtgccattcttacgaacttctgctaaacgacgggataaacgatgtgctaaagaaattggcataggcatatattcaggtgtttcatttgttgcgtaaccaaacatcatgccttggtcaccagcgccaattttatcattgatttcgctattaccatctttagattctaatgcttcgtctacacccatagcgatatctgcagattgttcatcaatagatactaacacaccacaagtgtcacaatcgaaaccatattttgcacgagtataaccaatttctcgaattgtatcacgtactacacgaggaatatcaacatatgtgcttgtagagatttcccctacgacatggactaaacctgtagtcacaagtgtttcacaagctacacgagcctttggatctttttcaataatcgcatccaaaacagcatcagaaatttggtcagctattttatctggatggccttccgtaacggattcagaagtaaaaaacatatgtttttctgccatttttgcctcctataataaaaaaatccctcatggtctctcatgagggagacccatctatcagtccatgactgttggaattagcaccttcttttaaaaagggttgctgtagcttcaacgggcctttccctccactactcttgatgagttaaattacgatataaattgtataccatttttgtagaaaaatcaagttaattcactttatgataacaggctctggtatatatctaatcacattacctagattagctatgctcatcaataatagcagtatatataccagcttgcggtgtaactccactagctatagcaaacgccatagccaatggtaatgcgactacacctacaaactatagacaacattacataagctattttacagctaacaattcaataacttctccaataatgtatctagctaattctgatttttgcatatttggcattattttaggctctttattaggatataaaaaatagccttcattcgtatctacattaaacccagcatttgatttgcttacatcattagctactaacatatcaaggtttttgcgacgtactttatccatgccgtaatcgacaacatgttctgtttctgcagcgaaaccaaccaataattgatgggttttatgcgctcccagtcctttaagtatatccggattctttacgagatctaaagtcatagattccatttttttgattttttgaggcgctttattagccaccctaaaatctgaaacagcagctgccattatcaccacatcggttgattcgtaataggaattaacagcctcctgcatagattccgcagaatctacaggcacatattcaacacctttaggaatttctaatgatgtaggggcactcactagaattacgcgagccttttccttaacagcagcagccgcaatggcatatcccatcttcccactagatctgttacctatatatctaacagggtcaatattttcttgtgttccaccagctgtaacaagaacagtcttaccagctaatttaccagtcccatctagagaatgtaattcttctgtcaaccaattaacaatctcttctggtgctggtagtctaccaacacctgttacaccacaagccagccaaccagcatcgggttgcataatatggtatcccaaagatgataaatcctttaaatttctctgtacaataggattattgaacatctctgtattcatagcagggcataaaaatttaggtgctggcgttgccataattgttgtagtgagcatatcatcagcaataccagctcgtattttaccaattacattagctgtggctggtaccacaatataggcatcagcccaggttgcaagagcaatatgttctacattccaatcgtggatttcttcccacatatcaacagctacaggatgaccactaatttcaccaaatgtcataggtgtcgcaatacgagtagcatttttcgtcattaccactttgacctctgccccagcttttcgcaaacgacttaccacttcaattgctttatatgcagcaatacctgctgaaacacctacgataatatgtttccctttcataattctccttttaaaaattccttgtacaaaatgtacaaggaattttgagtaaaattatttaataccttctttagtgcgtttatatgttacttcaccttcagcaatctcatagaatgctaaagatacaggtttatctgtattatgaatatctgtagcaagacattcttcaccatcggtcaactcgcgagcgcgtttagctgctagcgttaccaatgtatatttactatctacacgtttttccaatgctttcaatggaggttttaccatcatactatcacttctccttagactcttgatattgcttataaatatattgaatttgctctttattacgactgattttacaagcttcagcacgcaatatagaagcaacctttaaagacgcatcctctaaatcatcattgaccacaatataatcataacgatgagctaatgctaactcagaacatgccaatgataaacgcttatcgataacctcttttgcatcagttcctcgattatgaagacgttcagataattcggttaaagacggtggcacaatataaataaatacggcatcactaaatcgctctttaacttgcatagcaccttgaatatcgatttcaagaagtacactcttcccttcatccaacaaattcatcacatattgttttggggtgccataataattatcatataccttagcatactctaaaaatgcatcttctgacaataatgattcaaattcttcttttgtgcggaagaaataattaattccttccttttctccaacccgcggttcacgtgtggtcatagatacagaatatacaagattaggcatttcacctcgtatattagaacaaatcgttcccttgcctgcaccagatgggccggagataacaattaataaacctcgatctgccatattaactcctaagcttctacagtatcttcatcgacttcgtgttgcacaatacgatgtgccactgtttcgggttgaatagctgacaaaacgatttgcccactatccataacgagcacagcccgagttttacgtccataggttgcatctatgaggagacttttatctcttgcatcttgaaccatgcgtttaataggtgcagattcaggactaataatagcgataacgcgattagcagaaaccatattaccaaaaccaatgtttagtaattggatactcatgaatagacctccttactcaatattctgtacttgttctctaattttttctaattcacatttcaattgtaccacatggtctgtcagtgttatatccatcgcttttgagccaatcgtattaacctcacgattcatctcttgaatgataaaatctaacttacgaccaatcggttcatccatcttaagtgtatttgttaattgtaccacatgagacctaaatcggacaatctcttccgtaatatcagttttgtcagccataatagcaacttcttgtagtaaacgatcttcattggcagtaatgtcaagaccttccacatagtccattattttagttcgcaaattttctttataagcaataacagcatcggctttatgactgttaatatcttctataatatttgtcatttgtgaaagccggtgtaacaaatcttgttgaatatgaatcccctcagattgtcgcatactgactaatgcattaagtgcattagttgtagtatcagtaactaaagactgaagtacatcttctgtagcttcagaatcttggatttgtacccaatcattggatatggccatcactgccgataaaggtacctcttgaggctccctataaaatccttctgataccagtaagtcttgaatttgatgttttaaagaactatttattataaactgtttttctctatctgctacatcctgcaatgttacaaacacatcaactttacctcgatgtatgtttttttgtatacatttacggatactatgctctacagaattaacttgtttaggacttcgtatattgagatctaaaaatctagaattaacagatttaatttctatgatacattgtaaaccatctacaatttgagttgctcgcccaaatcccgtcatgctattcatggaagaacctcctttttatatattgtatcacgaattttaaagatatctattaattatctatgttatactaaactatacattgtgagttaccaaatgaaaggatcaccatgaatttagacggattaaccatgtctgtattggcaagagaattaaatgaaagcctacagagtggacaaatacaaaaactttatcaagtagataaacactcattactttttaaagtacgtaatgctaatcaagacgtaaatctgatgataacggtaggtgccaatcccgcaatatatttatgtaaacctatccaagatttacccaaagaaccaagttcattatgtatgtttcttcgcaaacatatagagggcagtcgtattacatctgtagaacaaattaacggagatcgtatcctctgtatccatattgataagcttgaaatggatggttctatcacctcaacatcgatatatatagaacttatggggaaatattctaactgtatctttgtacaaaatgatataattttagaatctattattcatgtatcaccaataatgaacagagaacgttcagtaggtcctaagatggcatatgaattaccacctaattctaatcgtgtatctttactagattttaatgaggaagaaatattaaatcttcttacatcctttggatctggtacagtcactaatactatacgctctctctttaatggatttggtaaatcactattagattatgttctaacattatccaatttagatggcaccgaagaactaaaagccttatcagatgatgcaattcaaaaattatcaggggctctagaaactttaaaagaaaaattattaaacgctaatcaattatatgtctataaaaatgaaaatagtaaaaaaatatatatgccatttccaatggaaacggattgtacattaatagaaacatatccaaccatctcaaaagcaatagaacagtctattgctgacactggttcaattcatacggctgacaaggaattggaacgtattatagctaatgctataaaaaaagaagagttacgtcacaaaaagattaaagatgaactagatgatactaaaaagatggaaacctataaattatatggtgatcttttgatgattaatagtcatatacaagctcactatcaatcttctattgacgtacaaaatttactttcagaatcagcagaaactataacaattcccttaaaacctgaattgaccattgtggaaaatggacaatggtattacaaactatatacaaaattaaagaatcggattattagtggccaataccaactagaccaaagtacgataaaattagaatattatagaacaatcttatacagtttatctttagccacaactagagaatcactagaagaaatacgccatgaatgtatggatgcaggcattattaagaaatctaaaaaacctctctcctataaattgggaaaatcgaattacattcatcttgaaatcccagaaggcgaactttatatcggacgaaataaccagcaaaatgaatacttgactcatcgttttgcaaaaccaaatgatctgtggtttcatacacaggatattcaaggttcccatcttattttacgtacgaatcatgaacctgatgatatgctcatttcacaagtagcaaaatatgctgcctattttagcaaggcccgtcattcatcaaaagttcctgtagactatacatatataaaaaatatcaaaaaaccacctaaatcacctttaggatttgtgatttttaacactcatcaaacaatgattgttgaaccagaaaaaccacctatgtatgaggaataacaaaacccccgatagatacctatcgggggttttctctgcaatcattagcattatctgtactgattacaatatattattggttatcagttttttgttcactttgttgcaagctttcgcggttttgacgaaggctttccaacgttttttctaaattgttttctacatatttcaatacatcaccagcatattgaatagagctagattttaactcttcagaagattggtttgcagcattgataatttgattagcttgttcttgtgcttgcttaacaagttcactttcagcagtcaatttagcaatgtaatctttggcttgatcgattaatgtttcagcttgacgttgagcatcagccaatactttatctttttcggccacaatacgacgagattcatcgagctcaagtggtaaagattcttgaattgcatcgataatacgcataatttcatcttcttcaaccatgcgttttgtagtcataggaatacggctgctagattcaataagaacctctaaatcttcaagtaatttttctgttttcatacaattcactcctattatttattaccatcgatgttaaaacgtttttctaattttacctttacatcgtcaggaacaagtccatctaacttaccaccaaatttagctaactcacgaatccctgttgagcttacaaaagaatatttattattggtcataataaacactgtttcaatatcatcatctaagtattttgcaaatagagcacgttgaaattcatattcaaaatcactaagagctctaagtccacgaataataatacttgcatttttggatttaacataatcgatgagcaatccacctgtacagtcgatttctacattaggaatatgcttaaccgcattgcgaatcatctcaacgcgttcttccatagtaaacaatgaattcttattaggatttgaacttacagcgataatcaacttgtctacgagacgactaccgcgttcaaaaatgtcaacgtgaccatttgtaacggggtcaaaacttcctgggcaaactcctatccgcaagggtctaactcctttcactatgtttcacaaaatatgaaacaagggtataaccaaatttttgttcctttatacattcccattctggtggcatggtgaaagcctcatctttatgatgttccaagactaaaacaccatcatcagctaatgcatcatgagccacaacaaaatcaatagtctcctgtataaagccattttcatatggtggatcagaaaaaatataatcgaactgctggtcacctataaaatgtttcaattgtgaaagtttcttaggtatgatttgaattcgatccaacacacggcaatgttccgcattctctcgaattaatttaccagttcgataatcaacagcaatcgctgattcagctccacgactgagcgcttcaatagcaacagcaccagtaccagaaaataaatctaatacacgagtaccatatataccgcgatgcgctaatacgttgaagatactttcacgaacacgatccaaggtgggacgtgtatccatcccctttggagattttatagtatggccctttgcagtgcctccgataattcgcatacaatcctcactagattatactcattaattatagtatataaatacctaaaataaaagtatcttttacaattatgatacttcgattttactatctcggcccatcaattcttgcaatgctaattgaggggacttctctttatataatacctcatatagtgattgtgtgataggcatttctacatggtgttttatggccatatcacgaataatagatgttgcaaaaaagccttctaccaccatattcgtatgattcataatgtagtccattgttttaccatctgctagctgttgtcctgcagcacggttacgactatgctggctcatacaagtagcaattaaatcccccataccagctaagcctgcataagtttcttttcttgcaccgagagctaaaccaaatcgagtcatttcatgtagaccacgagttagtaataaagccttacaattatctccaagagataatccatcaacgataccagcagccaaggctattacattttttgtagcccctgctaattcaacaccaatataatcgtcactcgtatatatacgaaattctttgctgtgtaatgcctgttgtacctttttacctatgtccatagatgtcgtacctactacggctgcagcaggtaagtttctaccaatttcctcagcgtgattaggaccggataaaacagttaaatggcatccgacagaggataattcctccttcatgactgtagtcaataacttaccactttcccgttctacacctttagagcataacacgtatatttgatctttgtgagcatatctttttaaattctgtaaagctgtgcgcacatgaatagatggtgtaacaatcaatacaatatcagcctgctcaatagatgtttgtaaatcagaactaatgatgagttcatcaggcaatataacaccagctaaatatgacttattttccctgtacttaataagttcatccttaaactctgaacgtctgcaatataaggttgtatcatttccggccactacagatttaatagcaagagctgtcccccaactaccagatccgacgatgcaaactttcatattactctccttttttaacgcgttctacctttaattctttaccagctagtaaacgagaaatattttctcgatgacgtatgataacaaacaatgcagctagcgcaccaaatcctacaaaccaccaggattcacccattacatacatcaatataggaacaagcgcagccgctattatagaacctagagagactaattttgtgaaatatacaatgataccccaaatagcaaaacaaataactgcaactattggagataatgcaatgagtacccccaaaccagttgcaacaccacggccacctttaaagctaagaaatactgaccaattgtgtccaaccatggccaaaatgccacccagaatcatgaacatgggatttaaatgggaaaacaaaaataccccaatggcaccctttagtgcatcacagaaaaatacaggaagcgctgcctttaaaccaataacacgatatgtatttgtagcacctatattttttgatccatatagacggacatcagtattgaaaaataatttaccaataatgagtccactaggaattgaaccgattacataggctaataacgcataccctataataggcataaaatcattcacaactttcacccttaccctttgtacttattactcttcatcttcacgttttttaccgcgaaggattaatcgaattggagtaccttcgaaaccaaaactttcacgtaaacgattttccaagaaacgcatatacgagaaatgaattaattcgggttcatttacaaataggataaatgttggaggtttaacactggcttgtgtcatatagtaaatttttggaattctaccattacgggatggaactggatttacagtttgagcatcttgtagtaattgatttaatgtaccagtagaaacacgacgatattgttgttctgatacgaatttaagcatatcagctaaacgatgaatacgttgttttgtcaatgcggaagcaaatagaattggtgcaaattgcaagaatcctaactcatcataaatgtcttcagtatatctcaatgtagttttatcatctttttctacaaggtcccatttgtttactacaatgataacacccttgccagcttcgtacgcataaccggcaatttttttatcttgctctgtaacgccatcaacgccatctaatacaagtacaacaatatcagagcgatcaacggaacgaagagagcgaacaatgctgtaacgttcaacagcttcatcaatcttggatttacgtctcatccccgctgtgtcgataagtacaaatttttgatccccatgtgtccagtgcgtatcaatagagtcccgagtagtgccagctacatcggaaacgataacgcgatcttgacctaacagtgcattggtcaatgatgatttacctacattaggtctaccgatgatggccacatgaatggtatcttcctcatctacattagttcctacaggtgggaaatgtttaaccgtatcatctaataaatcacctagattcattaaattctttgcagaaatgccaattggatcaccaagtcccaaattataaaactcataaatattaggttcttgatttacactgtcaattttattcactacaaggactactggttttccactagtacgtaaaatattggccacttcttcatcagccggtacaataccttgcttgccatcaaccacaaagaggattacatcagcttcttcaatagcgagttcagcttgtaaacgcatcattttaggaataacatggctgttctctgttacaaactcgataccacctgtatcaatcattgtaaactcacggttaagccattctgcatcgaagtaaattctatctcgtgtaacgccaggtatatcctcgacgatagaaattcgtttattaacaatggcattaaataatgtagatttacctacatttggacgaccaactacggccactaatggttttgccatactttcacctcttttattatctatatacatcacttcattttatcatattaaagggaatgtacgcaaaaaggctaatcaaggaaaaccttgattagcctcattaaaagattctgaattattcagcgtcttcttctgtttcttttgcttccatcaactcagtcaaagccaagcccaatttcttttcatctttgttaagagaaatgattttaacttcaacttcttgaccacggttcaagtaatcttcaactttcgcattacgttgttttgtaatttgagaaatgtgaagtaaaccttgaatatcatcgttaacagctacaaatgcaccataagctaccaaacgaacaactttaccagtgattacatcaccaacgtgtaaagtttcttcagcaacatcccatgggctcttagttaaagcttttaaggacaaggataatttgttgctttcagggtcgaaggattgtaatttaacttcgatttcttggccaacggaaagaacatcttccacttttttaattttttgccaagaaatgtcggaaatatgaagtaaaccttcaataccaccgatatctacgaatgcaccataaggcatgattttacgaacgatacctttatagttttcaccaacgttgatatttttcaatgcttcagctaattttgcttgacgttccacttcaagtactgcacggcgggaaagaaccaaacggtttttcttttcgtcgatttcaagaacttttgcttcaaattcagtaccaaccaagttgtccaaagattttacgaaatgcacatcaccttgggacaatggaatgaaaccacgaagggattttactgttaccaccaagccagctgggatagcatcgatacctttacatacgataggttcgtctttttcttgagcttcgataacatattgccaatcttcatctttagccaaacgagtcatggaaagataaataggattatcttctttgatgtggttcatgataactgctttaatttcatcaccatttttcaacacatctttggcagagtttggtgctggataagaaatttcagttctattcaaaattgcttcagttttgtagccaaaagatacccatgcgcgttcatcttcaacttgtactacttgaccttctacaacgtttcctttcttaaattcttcttgaccttctgctgctaataattctgcaaaatctttcattgtctcaatgacctccttaataatccagtcgggagtcgatgctcctgctgttactcctaccgtctgtactcggttaaaccattccagttgtaattcagtagaagtttcaatgtgatatgttgtacatccaacgtctctacaaacctctgccaatcgattcgtattgccgctgttcttaccacctatcacaatcataagatctacgttacgagctaattcaacggcagaattctgacgctcctgagttgcattgcatatcgttttgaaaatcttaagattcttagattttttctctaatatctctattatactgttaaatttgaattgtgaaaaggtcgtttgaacaactacgcccattttttcaacaacttgtagatttttggcggattcttcatcttcgatgattattcctttgttattcgcccataaattaatacttttaacctcaggatggtttttttcgcccaatataaccagtgtcataccatcttcgataacagattttgcatcttgttgagcttttttcacatgtggacaagtggcatccaaaatgtttaagcctttctcttctgcttcttcgtaaattgcagggcccacaccatgagaccgaataatcatcgttccttcatcaatatccgccacctcttgaatcgggctaacacctttactctctaaacgaccaactacttgtgggttatgaatgataggacccaatgtatagcttttaccatcgctatcagcagcttcattggccatttcaacagctcgttttacgccataacaaaagccatgattttcagctaaaattatttccataatgtctcctctatgcgattttcatgataggaatcaatcatgcgttgaatttcaccctttacgcgatcattaacctctttaatagcctcaggtgtcggtttagctttactaacaggtacctgtttaccaatgatgcaagcaacttggtttctcttcatattatgagaaccgataatggcaactggggtaataccaattcctgtacgcaacgcaatggatgcggccccatcgtgaaagcgtcctaattttccattcttttgacgattaccttctgcaaaaattcctaatactttattattctttaatagtcctaaagcatgacgaattgctattttatctatagctccacgatttaaagggaatgcaccaagccaggtacaaaaaaatcttgaaattggatttacaaataattcctgttttgccataaaatgtacgtgcctaggcaatgcatagccgcaaataggtggatcgttattacttaaatgatttggcaccacaataaccggaccttccatagggaaattatcgcgaccataaacctttaatccatagccgactttatagcgcaaccaaaaggcagttcgccaaagccaagtagaaaatttgttcatttagattcgctcctgtactagatgtaatatatgttctacagtttcatcaaatgtcatttcgctagaatcgaccaatacagcatcctctacctgaatcaatggagattcctttcgattcttatccatatcatcacgttgcataacactgtctttaatatcctctaaagtttgttcgttaactgtacccttcacttctaagtaacggcgcatagcacgagcctctacagaagcggttagatatatttttaattccgcattaggtaatacaacggaaccaatatcacgtccatccaatataacgccaccagcttctgccataagtcgttgtcgttcaaccaaatattgacgcacacctttatatgaagccactatagatacagcattgttcacttgtggcgttctaataaaatcagtcacatcttgaccagcaataaaaaccttacatgaatcatcactggcctccatagtaagatctaattctggtaataatgcttccactgccttttgattatttacatcaatatgattatgcaatacagcccatgtaacagaacggtacatagcacctgtatcgatataaagatatcccagtttttttgccactattttagaaatagatgattttccagcgcctgctgggccgtcaacagcaacggcaattttatgtgtattcataattccctgtatcactttcacaaattatataaaatatactattcaatcatacagcgtaaaatgtctctattaaaacgcttcagggtgagttatatgcatagctgctacatatcctgtagaaaacgcagcctgtaaattatatccacctgtaaaagcatcaatatctaatacttcaccagcaccatataagccttttactaacttagactccattgttttaggattaaattctttaagagaaatgccaccagcagtaacaattgcctcttctacaggacgtaatcctttcacggtaagaggcatatgttgcaacatgtaaccgatttgttgtcgttcttcctttgaaatctgattaatcggtttttgtggatcaataccggccaattcaataattaatggtattaatcgacttggtaacaaatctttcatcccattaattaattgtttcttagaatagagatcaaaatctttttgtaatcgtttatctaatgtctctggagataatgcaggttttaaattgatatctaaacctatagtgccgatattttttttgcgcatcaattttcccaccgtatgactaagggataaaacgataggaccggtaataccaaaatgggtaaacatcatttccccaaacatcttggcttgtaccttattcttagcaactacagacaattcaacattccgtaggctaatccccattaaatcttttacccaggactcttccgttacaatcggtactaaagatggacggatatcggtaatcttatggcctacttgagccgccaaaatatatccatcaccagtagaaccggtagcaggatatgatttacctcccgtagcaataaccacggcatcagcgtgataggtttctctgtctgtcacaacaccggtgacaacaccatcatcaaccaaaagtttcttaactggttcctcaagatgaacatctacaccatagtgtttcatcagcttcataaaggtatttcgcacatccagagcggaatctgaagcgggaaatacgcggccgcctcgctctaccttggtttctaaaccagcgtcgtgtaataactgcaacaaatcttcattggtaaagcgctcgtaagcaccatataaaaacttaccattgcccggtgtatttttaataaaatcagacatatcacaagcattcgtaatattgcagcgtcctttgccggtaatgcccatctttttaccaacataattcattttttcgagaagcgttacctttgccccttctcgaccagcaatgacagcagccattagccctgctgcaccacctccgattacaacgacgcgcttcatttagaagctcctagcgctttaagtgcacttacttcacgttgtgtcaattgacgaacaccaccgcgcttaacaccacttaatgttaatccaccataagcaatacgttttaaattatgaattcggtaaccaaaatgttcaaacatacgacgtacttgtcgattacgaccttcatgaatagtaatttctacttcgtgaaccccattgtggtcatcaaatcctaaatctacaagtgtagcaggtgctgtcacaccatcttcaagaggcacaccatcagcgataacctgtaaatctgtatcatttacacgccccttaatacgaacttcatatgtcttttcaacgcctttagatggatgtgtaagattctgagctagttctccatcatttgttaaaagcaataaaccttccgtatgtaaatcaagtcgtccaattggatagatacggcgtttttcatttttaatataatccattacagtttctcgtccttgtgggtctgtaacagatgtaataacacctttaggtttattcattaaataatacacaggtttttccacggctaataattgtccatcaaccatgaccttatctttcataggatcaaccttaacacccagttccgtcactttacgtccattgacacgtaccttaccagacgcaattaattcttctgccttacgacgagaagctacaccacagctggcgataaatttttgtaatcgttccatattatatccttttctatatgttctctgttccatcctcattaggagattctattaagctttcatctttcacactgtctattgatacccctgtcatatcagactctgcagtatctagctctttgtgcaaatcatcaattgaagtaacacctgtacttcgcaaaaattcatcagttgtgccatacagaatagggcgacctaccgtatccttatgacccaactcagcaattaatgagcgagacaataattgtttaattaccttgtcgctattaacaccgcgcacctcttctatttcagcttttgtaattggttgtttatatgcaataaccgctagtgtttccatagctgcattagataatttatcctcttttttacgtatatgtccaatatacatagccgattctggtgcacttaccagttccacaccagcagcagagattcgcacgcgtataccgcgtttatgggattctaaatcagatgctaagtgatctatcaatgtcaagctatcttgttttgaaagcttaaatatatcttgaatgacatcaatagaaataggtttagccgcagaaaacaataccgcttctaaatctgatatgcccatgctactcctcctctacttatatatcccgttcaccaatgataggtgcggtaaaaataatatcatcattttcgtaaaacatgactaattcttgttgttttaaaagttctagtacagccatgaatatagttaccataccacttttagattctatagcaacaagtagctcacgaaacgccaatcgttcaccacgccttgcacgactcgctaaggatacgatcatatcctctaagctatatgcatctttctcaacagttacttgacgaacctgttgttcatcttcagattcaacggtcttatgtaatacagaatagaatatatcatataatttagatagttctaaattataataactatctaaacctaatacactcgtttcctcagggcgactaaacacattcgactcaaccgatgctttttccattaataggtgagtaaaatcttttatctttttaaactctactaacttagccactaattcatctcgtggatcttcgctttcatctggttccggttcaaccttaggtaatagcatacgggacttaatttgtaataatgtagatgccattacaaggaattcactactataatggatatcaaaatgattccaattatctaggtattctaaatattggcttgtaatttcaacgattgggatatccgtgatttcaattttatgtttttcaattaaatgtaaaagtaaatcgagaggtccctcgaatacatccaatttataattatagtcccccatgaatccccattccttaacgatactatttcataactatataattatatcgtaaatcgaaaatttcttctacgttcaccatatataattgtattttttagtattctttgttatcttataatgtgaagaaaattatatatttgttgtaatctcctttagaaaggatacattatgttgtcatcaatgaaatcattgattcaaaatcctattttgcgttttggcattataggcatagtgctctacattgcactattttttatttatgaacctatcacattaggacttgatgtagaggatattacaatccttgcggtaccgaccatggttggtatgtttttattccaatactttatgagttgtaccgtatttcatcgtgcgttcttaggatatggtttagtaggcttactatggggactcacatttccattattatttcattggtcttatgtaaaacctctatatttctatgagtttgccaatgattttctattcggcttacttctatttatggggctttcaggtatccaatatttggtaacccaaacgggacgtctacagaaattaacatcagctatactagctttattctcttcgttccttagtcttattccattattacaaattggttattatataaccacctggcactgtttaacaccagcaagcctattggccgtatacatgacaaatcctgaagaagcctttggattcttaaaaaatgctgctggtattcccggccttatcgctattgtcgtaggcctcattttatggacactcttcctatattggtgcaacctaggtatgaaacgagttgtcgattttaatacaacacgtcctttgcgattaggtgtactcatcgcatccatggtagcatttatcgtatatgtaccattcttcttatttcctcaaacatgcatcgtagccaattggacggctgccggtaattatgttaaagaaatgcaacaatacaacgataatcaccatcttgtatttgattcattcaatttggatacaaaagatacgacacctactaaaacgcctggaactatcattctcgttatcggcgaatccagttcccgtgattatatgaaggtctataatccaaaattccaatacgatgacacaccttggcaagaggatatgcgcgatcacaataaagattttatcttctttaatcatgcgtactcttcctacgtacaaacagtaccaacattagaacgtgccctttcagagcgcaatcaatataacgatcgaccattcttagattctgctaatattttggatgtagctaaaaaagcaggttataccacatcgtggttcagtaaccaaggcgtatttggcgaatacgatacagctatttctttgatggctaaaacggcagatactacaaagtgggctcacgaatcctatggcttctctgatttatatgatgaagcattattgccattattaaaaacagctgatccaagtaaaaataattttatcgtaattcatattatgggcagtcatatttattataatgaccgctatccgcatgaattcagtaaatggaaaaaaggtcccaatcctgaaggtatcgaggcttatgctaatagtcagctctatacagattggctgttacaacaaatctacacctatggtaaagataatttaaatcttcaagctatggtttatttctctgatcatggtgaaagcgttgacaagtcccacaatccagacacctttgattttgtgatgactcacattccattctggatgtacttatcgcctcaatatcgtgcagcatatcctcaaacggtatcagcactcgatagtcatgaacatcaatatttcacaaatgatttattatacgatacattagttggtctcatgcatgcaccaaacagtcgttacgataaaacaagagactttagtaatagtgcttatcgatttaatttacacaatttaacaacactattaggtgaacagccattaacaaatgacccagttaatgcaggtcaataacatacactaatgcaacaatagcgacgattgatacatatcaatcgtcgctattgtgctgtataaggtcctgtacattcttttccgtatagatttgtatattatgttgtaataaaagctcagacgtgacaccaaccccatttacgagggttctagtaaatgtaccatcatatatttcaccatatccacagcttggactcttagcctttagtaaagcacacaaacaatttttatctatagcaattgctaaagctaattctgcaccccgtttaaattgttctgtaacatctataccatttctcgtttggactcgatcacctatccgctccgctgggggtcttggtgttaaaagcccacccagtacctcaggacatactggtataaggttatagagtctcttaagttcttccaaacagtctattttgttatggtcaccatcataacggcaacaaacaccgcaaagacattcactaatcaacagattcggtttactcacgttatatacccactcgtaaatacagttaaaattatatcttgaatttataatctaagtgcaactaaaaaaagattcatggctttctgataaaatagtgtttgcaaagacatctaaaaatcaggaggagccatgaatcattatactcattttacactaaaagagcgcgaaattctaaaacattttattgatataggaaaaaatcaaacagaaatttcaattttacttgggaaaaataaatcgtctatatcaagagaaatcaaaagaaatagtcaaaatggcgagtacataccttgtgaagcccatgacagatataaaaatagacgctttaattgtaaaccaagaaaaaagctagataatccaagtctatatgaatgtgtaaagaatttatttttgagacatcaatggtctccggaacagatctcctctcgattgaaatttgaaaattcaagcttcactattagttacaatacaatttacagggaaatatataatggtcgttttgatgaaaaagaattatcacatggaaatagaggagttgttcgcaaactacgacatcgtggtaaaagtcgtcatacaaaaaattatgaagaaagacgtggaaaaattcaaattagtaatttaattacagatagaccagctcctgcaaataatcgagaacgattaggtgattgggaggctgatacagttatggggcagactggtaaggcttgcttagtaacattaactgatcgaaaaagtaggtatctgctatgtaaaaaaattgcaaaaaagaatgcatttttagtcaaacaagcgatgattaagcttttaaaaaatcaacctctagaaacaataactccagatagagggaaagagttttctaaacatgcagaaattagtcaggagttgaatttagtagaattttattttccattaccatatcatccttggcaaagaggaacaaacgaaaacaccaatggattgcttagagaatatttcccgaaaactgtggatattaatcaatcagatagctatgttgaagcaaaaatgaaagaaataaatcttagaccgcgcaaatgcttaaattggaaaactccatacgaggtttatcattcagtagagttgcatttgacttgacaattcaagatacaaaaaaagactaaccgaagttagtctaatggtgccgaggaccggaatcgaaccggtacggttatttctaaccgacggattttaagtccgttgcgtctgcctgttccgccaccccggcatgggtaacgattttgtggaggcggcacccagaatcgaactggggaataaaggttttgcagacctctgccttaccgcttggctatgccgccatataaaattagtggagcgggaaacgagattcgaactcgcgacccccgccttggcaaggcggtgctctaccgctgagctattcccgcatgtacatggtgcctcaggacagaatcgaactgtcgacacacggattttcagtccgttgctctaccgactgagctaccgaggcatgaatggcgaccccgatcagatttgaactgacgatcttcgccgtgacagggcgacatgttaaccgctacaccacggggccgtatccaaagtacttgcttagtatatctgttatcagagtttttgtcaacactatatgtgtaaattcttaatgaagtttttttcatctcccaaaatagtgctctccctatgtccaggctctactaataatgcatcatctaactccagtattttacataagcttttacgtaaagcttcagcattgccattatagttatcactattccccacattttgtttaaaaatagtgtcacctgtaaatagatgaccttctatttcaaaacatactgaacccgcactatgacccggtgtatgatacacccgtatatgaaatggtccgatatttagtataccttcttgcaaaggaatacattgggtgaacatttttttcttgtatacacttggtcgacgacgaatcaattgcaataattcatgatctccatcatgtagatatgcaggtatattataatgtccacaaatatcatcaagagccgacacatggtcacaatgaccatgtgttaataaaaccgcaattggtttagaatctcctaccatctcaattatatgtttactatgaaatccagggtcaattatgagagattgattgtctttttttaatacataacaatttgccttatacaagcctaatgggcgttttattatttccattatacaatccctcccccataactaatgcagtatacaatataaacttctataaaattctatatcgttttgtagtatcttttttaataaaatacccttcccagaattgtggatgaagcataactagaatcgtaaataattccaaacgacctaatagcatatctacaatagccacaccttttgcacctaatggcaataatgcaaaagaatcagttggtccataaccaccaaaggctaaacctacattactttggaatgcggtgactatttggagtgcatcacctgtagataaaccaaaacatgtcataagaaatacggatataacataaatcattaaatatagaaatataaattgttgcgtcatatgcacccatttatctggtaatggctttccattgattcgtacaacttgaaccatatctggatgtatggcttttctcaaataaatgatactactcttaattaatataatgagacgaataatcttaacgccaccggtcgtagatccactacaccctccaaaaaagctagctataaataacatcatttgagccgcagcaggccataaatcgtaatcagatacggcaaaaccactgcccgtttgtattgatactaaggtaaaggctgcatcttgaaaaacttgtcctatatccatagaattagattgaaaatataaggatataaaggtgataagaataccaataactaatacaagccaatacatacgcgtttcaaaatcagagaataacgctgagaatcccttttgaattacattataatatacggcaaaattaccgcctgcaatgaccataaacagtataaatacaacacatatatatgtattttgactatataaaaaagtacctgcagtagttggcgttaatccaccagtggcaataatagaaaatgcataattcaatgcatcaaaaggatcaataccacctaagcagagcatgataaaacagatgattgtaaatattacgtacaatgtccacaatttcgatgctatagattgaatccgtggtaacactacacctggttttggcacagatgcctcagcattgaaaaaatgcgcagcatcagcaccaagattacgtaagaatgatagaatcaacacaatgattcccataccgccgatccaatgcattaatccacgccacagtatgaaagactttggtatgctatcaacatcagaaataactgtagcaccagtagcggtaatacctgacatagattcaaacagcgcgtccatcgggttaactaatacaccagatataataaagggaaacgcccccaataacattgttaaaatccatgttgagctaaccactaagaagccatctctcaagctaaaggttttactcttatttccaccaagtactagtagaccaccgagcagtatggataatatagctgtaatacaaaaggaccaatatgcagtttcaaatagaatactatatataaatggtataacaagaaaagctccaaaaatatagagtaatttgcctaccaaggacatgacaatctgtatacgcatataacccctatgttaaataattcaataatttagtaacagattcaggcaatgagaatagtacaatatgatcccccactaacagctctgtattcccccgtggaacaatcgcgtcatcaccgcggagtataacaccaactaaggctttaccaggtagccgaatatcttttagttgtttacctgctacgggagattgttctgtaataagaatctctatagattcagccttgccaccttcaaaagtagatatggagacaacaccttctccacttcgaacaaatcgtaatatttgtcctgcagtcattagacgtggtgaaaatacaatatctataccgacttgttccataagcataatatattcaggacgtcccacacgaacaacggttttaggtatgcccatatgtttccctactaaagcaactaaaagatttaatttatcatcatctgttaaaacgataataacatcattatcggctacttcttcggcttctaataaatcaaaatccgtaccatccccattgatgacaatggttttatccacttgtgcagccaaggcttcacaacgctcaatatccttctcaataaccttaacagtaaatcctgctttttccaataagatagctagattacgacctaataaaccagcgcctacaataacagcccgtttatggaaggttgcatgattagaaaaccattcttgttctacttcattaataccatcttttaaacctaaaaagaaaacactgtcattaggtaataatatgctttcaccatgaggtataatcatttcacctaatcgtaaaatgccaaccaataacacaccttctggaaaagtcaactcttttaaaggtttatttacgagcgggaatgtactattaattttaaattccattaaacgtacagcgccttgaccaaattcttctacgtccaaagcggatggtgtttcaataatatgaagtaattcttgcgccgtaaccatctctggattaatgaataaatcaacacctaatcgttctttcatatgatcgtccatatgatcaacgatatttgtatccctcacacgagctacagtagatggaacacctgctattttagctaccgcgcaagacaacatattaacttcatctgaatcggtaactgagataaacatccccacatcagataagtcaatttcattcaataactgaatatcgctaccattaccgcatactaaactaacatccaatgtattttcaagattatggatacgctcctgtgaacgatctataagatatacgtcatgatcatcttgcaccagtctttcacacaaggaatacccaaccttaccagcacctactacaataatcttcatagtttagacctcttgtgaatttggggtccattgtttaccagtttctgtcaacaatgtccaaccatcttcttgtactacaaggcgggatttcattaaatgacctaatgctcgtttaaaagcagccttgctgatgttaaatttatccttaatcaacatggctgatgattcatcactataaggcattttaccgcctcgttgtaataggtattccattataatctgaccatcagaaattaatgctttttctttgataggacgcattgacacattaatacgaccatcttcgcgtttgaacgtaacacgagcctctaccatttctccaacatttaatttgcgtgtcatttctgaacgatgcaaaaaagcaatccatcgctcaggggtaataaaaaaggctccatcactagtcaaattgtaaatagcaccacttacttgttgtcctacaacagcatcggtagcagctttagaggcgcgtctcatctcatcatcaacgtccatagaaacggccatacgaccagatttatcggtatataattttacccataccttttcccctacttgaggtctgccacgcatttcagcgtgaggcataaaaatcccccgctcagtaccaacctcaacgaaacaaccaaaattagttacattaataacctcaacataaccaatttgaccgaccttcatagcaggcaatcgcatggaggcagtcaaacgtcccttagggtcacgatatagaaatacctctacatcatcaccgatagcaactggtgaagtttgttgttccttatggagcaaaatatcatcatttgtatttcccgtttgaccatcaaggaaagcgccatgatcactagtgcgtagaacacgcagtgtagcaatggtattttccaataattcgctagccatagattattctccttcaaaaggaacacgtccagcatcgttccataaggcttctagtccataaaattcacgaatttcatcgttaccaaacacgtgacaaataatatcgccaaagtccaataatacccattcaccttcgcgatatccttcacgatggaggaccgtcataccttgttctgctgctatatcctcaatttcatctgcaatactttgagattgtttaatattattggcgcttacaatcataaaataatcgcctaacatagaaacaccttccaaatcaagtatttcaatatcatgacctttcttatcataagccgcttgtgcaagcgctaaaacatgttgtttaatttcttctttttgtttcattgtatctcctattattctttcttctctggttctgaacctggttctgatggttttacacgtgtgccttgttctgattctaccgcaacaggtgcttttttagtttcaggtgtagaaacaaattgacttaaatcttctggtgccaatgtccccattgtaattcccactaagcgctgagcttcagttggatttacatgccaatacacgacgtcattaattttttctttttcaccaggcaaaatataaaaatgaatatggtctttatccatttgaccgatagaacgcattaatttaatagcatcccatgtagatatattactttcataatgactccataaacgccatatatgccaagcttttgtaataaaccaagtatcttgttcccgatcaacccataatttcaagaaccgttcttgtcgttgaacacgtccaaaattatcattattttcgtctgtgtagcgtaaatatgctaatgcattatcactatctaaattttgatagcctcttcgtaaatctatatctttactaccagtttcagcatcaacatgttccatattcttttctacgtaaaactgttgactacctaaaacatcacttgtttttttgaaagctgcctcatcaacgacaacatagtaaggtatgctgatatggaatatatcctctacaacggctttcgttagttcaatgttaccttctgcatacatttgatttaacatagatgcagatttttggtctctactttcaattttactattgctaggaataccaattatatccatcgtattagtattcatattaatagacatgaggaataatgagtcagcttgactcggattatttttatctcgccctacaattaatacatatacaggcttgtccaatgctttctgttctacattaaccgtatcagtatgcttaagttcactggattcttcaatctcacttgcagtatcagtttgtgttactcgatgatatacataactgattccactatacataccccaaccgatgccacaaataacagtaagtgctaacacgaatgcgatgattagacggccccattggagcttattttttttcatctgacgttctcgacgtcttctacggcgacgagctcgcgctttttcacgttcatccattctaggcacctccttttttcatatgctgtataagatcattacggctaataatagtaagaggataaatagtatcattactatctattaaatgtcgaatggtcatatcaaatccacacaatactccggcatcaagagactgttctgcagctgcacgaatatcgtttacgccaggaaaattacgattaggctcaacataatcagataaaaatataactttatccaattttgacatgcccacttttccagttgtatgaacacgtattgcttctaatacttctcgattagtaataccataatgagtattcgctaacaccatacctgctaaaccatgtaataaagcaccgctatgtaacatatcaacatcacaggccaaatctgcaactaaatcttgcatttccaataatggtaattctttagcacagtcatgtaacaccgctgctaaccgagcgtcttctacattagccccatattttttagctaaataaatcgctgactctacaacacctaaggtgtgtataaaacgctttttacttaatttattagataagtcggtttcaatttgttgtatatccacctttaattattccttccgataaatatcatatttttcaatatattgaactacacatttaggtaacatatatctgaccgtcaagccatgacgcagtcggtctcgtaaataagtagcagataatttcatttctggtacattcattaaatgaattctattcttagctttgggacctaataactctaatgttgtatcaataacttgagatccatcaggcctcatagcaccaataaaatgacaatgctctaataattcatcaataaatttccaattaggtaagtctcgtattgtatctgtaccagcaataaagtaaaaagaaacagaatctccatatatttttttgaaatgatgaatagtatcaattgtataggaaggcccttcacgacgcatttccacatcggatatttcaaaatacgggttatctgctaccgccgcagccgtcatggcataacgatgcttagcatcaataacatcattatgtttatgaggaggtattcttgcaggaacaaatataaccttttctaaatgaaagttttcccttgccacctctgcaatcattagatgtcctaagtggatagggttaaaagttcctcctataataccaatccgccggttctctaccatatataagtcacaccctttatgactataatacaaatcaagataaataatgctaatgcttttacatatgatacccactcataacgaccttttggagtctgaatataacgataataagctcgtatcaaataatataaacgcatcacgaacgaatttgtcctgtaccaaatacaaaatatttataggatgttaatgcttgtaatcccattggtccactagcatggagtttttgtgtactaatgccaatttcagcaccaaatccaaattcaaaaccatctgtgaaacgtgtagacgcattatgatatacagtagaacaatcgataagattcataaaatgctgagcggttttcatattatctgttacaatcgcttcagaatgatgtgtcgtatattgattaatatgtgaaatagcctcatccacagatgatacaatagatacatttaaatcaagatcattatattctgtactaaatgagtgctcatcaacagcaatccccttaacaatctgtaatacatctggtgtaccgtgaatcgttacatgatggggctctaatttatggtctaatgccaacaaaaactcatgagcaatagatttatgaaccaatagggtctccatagaattacatacagaaggacgttgtacctttgcattcacagcaatatcaacagccatgtcaatgttagcttcagcatcaacataagtatgacagacaccgcatcccgtctctataacgggtatcatactatcacgtacaacccgttgtattagccctgcaccgccacgtggaatcactacatctatataacggcgttgttgtagcaatacacttacagcttcacgatctaatacttctactaactggatagctgctcttggtaaatcattggcttctaatacatcttgcataatggatacgatgacgcgatttgtacggtatgcttccttaccaccgcgcagaatagtggcattagcggttttaaagcataaggcgccagcatcaacagttacattaggacgcgcttcaaaaatgatacctataacaccaaatggtacggcacgcttttcaatgtgaagtccgttaggcctattaatagtttcaagtatggttcctaccggtgatggtaatagactaacttgacgaacaccttctgccatttgattaatgcgctctttagatagtagtaatctatccaacatcgtatcaggtaccacgcctcgagccgaatccatatccatgtaattggctgttaaaatttgttcactatgttgaactaacgcatcggctatagcacataatacctcattgatgcgtttctctggtaattgctgtaaaacaatagatgctgctcgtgcagattcacccatttctttaaatatactttcatatgaattcatactgtacctcatcaatgaataattactagattatttctgtgaacaacctcatcatatgttgtatcaatttctaatacacgagctatatcttgcgtattgtgacctctaatcttaagtaaatctgtagaactataattcactaatcctctagcgatttcttttcccttagcaataattgatactgtatcaccaggttcaaaagatccatccacttcaataataccagctggtaaaatactagctccgtgatttaatacggctttcgtacatccttcatctatagtaatgcttccacttaagcgtttcccataagctacccaatgatgcttttgagaaacaccttgatcattagcgacaaataatgtacctatattctcacctttacatactttacgtaaagatttatccgattcaccactggcaataatcatatgtatacctgaattagtcgccatatgggcagccttaatttttgtatacataccaccagtacccatacttgaacctgcaccaccagcgatctcataagtttcatctgtaattacagaaacttcgtggattaaagtagctgtagaatccgtagctggattagccgtatataaaccatcaatatcagataaaataataagcacatcggcttctacaatccctgctacagtagccgataatgtatcattatcgcctattttgtattcttcaatagctactacatcattttcattaatgattggaatgacatgtaattgtaataacgcatgtaatgtatttcgtaggttcaaatagctatgacgagaagtgctatcctccttcgtcaataatatttgagcaaccgttctaccgtactctcgaaacatgcgttcatacatatgaatgagtacaccttgtcctaccgctgctgatgcttgacgtaacacaagatctcttggtttttctttaaagcctaacggcgcaaggcctgcacccgtagcccccgaggaaacaagaataacctctttcccttggttggcaagatctgataattgacggactaaatgttctatccgttctaaatttaaatgaccatttgggtaacataatgtactgctccccacttttacaacaatgcgtttagcattcttaatggcatctctcatacaatcatctcctataagggaaaaaggttataactattatttcggtaatataatttttggttcttttttagctttataaagaacaccattgaatccaataacttgtactaactcagcaccaagcatatctgctaattcttgaaaaatcgctttatcttctggactattattaagcaatttaaccttgattaattcacgtgccatcagtgctgctcgtgcactatcaatcacgctatcctcaagaccatttttaccaatttgcacaacagctggcatagttgcagctaatgagcgtaaataccgtttctgttttcctgtcattataactcctagtctctgaatgtgaatcgttgttcaccaataacaacttcatcgccttcttgacatcctttttcacgtaatttattatccaattccataaaacgccaaatacgttggaatcgacgtaaggattgatcatcgtcaagattggtcattgccacaagtcgttcgatacgtttacccgtaatatagaaagcagcatcatcaccacgtgtaataacaaactccgtatctggttttgcttcatacataacggtatcatcagtggcttcaacctctggctcataattttctacataataatacgctcgttccattagctcaggtaaaccttcaccactcaatgcattgattaagaaaacttcataacccttgtcttcaaaataagattttgtatttggaattgtttcatcatcaaagacaagatctattttattaagtgccacgatttgtttcttattagctaatttctctgagtatttacgcaactcgtcattaatagcatcaaaatctactttagggtcacgaccttccatgccagatacatctagaacgtgaatcagaatattcgtgcgttctacatggcgcaagaaattatgaccaaggcctacaccttcactagccccttcaataagaccaggaatatcagctaatacaaagctacgatcaccagggagcgttacaacacctaatacaggagttaatgttgtaaaatgataagccgccacttctggttgtgctttagatactttgcgtagaatacttgatttaccaacacttggatagccaagcaagccaacatcagccaatacctttagctctagttgtaaccagcgttcttcccctggttcccccttttcagcaaaggtaggtgcacgattagagctagataaaaatctcgcattaccgcgtccaccacggccgcctttagcgatgataaaggtatcaccatcgtgaactaagtcacagaataccttacctgattcttcgtccttaacaacggtacctaatggaacaggaataattaaatcttctgcaccgcgaccatgtttattggcactttcaccattaccaccctttggcgctttaaattggcgtttataacgaaaatctacaagagtattaatatttttatctgcttttaaaataacatctgccccttggccaccatcgccaccgcttggtccgccattaggaacatatttctctcgacggaaactagacataccgtctccgccatcacccgcttttacaaatacacgagcgcgatctataaacataattacatccttttctgcaaaactattttaatagttctattgccttttgaatttgaatatctgacatatcactagatggggtagttccctttggtaattctagaactacatctggttgaataccagttccatcaataacacgatcattaggagtatggtatttagctatagtcactttaataccttcatcctctagatttggatatacactttgaacagtgcctttaccataactattagtgccaacaatggtacctaattttctatcttgaatagcgccagcaatgatttcagatgcactagcagaacctttattaatgagaactaccataggtaatgcaggattttttccatcagatacataatttttggtttttccatctcgtgttgtgaaagatactaatgtaccttctggcataataatgctagcaatatcttgcgcactattaagtaatccaccagggttatcgcgtaagtctagaactaatgaagtcattccttcggatagaagctgctcatattgtgttttaaaatcacctgctgtatgctcagcaaattgactaatgcgaatatatccaatgtggtctgataacatcttactttttactgtaggtaatacgatttcttctcttgtaacgttaaacgttaataattgattatcccgttcaaccacaatcgttacatcgctaccagcttcaccacgtatttttgaagctgcatcttcaatcgtcatagaattagtgtctacgccatcgatggatacaatgtgatcaccgcttttgatgccagctttataagccggcatatcatcaatcacggatactgcttctaacccttttgaaccatgaccaagaaccatgcccacacctgcataggtgccagaggtatgctctttcatagattcaaagtcatccttgtctaaatagacactatgaggttctcctaaggaagccactaaacctttcaacataccatcaaacaatgtggctttacttacaggtgtcataaatttctgagtcgctatgtaataggttacgacaaatcgtggtaaacccatagctgatccagaaatataccaaaatacgagccacaacataatgatggacgcaaatatatatttaattaagtctaaaccaattcttttaaaattattattcattctataaataacccataggatctactggatccccgtttacacgaacttcaaagtgaacatgaggtcctgtactattgccagtactgccggcataagaaataacttggcccttcgcaacggattgaccttcatcgacagcgagctcagagttatgaccatatagtgtagaaagtccattaccatgatcgataacaacagcataaccatagccgcccatccatccagaccaaactacgacgccaccatcagcagcatgaacaggtgtaccttcatcaacgccaatatcaataccggagtgataaattgtagttccccaaattggatgaacacgatagccataaggggaagtgatttcaccactaacaggccagccaagttgtcctgtaccttgtacccaattatctgatgcaccttgcccaccagaggattgagccgcggccgcagcttgtcgttctttcaacatagcacttacttgcgctgaggaagcattaagttcttcaattgcttgcattgcagttgctctatcattttgcgctttttgaagaaccacattgcgttctgcttttttctgttcaatttcagcctgtttagcaagtgcagctttttctaattcaaccaacttagcacgatctgcttcgagtttttgtttatgagcttcaatttcagcacgctcttttttaatttcgttaatcaaggtgatatcagaatcgataattcgttttaaaacctctaatcgattagcgaaatcactaaaatctttagacccaataactacatcaagataactaagtcgtccattgatataaatatcacgaactcgtttataaaatacggattctcgaccttctaatcgtttttgagcttccgccaattgacgttcattaagtgtaatatcattttctacagctacacgctgctctttaatcgtacctaactcagcagtcgcttgacgaagttgttcttcaatttgtcgcaactgttcagaaacgcttccaatcacagtttccgcatctgcttttgcagcattttgctggttaacttgttgttgaatcgaatctaattgatttgttaaatcttcatcttcagccataatataggctggtgtcccgcataataccactcccgaaagaagggctgctacgagacgagttttaaatgtatactgtctcataatccctctactatactttcatatattgtttcaatgaaatggtactgccaataatgcctacgataatcccaccgccaattaagcatgctactaattgatagaagaatgggaacataggaactaatgggaagaatgcaagtgaatcggatacttctatggtaataaaatgatagaactcacccacgcataatacggcaataatagacccaataaagcctaacaacatgccttcgataacaaatggccaacgaataaagccattagtagcacctacatatttcataatcgcaatctctttgcgacgagcaaatacagttaaacgaatagtgttagaaataataaacaatgtagctgctgctaagaaaccgatgagtacgataccaccaatacggataatttgtgtaattcggaacaattcctcaatgatgtcttgaccataatgtgtactttctacgccttggaatgtagttactaatttagctgtagatttaacatcttcaggattttcaaaggtaagaacataagagtttggcaatggatttacaccacctaaggcgttcaccaattgttgttgatcccccaagcgctccttaaattctttcatagcttgttctttattaacaaattctaagtgttttagatttggaattgctttcacttgcttaccaacagccataatttgctctgtagtaagaccatctttcaaatacacacttaactgcacttgattctctaagctcgatgccatgttattaagattgataacaccacagagaaatacaccaagcataaataaagataatgctacagtggaaatagacgctaatgtcataagtccattgcgtttcatggactttaaggcttccttaaagaaatatttcattgttctaggcttcattaaattctgcacccctcatattatcactaagaacacgaccatcttttaattcgataactcgcttatttaaataggtaacaatatccatattatgggtaaccataattacagtagtgccaaaattattgatatgcttgaacaaatctacaatgtctttactcgtattcggatcaagattgccagttggttcatctgcaattaatacagatggacgattgacgatagcccgtgcaatcgctacacgttgctgttcaccaccagataaatcctctggtaaatcattcgccttatcagataagccaactaattcaagaacgtgagctaccttctctttaattaccttaggtttctcctcgataacctctaaagcaaaagcgatattttcagctacgcttttgttaggtaatagtcggaaatcttgaaatactacgcctaatttacgacgcaattttggtattttactacgtttcaattttgtaacatcaaattcatcgactataacaattccagaatctggtgtaacttcatgagttaataatttaaacaacgtagatttaccagccccactatgaccacaaatcaatacaaactcaccatcattaatggtgatgcacacattatcaagtgcagtagatccgttttcatatactttactaacattcttaaattctatcattggttccccttttatttacgtgtcaccacttttttaactgcttttacaatattttcagctgttaacccatatttcgccatcaattcttttggtgtaccactctccccaaatgtatcttgaacaccaacgaattccataggaacaggtttatgtgcaacaacaacttcagatacagcagaacctaaaccgcctaaaatattatgttcttcagcagttacaatagcacctgtttcttcagcggctttaatgatggcattagcatcgataggtttaatggatgccatattaataacgcgagcagaaatttgttcaccttctagttgtttagctgcctcaactgcagggcctactaaagcaccacaagcgataattgtcacatcagaaccatcttttaattgattggatttaccaggtgtgaaagtatatccttctgctgttacatcatcaacaccagcacgaccgagacgtacataaactggaccattataatcagctgcccattgaatgacagattctgtttctttttcatctgctggcacaataacagtcatgtttggtaaaacacgcatacatgcgatatcttctaaactttgatgagttgcaccatcttcacctacagtaatacctgcatgtgtagcacatactttcacattaagttttggatagcatacagcattacggatttgttcaaatgcacgaccagttgcaaacatagcaaaggaagatacaaatggaatcttacctgctgcagctaaaccggcacctacagagattagattttgttcagcaatacctacattaaagaaacgttctggacactccttcttaaatgtatcagtcttagtggattttgataaatcagcatcaagaacaataatattagaattttctttaccaatttttgctagcgcattaccgtacgcttcacgtgttgctttacccattattgtacccccatgatttcatttacgaatgccacaccttgttcttcactaggtgccttaccatgccaaccagcttgaccttccatttctgcaacacctttaccttttacagtatgcattacgatacatgtagggccatctgtgaaagctttcgcctcttcaatggcttgatgtaattcgtcaatattgtgaccctttacttcaataacattccatttgaaagctttaaatttatctggaattggcaatggggacataactttttcaatatcaccatcaatttgtaggccattataatctacaaaggcagtcaaattatttaatttataatgacctgcaaacatagcagcttcccatacttgaccttcttcaagttctccatcaccgagaatggaatatacacgataatcagcattatcgattttacctgctaaagccataccacaagctgcagaaatcccttggcctaaagaacctgtagacatatctacaccaggtgtatgcttcatgtcaggatgaccttgaaggaaatgattaattttacgcaaattgattaattcggatttaggaaaatatcccttttcagcaagtgtcgcatacaatgctggcgctgcatgaccttttgataacacaaaacggtcacgatcttgctttttaggattacttgggtctacattcatttctacaaaatataacagagacattacatcagcaatggataaagagccacctggatgtccagatttagcggctgtaacagactgtacgatgcttacgcgaatcgcttttgctttctcttgtactaattgtttttgatcttgactcaatgtagccataaagacctcactttctggataatctccaatttatatttaatactcttctaaaagtgaaatagcaaattccgcattgcgttttgataccttacgcaatgtttgaatgcgattgaatgaatgttgataggattctgtagattgtaaaagttctacacatcgatcatatagaacattagaatctaattctgtcatagtaccaattggttcttgttcaatcatatgtaaaaaacttgtaattttagggtcataggaaatgccaataactggttttcccattaaggaactaaatacaagtgcatgtaggcgtatgccaatcattagatctacattgccagataaggatagttgctcttctgtggtaaaaggtccttctaatacgattggttttaccttcattaatgaagctataatctttgcttccttcgtatcatcaggatgagacataggtatgaatactatttcagcatcttgctctaaacttaaccggctcaatacatctgctaaactctgtctatacgctgtatcatccttccaactacgcacagcaatgccgatgcgtttcctaccactttcaataggagcacaattatatttggttaaaatattagcaccgatactaggattggccttatgcatagctaatacagcatccgctgtaacctcaacatcgtaaattcctagagcattcaactcatctttcgaaatggaatcacgaactgtaattccatctacatatttcaacataaatttaacagctcgttttgtagatttacgatataaaggaccaataccttgagagtacagcataacaggttttccaagtaattttgcaagccccataatacttatataataataggtattccgaatacttgtagcatcctgtaataaactacctccaccgctaatcactaaatcagcattacgtatggcattcaaaataccaaaggcagcaaatgttccaacagccttaatattatgttttctactagtctcttgaggattgccggagataaccgtaatatgtgcatcgtcttctacatcacgaatagcgtcgataatggcgcaaagcatagcttcatcaccagcattaccaaagccatagtaaccggaaataacgatattactcatgactgccctcccgatgcatagcccattgcgagatgtaaataaggcaacgaactgcaagaataagaacaatacctatagcacaaccaagcaacaaaccatcatacccacgcataatagacatgaagacaggtgttctaatatgacagaatgtttctaccatagatgctacgccgataacgccagctatagttaatacaaagtgaataaccataggccatttacgtaggaatgcaaatgttgcgagcatcaacaatggatgaccaatcataaattccttttctcttggtctagcatatagtgtattctctaggaatctacgcaatacgagttcaaatgttggaacaggcacacctgccgtatgaccactacggcctacaaatacccaagccgcagcacctatagcagcaaacacaaagaacacatacatttttacatctgtagttagaaattctttaatgaattgcttagcttctgtaccagagttgatcatgcgacctttccataatggaaagcgttgtagatatgcgatcataacaaggatgattggtaatacgaaggtaagttttacacctctaaagatttcaaattccataaagaattttgtattacctaataatgccgcaatatacatgccaccaatagcagcaaataatgttgctattacgagatagagtaatgcgagtagcgtagatttccacgcacctataggacgtgtaccatctgatctgcgccattcttccataagaatcaccaaggctccaacaggtgccataatagctgcagataaagcccaaatttgaactaataatgtaccgctagttacaataaatccaacaatggatagtagtgatagtgcaaaaaatagaactaattgtttgtgttgtgacatagctataaacatttgtcctacatacacaaataacgctatactaccaatcattgttagaacaactaataaaggattaggtgtataagcaggataaatatctgctggcccaaattcatagcccttagcactcaatttatctgttgcactatgtacatagttaatcgttgtttgtaacacagtttcattattttgccctacttcatacatagggaataaattgaatcgaatgttgcgctcaatatcgctaatatagaatcgttgagccgcttcttccggagtaatcttctttaactcatctttagaaattgtgtaaacacgacctacactgtaattcttcttagccgccatatctaagaatcctaactgaggctcatattgcaactgattaacagcttcaataccaaccaatggaatatgaagattattcatagcctctaaggtttcatcaatatgatctggtgcacctaatgcctctttaccagcaaatataatgcctgttacatgaggtaccccatctagacgattaaatacatatttaatatcatcagatgtaacattgcgataattagtaggtcgaacaattacattgaatccgcgattggccacttccatggcttgaatcttagaaatacctaagttcatcttcgcatagctatctgaagtagcaccttgtaattctaaaacgggtcctatactagtattaagttctttaaccttttctttactaatacgatgatataaatcttcacgaatttctttataatagccttctttaccaggaataagtgcaacataagtagcgcctggtttaatagaaccaccattgatacgaacatcggacatatcttgtgatgaaagtaatttaatttcaccagcgtcatttgccttttctaatgttctatcataaatggcaaatgccgttattcccgcctctttcagtgcatcaaaagcatctttttgactacgtttttcaaaagcattagctcgaagtacagcatcataatctactatattctcaatatgattttgtgccttttcaattgtattgcgctccattactaaatagagtgctgaaataagtcctactatgatacatagtataagaactaatgagtgcttaggtttcttaacagtatgcacgatatttcctttctaattgagtacaggtttaatcttaatatgaatttctccattttcaacgttaacagactcagctttaaccggaactgggaaattattaaaatcatagatagcaataggatgcaattgttgtgatgtaatacctgcaatagtcaatccactaactgtaaatcgactaggagcaaatgataaaacattatctttcaactgcaaggcgccttccaaactagctgttcctttcaaagaccccataatgttaacagtcccagttaatgctatacggtcattattaattactacattagcatcctgtagaccttctgtattctgaatcaggaatttctttagatcatcctctaacacaataccttctacataggatggaccaagacttaggacctcaacctcatgagatgcaatgagagaaataggattaataacaatattatttgcctcataatgaagactagaaaaattcaactttcctaattgaacattttccaatgttcctgccgcgtgatctgcttgtccgtaaaccagtttaaaggcaggtgtagattcaataacaacagtttggctggaaggtttaagtgattgatttaactcatcttctacaatagattccatatattttggaactacaaattgagcacccaccacacatacaatgataagcaagacgatgaatattaaaaattttttcattatagcacctatactgttaaattagcttctttctttaaatagccttctatgaattggtcgatattgccatccataacagcctgtacattaccagtttcaaccgatgtacgatgatcctttaccatgttataaggatggaatacataggatctaatttggcttccccattcaatagcttggtatgtcccaccaatttgttcttttaattcagcctgcttttcaagttctaattcaaataattttgcacgtaataaacgaagagcttgttctctattttgcatttgagaacgctgagattgacattgaactacaatgcctgttggtttatgcgtcatacgaacagcagaatccgttttattaatatgctgcccaccggcaccacttgcacgatatgtatcaacttggacatctttcatatcgatattgatttccacagtatcatcaatttctggcattacgtcaacagctgcaaatgaagtatgacgacgtgctgcagcatcaaatggcgatatacgaacgagacggtgaacacctttttcagattttaaatagccaaaggcattttcgcctttaataagaaatgttgcacttttgattcccgcttcatcgccaggttgttcatccataagttccacggaaaaccctgtcttttctgcccaacgcaaatacattcgaatcagcatagaacaccaatcttgtgcttctgtaccacctgcaccagcatggaatgtaagaatagcattattctgatcatattctccgccgagcaaaagcaatacctcttgtttttcaacagcctcttgaatgccatttacaaattgtttgatttccccctccatagaggtatcttcttcttcaattgccatatccaacatgacactagcatcttcgatatcagacactaactgattatacccctctacagagttttttaattgtgttgcctcttgagaaatctcacgagccttatcaggattatcccaaaatgtaggatcactcatctgtacatcaagtgtgaagattcgttcttctttctgagctatgttaaagtgaatccctcattccataaattcgctcttctaaaccagagataattggttttaaatcctctaacaatttatgttcaccacctttatagaattactacatgtacatagtaacgatttactgtatttttaaaatgaaaaatggccgttgcccagaaggtgttttcccattgagcaacgtgccattcacaaatgttaatctatgttttgtggctccaacacatcttcatgatggggttgtgcaccttctaagtgatcaactggttcttcaatttcttgaatcaattgtgcacgaattttgtacaatgccatgattgtttcatcttgaatagattcaatcatgtgctggaacatatcataggcctcaaatttatattcaaccaaaggatttttttggccatatgcacgaaggccaataccttcacgaagcatatccatattatccaaatgttccatccatttactatcgacaacacgtagcataatcgctttttcaagttggccaaacatcgcttcacctaaaagatcaacacgatcttgatattcgctatgtgcgatttcgtgtaaacgttcatccaattcttgacgtgtatattcttccatctcttctgtagacataagttcagaagtcaagaagtattgactcaagtgtttatgtaaaccttcgtaatcccactcttcaggatacaatttttcatcagcatatgtatcaacagcttcagttacaagcttgtcaatcatttcattaatggtatctcttaaagattcatttcctaatatacgacggcgttgctcatataacacttcacgttgttgattcataacatcgtcatattccaagatatatttacgaatattgtagttatgatcttcaactttcttttgagcacgttcgatagattttgtgattaaggaatgttcaattggttcatcttcttccattcctagtttatccatgatgccagaaatattatcagcaccaaagatacgcatcaagtcgtcttccaaagataggaagaattgtgaagaacctggatcaccttgacggcctgcacgaccgcgtaattggttatcaatacgacggctttcatgacgttcagtacctaagatagctaaaccaccaagttcaggcacaccttcacctaatgtaatatcagtaccacgaccagccatgtttgtggcgattgtaaccatacccatttgaccagcattggcaacaatttccgcttcttgttcatgatgtttagcgttcaataccttatgtggtacaccagcgcgcaataacatatctgaaagttcttcggattgagtgatagatgtagtaccaatcaaaataggttgacccgtttgatgacgttctacagcattgcgtacaacagcacgatattttgctgctttagatttaaagataaggtcaggtaaatccacacgaatcaaaggacgatttggaggaataggaattacttccaagccataaatatcattgaattccttttcttccgtcttagcagtaccagtcataccagacaatttttcatacatacggaaatagttttggaatgtaatagatgctaatgtttggctttcacgttcgaccttaagaccttcttttgcttcaatagcttggtgcaaaccatcagaataacgacggccaaacatcaaacgacctgtaaactcatcgacaataacaacttcaccatcttttactacatagtctgtatcgcgatgcatcatagcataagcgcgtaaagaggcacctagtaaatggttgagttcaatattatcagcatcatataaattttcgatgcctaacattttttcaacttttgtaataccagaatctgtcggtgcaatcgtcttttgtttttcatcgattgtatagtcttcatcttttacaagatgtggtacaacttgcgccaatttataatagttgtcagtagagcgactaccaggaccagaaatgatgagcggagttctcgcttcatcgatcaaaatagagtcaacttcatcgacgatggcatagtttaatggacgttgtaccatttgagatacatcggacaccatgttatcacgaagataatcgaaaccaaattcattgttagtaccatatgttacatctgcagcatatgcttctttacgttgattataatcgagatttgcaacaattaaaccagtagaaaggcctagaaaattatacaaacgacccatttgctcactatcacgtgtagccaagtaatcattgacagtaacaacatgaacacctttaccggataaagcattaagatatacagctaaggtggcaactaaggtcttaccttcaccagtacgcatttctgcaatattacctctatgcaagcaaataccacctagcatttgcacatcaaaatgacgcataccaagtacacgtttagatgcttcacgacatacggcaaaagcttctggtaaaatatcgtctaacgtttctcccttttgtaagcgacgtttaaactcatcagttttagcaacgagattagcatcacttaattttacataattaggttctagttcattaatatgatctacaattttgcgcatttttttaacttcttttgcgctattatttcctataagactttgtaaaaagccgaacaaacaaatcactcctcttcgggatatcttacattattatatctaattcattataacgaaaaagccttgaatagtcaaagaattcaaggcttttctatagatatacaactagaaatataaaatggataccgtttctggtatccattctatatttcactcgattaaatcaacgtagaaagataattaattgaataatcgatcatattattttaattctggttcaatcaaaccatagaaaccatcatgtctgcggtatactacattcatcgtttctgtttccgcattgaagaacatgaagaaatcatgtccaatcaagttcatttgcaagatagcttcttctacatccataggacgaacagcaaaatgtttacgttttactacttcaattttttcttcttctacaggtgtatcaagaggtgctacatctggatggaaagcttcttgacgtttaaaacgttttgccaaacgagttttatgtttatgaatttggcgaacgattttatctactactaaatcgattgctgcatacatatcatcatttgtttctacgccacgaagtacaattttatcaacgaaacatgtaatttcaattgttgctttatcacgcactacagatagtactgcttgtgcatctaactcatcatcaaagtaacgggtcaacttacccaatcttttttctacatactcacgaagagccgcagttacttcaatgtttttacctctgattgctactttcatatgtcaacaccctttctaaaaatcaacgaccagttgttagaatgttcttattactctatttctggtgtcttaattagtatttctacatctacatataaaactcctcttttttgataaaaatttttatattttttgtagaaatatgtattgcacactattaaatgtgcaaaaaatcccaacaaataagatgttgggatttttttaatttagtttttatgtaatatttggtatatgattacgcttttacaacatttgctgcttgtggaccacgattgccatcaacaatgtcaaatgttacattttgaccttcagataaggatttaaaaccttcgtcttgaatagcagagaaatgaacgaatacatcgctaccatcttctctttcaataaatccataacctttttctgcactaaaccattttactttacctaacatgggtaatatcctcctataaaatatatattgtcttactgtcttgctctatatctgtataataacatagcatgtataaaatatcaaattagaacgctcgtatttcatttaaattattatgcagattcaactctaagaaataaataaatttgattcttaattccttttaattattggttttactctatatattctatagtataaatgctcatatttatttcattataactaaaatatatgagtattataaatattttttgcactgtgcagatgcataaactgtatatttatcacaaatatttatatctaatatctatttattcgaattaacagatttagaaaaatcacttaattacagtagttcctaaagtaaatatatataatttatcaaaatttcttataagataacgggtaacaaaaaacactcataattattaactacgtaattatgagtgttgttcctaataatctataaaattttagacaagaataattttgttctatcactagaaggtgcatcaaatacttgtactggtgtgccatcttctaggatttgaccaccatcgacaaataacactctatccgcaacctctttagcgaagcccatttcatgtgtaacgataaccatcgtcataccttcatcagccaaagatttcattacatccaatacttcgcgtaccatttctggatcaagtgccgatgtaggttcatcaaataacattaccttcggtttcatagctaatgcacgtgcaatagcaacacgttgcttttgaccaccggatagtgagtccggatacatttgagctttatcagctaatccaacacgttccaatagtttcatagcaatgtcttgtgcttctttcttatccgtttttcttacatttacgggagccaatgtcaaattatccaataccgtcatatgtgggaataaattaaagttttggaataccatgcccacttctgtgcgtacagcattcaatttatttttatcggataaatccataccatccacaattacatgaccactggtaggttcctctaggtaattcatcgtccgcaaaactgtacttttaccagatcctgaaggaccgatgattacgacaacttcacctttatcaatttgtagattgatgccctttaatacttcatttttaccaaatgattttcgcacatcttttaattctatcattttacgttatatttcctttcaaggtaagcaaccaatcgagaaatcggtattgtcatacatagatagataatggcaaccgttccccaaatttcagtagccgcataggttttagcgataattaattgaccacgacgcatcaattcttcaaaaccaataacagaaactaaagaagaatcttttagcatggcaataaattcattacccaaaggagggattgatgctttaaacgcttgcggaataataataaagcgcatagtttgccaccaagacaaacctagtgaacgaccggcttccatttgccctttatttacagattgaatacccgcacggaatatttcggatacataagcaccagagttgatactacatgctgcacaggctgctatataaggatcgattcgagtgccaatgatttgaggtaatgcaaaataaatcataaagatttgtaccaacataggagtaccacgaatcacatctacatagcatttagcaatcaatcgaacaattacgaaattcgacattctagctaaggaaacaattaaaccgataatgaaaccaaagcttacagcaacagctgtaatttttatggtcattaaagccccatataataataatggtaaattactcgttatgacattccagtccatttacaactccctaattatttaaaatccaacacaacaggcatatctgcaggtgcatctacattaaaccattttttatataatgtattaaattcaccatctgctttcatatcagcaatagccttattaatttcctcttgtaaagctttattatctttattcaaagccaaacctaagtactcttttgtatttggatatggcaagatttggatatgctcatcaggatgttttgtgctgtaatattgagcaactggtaaatcaataacagtagcatcaacaccaccattttgcaactctaacaacgcttcattactatgatcgaattcttttacagaagtaccttcaatcttatgagctaaatcggaaccagttgtccccatttgagcagcaatttttttattcttcaaatcgtctaaggaatgaatgctattagaatctttatatacaatagctaatgcattttcatagtatggagatgagaataataccttttcactacgtgctttggtgattgtcataccagaagctgccacatcgatatcatgtgtatttaatgctggaatcaacgcatcaaaggcaacgtttttaagttctacatctttgttaatacgtttgccaattgcacgaatcaaatcgatatcgaaacctgcataatcttgggttttatcatctttaaattcaaaaggtacgaatgtagcatttgtgccaacaattaacttattattagacgttgttgtagaagaaggtccacaaccaccaactaaagatgcagccataacaactatcagactaccgagaactaatttttttacttttttattaaacatcttcttataacctcatatataactaagtttatttatatagtatatatacacggaataattatgtcaataataatgtatataacatttttaaaattccacattttaaagatttctctattaatttttatacataatatgtattaatatacgttctctgtatacaaaatatagcttaacaaacgcaatatctacaattttcacttatacatctgtataaatgaaaaaagcacatgagaaaagcctcatgtgcccgttatacggctgacctggtctttgcccccacactcgcctgctggaaggttcgctcataagcccatagctccccactactactcctctcggtttcccggcaggacttacatctaagccgcaccatgctcacagccctttggactgcttatgtggatcgttttgcctgcgactggcctcgacttacaaccacagacccgtattttaatattatagattataaattatatctatgtctatatctttattatttgcagataatacaaactctagagtaatcaaacatttgtgacaaatacctatgccttttgattcataaagtactctgttataacttggtttggtgatttaaagtttaagactttttgtgcaatgttattatatctattagcatatcgactatgtgcttttagaaaactctccatactattaaacttacgagaataaaatctctcactatcaattcgatgactgcgctctacctttccattctgccacggagaaaatggtcttgtcgttttatgctctatttctaatctttttaatacaatatcaaataaacactctcgatcttttactctatagtttgtaaattcacgaccattatctgtttgtattgtatgaataggaaatcccattttggcttctaaatttaataagaaccgacttgtattagtaacacttttttcatctataatttttagaattctctttctagaaaactcatcaatagctgtaagttgatagtaagattttccttgtgttgaaaaggctaaactctcgcgaggtacgtattttatatcaatctgaaccttttctcctggatatgttactagatctggtttccacttgctttttggaacagatttaacaacctttttctctttaatgtgacaccttatttgtcggcacatagagccatatgagcgtttataaccacgcttttttgcctcaacatatacttgagacagcccttcatgtttaaacttagaatgcatacgcttgataagtgctagttcttcctcagtgtgttgattaggatgagaatgtggtttacgactatacaatcgaagtgaatcgatagtcccgtcgaaacgcttcacccaacgttgtacttgttgtctactagtatgataacggcgtgcagcttcagcattatttccatactttatagcatattcacatactcgtttacgaaatcttaattcttcagttataatagaatgcatgagaaggaactccttttgttgtaatgtttggattaagcaacttcattataacagagttccttctcattttttattcacttgtcacaaatgtattatactcttacatttattatttgcagataatacaaacatatgtgtttatcaaaatcactgttgtgagaataaaaaatgcaagtcttaatttcaatgtatagaaaataggaataggaatataaaataattcttcatttttctattataattcttaaaacacaatttttacatcccattcttaatgcattccttttttgtcaacactttctattatgctaaatatgaatacctattcaaaaaccaaacattataccgatacacaaagcataaaaattgttgtataatacgaatactgttaaagaagaacggactataagttgtacgatgtaaagtccttggggttgggactttacatatttgtatagtagaggggtttattatgtttatgttatcattgatgcagccgtccgggctgtatgaactggagaaagatagtttagaggccattagtgctcaactattacaaatgatacaaatgaaaagctatcacttgtatacacactctgtacaagtctccaattatgcagttagcattgctgcaaaaatgggattgccattaaatgaaattgaacaaatccgtcatgctgcactattacatgatgtaggtcttttgatgattcctaatgcgatgattcaaaaagcaccatacttgaacaagcaagaaatgtcaaagtataaacaacatgctgctagtggtgctaatatgattgaaaactatccatgttgtcaacaaatcctatcatatattcgttaccatcatgaaaaatgggacggttccggatatccaaaacatttacgtggcgccaacattccacttggggcacgtatcattgctgttgcggattactatgattccactgtgaatccatccactgaattttgggcaaaaacaaaagctaaagcaaaagaagaattgtttagcgcatctggttccctctttgatccagatgttgtaaaagcatttatcgatgtactaggttaaacaacataattaaggctgtaatagaacaaaaatctattacagccttttatttttaaaaactaccactagctaatgtcaatgcttcaatatattgaggatgatatgctcttagtattcgtgcagctgactctaaggtagctcctgtcgtaaatatatcatcaactaataaaatccgcttatcatataacaacgaggaatcgcaagtttccttccacataaatgccttatcgattgtgctatgccgttcactaccagataagctccacatttctttatgggtatccattttatataaacaatcaaaccatttataacagacctctttttcagtattatattccataactccatttacactgtcatcgctgcttctaccatcaatacgattagaatttgaaaatgagaacacccaatcataaaaaaatagatctacctgattatatcctctaactttctttttttctgcacttgatggtataggaatcacataatgaggcctataatcgtgcatcctcaagttgtacgatgctaaaaaaggagcagcccctttggactgctcctttttttcgttaaatttaacgtcatatatcatggatttaataccacctcgatagtcagctagaatccaagcagaatctagcgaggacagtaatttagatggcacttgtcttacatgtagaacttcttcaatacaagcatcacaccaatccccttgttgttgtacatgggtaccacaatgaggacaaacaggaggaaataaaaaatcaaatagattcattatccatcacatcttccttgtaaacgttctttaaataatgtatatcgttcttcaccattaaccgttttaacagcacgctctacagaactctttgtaccgatcatgataacctttcgcttagcccgtgtaacagcggtatatagtaggtttcgttgtaacattccaccatacattggcacgaatggaatgataacaacgccatactcactaccttgactcttatgaaccgttatcgcataggccggcataatcatatgcgcttcatcaatagataggcgaacctctttataaataaagcgaatgcagatatcagatttggtaatggcataaataacgccgatttcaccattaaaaacttctaattcataattgttaagaacttgaattaccttatcaccaacgcggaatgtaattccattaacacgcacttctcctttataactatctggaggatttacggattgctgcacatattgagatatacttgtactgccagccttacctctacgcataggcgaaatgatttgaatatcaagttcatcatcgacaaattctttttcccgtttatacacatcaacgatggctttcatcatatcaccaagagagttaacggaaatgaaagtgaattcatcactagtcgtatcaagatttggcatttcaccacggttaatagcatacgcactatcgacgatactattaccagaactttgacgataaatatgttgtaatcgcgtatacggaaccatatcactatcaagtaaatctttcaatacgaatccagcacctataggaggcagctgatccacatcgcctacgataataacatgggcctcacgaggaatcgctgacattagagaataaaacaatcgcacattgagcatggatgcttcatcgatgataataacatctatatcaagaggatcatcttcatttttagtaaaatcataggaatcactgccagctacaggcatgagcaagcgatgtatagttgtggcttcaaactcagtggcctctgttaaacgctttgctgcgcgtcccgttggggcacaaagaataatacgtcctaacccacctaattgaaaacctttaactaaggctttaataatcgtagttttaccagtgccaggtccaccggtaataagtgaaaatttttcaaaaaatgataattctatagcttccttctgttcagggccaaaggtaatatgattatctgcttcaaatcgctcaataaaatctggaatatctagagatataggatcagcttcaattaagaaatcacgcgtatagtgtacaccttctacttcagatacatacatttcaggtggatatacatagagtatatcatcataataggtactatacatgatagcttgagaaagtaatgagtcaatatggttagctattaaatctgcatctacttgcaataaatcgtaggtacgccctatcaattcatcaacaggtaaacacgtatgaccttggttatctaaattccctaaaatccagtttacaccagcctctaatcgtcgctcgtcatcagcatcaagccctaaattcatagctaatgtatcagccgtattgaataacatatctggggcgatacgcaataaattataaggattatcctgtatgacatctatagaggatgcaccataatatgtgtacacagtgcgagaccatttagaagaaatttgatgagactcaaagaagtggtttaaatcggataatataccttcaccgagtaatgtattatataattcctctttaacgcctttgcgtaaacctggtacatctttaatttcttctggccgttcttcacgcagtacatctaataaccggaggccgaaataatcacagattttctctacagatttttcgcctaatccctttatgcctaagttcatcaaatacattctagcagcacccatattatcgggttttaatttttctatactagatgcatcaaactgaatgccatatttttgatgttctacataacggcctttaatctcaatatcttccccttcttttggggcttcaaagcgaccagtacaagtaatgtattcctcattataatctttcacaagaaatacacaatacgtgttctgtgtgttctgatatataattcggtatacaaatcctcgtaatacttccattatttctccgtattaggtaatgcttcgataatttcttgaacagcatcagtaatgctgccttcattgccaatcttaatatgagctacactttcatataaaggataacgttcctcgtaaacattgaaaatatattcaatactttctttcacaagtgggcgaatctctaaatccaagtcatcgagaatatggttgacgtcgcgattaacaaagacaactaaaccattatttctcatgagatttacaattttttcagatgtcactgtgccaccacccgtagcaataacagatggtttattatgaatcaattctttaattgtttcgtattcatacttactaaatgcatcttttccatcatagataaagatattttgtacggttttccccactttatcttgaatcgtttgatccaaatcatagaaatctcgtcccaattctttagctaacattttgccaaccgtagttttacctgcaccaggcataccaattaggaaaatatgcttatgcatgtgttcttttaagaactcattgctaatcgaaataacatccttcatataggattcaatatatgtcaacatacgtgaatcgtcacattcagttttaagactagaaatgatctcatgatcccgttcttcatcaatcagtggtaaatgatgttcatccttatatttaccaattgatttaatgatagataaacgttgttcaaataagtttactaactgtgcatcaatagtatctatttgtttgcgtgcgtctttaatatccatagctcccccttatgggttattacgtaaaatccgaattgctgtttcctcatcgaccttcatttggtcgatcaattcttgcaaattattaaatttaacctcaccgcgtatatatgatataaattgaacagttacttccttaccatatacgtcttggtcaaaatcaaatacatgtacttcacatcgatgatattgatttttgaaagttggattatcccctatatttccaacaccatcataccaaatgccatctatacaaacccgattagcatataccccatcaggtgggattgccatctcattgggcaataaaaagttaattgttggaaatcctaatgtacggcctcgttgatcaccttttatgacggtacctctaaactggtatggacgtccgagccaagccgccgcttgttccatatgcccttcttctatagccttacgtatattcgtgctacaaataggaccttcttctgtagatagcaaaggttcaacaatgatatgaatgccttttgcagacaaacgttcccgcattaactgaggattgccagctcctttggcaccaaatgtaaagttagtaccaattgcgatacctgcaacatctagatcaccacaaagagcgtctaaaaattcatcaggtgacatattgaatatgtccaaattcataggcaatcgtaagatataatctacctttagagattctaagatttcatccataatatcggcagataatacccgtttaggaacatctccaggttgcaatatcgtcataggatgcgcactaaatgtgacgagaaccgtaacggcatcatgcgccttagcctctgctatcgcattaccaatgacccgttgatgaccacggtgtacaccatcaaatgtgcctaatgcgtatacgattttacgattaatttgacgtaattcatcaaacgagtgtaaatgtttcatacttatccttcaataaaaatatttttgtccactttaagtgaatgtttcgttcgttttagaatgcctacaaacccatgaggtccataagctctatacttgttagatggaatcgtatgagaaaaggcctctacgattggtaattccttaccttgtaccatcatctttaattgtacactatctacgtccacttttgaaagatgagataccgcaatatccgtaggcaacaacaattttttaccgtgaatcgttaattcctccgctatataggcagattgaatatcaaaaggccccacacaagttcttgccaaggaagtcatagtcccaggaatgcctaattgaatacatatatcacgtaataacgaacgaatataggtaccaccagaacaggtgacacgaattgtaaaataaggaaaaccataagctaccaattcaatattagaaatcgtaatggttcgcattggtaactctacaggtatccccttacgtgcatattcataagcccgtataccattaatttttatagccgagtacttggatgggcgttgctcttgtgtgccaacaaatctagatagcattgatgataattcatcccacgttggcggtatcaatcgttcattaattgcagagtgattcgccagtaatgtaatgccactagtgagattcatatcatcgtcaggtaataccggctgtcccgtactatcttcagtgtcagtaaaggtaccaaatttacattctgctacataggtcttattaaatccatctgtgtattcaatgagacgtgtggccttacccaaaaagataggcaatacaccataggccatagggtccaatgtgccactatgaccaattcgtttttcttttaaaatgcgacgacatatacctacagcatcatgactggtaataccaggaggttttaaaaatggcagcactccatccattatttgataacctccaatagacgagacttagcctcatcgatagaaccttctatggtacaaccagcagcacgtatatgaccaccaccgccaaaatgattagcaatagcattcacatctgtccccttagatcgaaggctgatacgcgtgcgatttgggctttcacctttcaataaaatggccacatcaacagtatctacattacgaataatgtcgacgaatccatctgtatcgtcgcctaatatagacataaccgctggagatagctcgatagtagcaacgcgattatccttataaaaagcaatagtttgcattacctgtttcgttaattcaagacgtgctgcacttacggcctcaatcgtttcggaaataacattagggcgagccccagcagcgacacaacggctagccattttaagtgtattagctgtagtattgctaaatttaaagaatccacagtcggtggcaatcgccatataaagagcattgcccatagactctgtaataggccaattccattgttcgcacaagtacgtaataatttcaccagtagccgcaaaatcaggttttaaatatagatgatcagcaaattctgaattagaaatatgatgatctatattaaaaataggtgcactaaagagtgcacctacgcggccaatccgttcatacgtgctagcatctaataccatgagcatatcaacctgtacaggatgtgtttcaaaataggcaacatccttaatttgatcgatatacgataaaaaggaatatttttcaggtattacatcatccacgaccatatacacagttttgccttgcgctacgagagcctcataaaaggcaaccatagaaccaatagcatcgccatctggtcgtacgtggacagtgagcattatagaattagcttcacacagagccatgtgtaattgattaattgtgatcttactcatgttctgtatcctttgtgttaatttgtttcttcatcctttttgatttcattcaaaagggattcaatatgcatgctgtaatccaaagatgaatccttatcaaaggtaatcgttggaatatggcgcaattttaataccttgccaagctcggtacgcacatggccagatgcatgttttaaagcgataagagtatcttctttctctttatcagaaccaaacaaggaaacataaatcgtagcttcacgcaaatcacctgtcacgtggacatcggtaactgtagtaaagccgatgcgagggtctttcaacccacgcatcaacatttgacttacttcttgtttgatgaattcttgtaattttcttacacgaacatcactcatagtaacctcctaaatttgaggtgcaacttcttccatcaagtacgcttcgattacgtcgccttccttgatgtcgcggtaaccttccaaggagataccgcattcgaaggatgttttaacttctttcacttcgtctttgaaacgacgtaaggaatcaaccttaccttcaaatacgacaataccatcacggatcaaacgtacttcggaatcgttcgtaatacgaccttccgttacataggaaccagcaacgatggccttaggtgtggagataacttgacgcacctctgcacgaccaacgacaacctctttaaattgaggtgccaacataccgcgcatagcagactcaacgtcattaatagcatcataaatgacacgatatgtacgtaaatctaccttttcttgttctgcagcacggcgaacatttgcatctggacgtacattaaagcccattacgattgcattagatgcagatgccaacatgatatcagattcgttaatagcacctacggcagcatgaacgataacgatacgaacttcagggtttttaataccttccaaggattgacgcaatgcttctacggaaccttgaacgtccgctttgatgataatgttaaggtcttttaactcaccttgttgaatttggttaaagatatcatccaatgtaaccttgtgagtagcttgtaattcttgtacacgttgtttagcaatacgtttttcagcgattgtacgtgcttcattatcatccataccataaataatttcaccagcttgtggaacttcggagaagcccaagatttcgactggcatagatggacgagcaaccttaaccttttctccacgttcatttgtcatggcacgaactttaccatatgcagtaccagcaagaactgtatcgcctacgcgaagagaacctttttgaacgagcactgtacatacagcaccacggcccttatcaagttgagcttcgataactacgccatatgctttacggttagggtttgcttttaattccataacctctgctacgagcaagatattttcgagcaaatcatcgataccttgtttttgtttagcagatacaggaaccatgataacatcgccgccccactcttctggcaataaaccatgttcagatagttgttgtttaacatgatctgggttagcacctggtttatccattttgttgatagctacgataataggcacatcagcagatttagcatggttaatagcttcaattgtttgaggcattacaccgtcatcggcagctactacgagaactgcgatatctgtagattttgcaccgcgtaaacgcatcgctgtaaaagcttcatggcctggtgtatcaaggaacgtaatcttattgtcattataacgaacttggtacgcaccgatatgttgtgtaataccgcccgcttcgccagctgttacattggtttgacgaattacgtccaacaaggatgttttaccatggtcaacgtgacccatgatagttacaacaggaggacgaggtttcaatgtttctggtgcatcttcaatttcgatgatatctgtaggatcttcttctggttctacttctgttacggttacaccaaaatcttctgctacgatggtagctgtatcaacatctacctcttggttaatgctagccataacacctaaaagcatcaattttttgatgatttcagatacttcacggcccattttttcagccaattcttttactgttaaaggaccgcttaattcgatttccgtagcgattgcttcttgtgctttacgttcttcttccgctttatgttgcaagtattgctcgttacgatgttttaccttatttttcttcttctgcatagaagtggacaataaggattgtgggcgattgttaccttttttatttttcttattgcggcgatcattgccattttgttggttaccgccattattgttgcgattatctacacggccattgcggttgcggttatctgcattaccattgtgacggttgtcatttttttggccttgttgaccatcattcttttggccttgttgattaccatttggacgatcttgtttttgatggttacgaccatcttgtttttggccattattttgttttttagtaggctcattaatttgtacatgacgaacattagatttcttatcgtcatgtttcttatcatcatgtttagcctcttttttatggctctgttcttttgctggtttatctgtttttacagctttattaggtgttgcagctttttcatgtttgcttggattagcaggagcagctgctgcctttgtatcggccccattagatttaccacctaattggtttttcaccacagtataacctgcatcatctactgtattaacggcttttgtaacattaaaattatgttgttgcaaaatagaaataacctgtttactttcaacgccaaattccttagcgatttcatgtacgcgctttttggacatctacatacccccttcttactgatcaatctcttttagtaatgcttttgcaaatccatcatcctctacggctaccactacacgtacttctttgcctatagccgtacctaatgtttctttactgccgactttacgcaatgggatatgatgtaattctgctaattgtatgtatttcttttcattattggccgcacaatcacctgctaatagaacaagcttaggggttttcttcttcatcgctttctctacgatgaaatctccggaactcaattttccggcccgttgtgccaagcctaagagatttaaaactttatcttcattcatatgctgaaattattcatgaccttccaaatcgtgcttcaatgcttcatatacctcttttgatacagcatgcttcaaagagcgttctagttttttacccttatacgcagcctcaaaacagtccatggatgcacagatataagcaccacgaccaggggctttaccagttctgtcgatactgattgtcccttctgggcttagagcaacacgcattaactcgcgcttactctttggttcaccacagcctacacaggtgcgcataggttgagatttggttttcattagtcttcgctttccgctgcttcagtacttgtaaaacctgtaaaaggattttctgcagcttgtgtttcactcttaatgtcgattttccagtttgtcaatttagctgctaaacgagcattttgaccagctttaccgatagccaaggataattggtaatcaggtactacaacataagaagatttttcttcttcactaacatctacagagattacctttgcaggacttaaagagttcgcaatataaatggcaggatcttcatcccattttacaatgtcgattttttcatcgtgcaattcatctacaatgtgttgaacgcgttgacctttcggacctacgcaagcaccaactggatcgatagactcatcgcggctatatacggcgattttagaacgcataccaggttcacgagctacagatttaagttctactacgccttcatagatttctggcacttctaattcaaacaagcgttttaataggcctggatgagtacgggaaatcataatttgagggcctttcgtagttttcttaacctctacgatatagcatttaatgcggtccccttcatgatatgtttctgtaccgatttgctcagttggaggtaagatagcttctgttttaccaagattgatatatacgtttttaccttcaacgcgtgtaataacacccgtaatgatatcgccctcacgactataatattcttcgtatacaacactgcgttcagcttctttcaaacgttgaatcaacatttgtttagctgtatgagctgcactgcgaccaaagttagcaggtgttacatctgcttcaacaatatcgccaatttcatagcgtttatcgattttacgagcatctaataggctgatttcggtttctgggaattctacagtttctacaacttgtttcttcgccattaccttataagcaccagtttcacgattcaattccacatacgcatctggattagaatgtggttccttacgatatgcttgtaataatgcagcttctagggattcaaaaataacctcaggtgcaaaacctttttgttttgtcagcaccataactgcttgaattaattcttgactcactcgtatgcctccatatattaaaaatcaagatgtaatcgaatttgtgcaatggcagaacgttcaaatgttacgctttcaccattgattgaaaattctatcgttgtatctgtaaagccttgtagcacacccgtatattgtttactgccattaataggtttaaacaattggatatctacatcacggccattataccgaatgaaatctttatccttttttagaactcgatcaagaccaggagaagacacttcaagcaaataattttctgcaatagggtctttctcatcgagagctgcgctcaatttttcactgaccatttgacagtcatccaaatcgacaccacctggtttatcaaggtacacgcgcaaataccaatcccgttctcgaacatagtcgacatcgactaattccagatttgtgccagctataacgccttcaactacagaggatacaaattcctctacggcctctcttttcatagccatcgcctccttataacatactacatatcgattatatacgctgttttcatcatacaatttgatacaattatatgactaatttcacccaatcataaacgaaagagtgagcaaaaaatagcccactcttaaaaaagtttatataaaagtcatgtatagtatagcataattccgctaaaatgtacaatttaaccgcgtgaatttagttcacacaatatattttttaaatgttcagatagtacatgttccaaatcatctaatgacttagcatcaagatgatgatcaatttctggataattttgataccgtaattctgcaaagaattcatcgcgatattcattatagtacaacagtaatcctgtacattcatccatctttcgatattcacctatgatataggaaccattaatcatgcgcaccgcatttttaggtgttatatctcgtacaaatccttctaactcagcgggcataacagattcataatcccaattttgtagccccttacgcatataggtataggtaaaattttctgcactgttgattagtaattttgaaagcccctgtacacaacgtttttgtaggccctgccaatacggttcgaactcttggcgcacaaaagatatatctacaaatgtgaacaaaggcatcactacgtgcacggtataatcctctacctctttatcgtagagagcacaccacttccaacctaaatcattttcatagtgaaataaaggtaatgtcaacacggcttcacctgcagctaatgtttcttgcgctttcacaatttcatcaggccctgtcaccttgagtttaaaattaccaatctccggtggcaaccaagaatagtctaaagacttacaggtttcaatgatgttctccatataatgactcatacctttcttgataggttaaaacggttttaacatacatacgcgtttcaggaaatggaatcgtatcaaccataccattccaatttttttccttaatccatgattctacatgtccacgacctgcattataagcagctaacgcttgcacttcatcaccgttaaattcttttaataaataccctaaataccacgtacctagctgaatatttgtttctggctcttttagctgacgatctgtgtagttaccatgccccatttgttgtgctacccaacgggccgtatccggcatgagctgcatcagtccaagcgcccccgtctcagattccgccgtattcttatatttactttcagccaaaataacactagccaccaacgatggtgacacctcttctttttccgcagccgatacaactacatctctataatcaaaggggtatgccgtatagcgtgctacaggatcttgcatatggttaaaataaaaccagcccaacacgacaacagccaatgccgttgctgtatttcgtttcatacatcctccccttaatcctaaccgtatatattttgaatcgattcaatcttatatatattgatgattatttattatacaacggtagtagtttctcatgccacaatttttctaactgaatatgtaattcatcaggtgtaccatcattattaatgatgacatctgcaaaggagcgtttatcatctaataacatttgactttgaatacgcgctaatgcgtcttctcttgaatatccattgcgctccattaatcggcgaatctgcacctctggagatacatagacaagccaaaccgtatcgagtcgctcataccacttaccttcaatgagaagaggaatatcataaattacggctggagcttcttcctcttcatacatagcactcagttcatcaatacgctgacgaatgaaaccatgtaagcagctatttaactgtaggcgtttttcttcatcgtgaaagacgatactaccaagtgcttcacgatttaatctaccatcatcgagaatcactgtatcaccaaataattcacggatagcagcgagtccaggcgtaccaagatcaaccacttcacgtgctactacatcggcatcaatataaggtacattcttctttttaaaaaaatctagtactgtactcttgccagatgcaattccacctgttaaacctatttttaacatatgtgcctcctgcatctatccttctactctaaacattatatgtaaaatttattttacaagtgcccagttttccgcattatgtacatcgacgataagtggaacatgtaattctacaatggattccatagtttccttaagcaatgtttgaatagcatccaattcatcgttaaccacttctaatacaagttcatcatgcacttgtaataataagcgagatttaaacatcttctcttctagaatggattctaccttgttcatagcgagctttataatatcagcagcagtaccttgtatcggtgtattcattgctgtccgttctgcgaaggaacgacggttgaaattgcgactattgatatctggcaactcgcgcatgcgaccaaacatcgtacgcaccttacccgtttcatgggcttcttgtaccatgttatccatatattctttaacctttggatagcggctaaaataaagctcaatatagttttttgcttcttgacgtgtaatgcctaaatcacgagacaaaccaaaatctgaaatgccatagataatgccaaaattgacagcctttgcgtgagaccgttcttcgctggttacctcatcttgagacttaccaagcacttcggcagcggtaaatctatgaatatctttaccatcgttgaaagctttaattaatgcttcatcaccagacaaatgcgccaaaatacggagctcgatttgtgaataatcggcactcaccaatgtatcaaagccttctccaggatagaataacgctctaatttcacgacccttttctgtacgaacaggaatattttgtaagttcggatctgaagagctcaagcgtccagtagctgttaccatttgattgaatgtggtatgaatacgatgtgtttcaggattgatgaggaccgctaagccttcacaataggtagaaactaatttggcaactgaccgataggccaaaatcttctctacaataggactttcatgacgaagcatatccaatacttctgcatctgtggagtaacctgttttcgtctttttaatgacaggtagattcatcttttcaaataagatgattcccaattgttttggagaattaatattaaacgtttcccctgccaattcataaatttcttgctgaacagcttcgagttccgccttgaatttaacagttgtttcttctaattttacagggtcaatataaataccatttttctccataactaataatgtatgaatcaatggcaattcaatattgttgtataaatcccataaggattcgtcttgcaatgccttaacagcagcatcgttcatagcaagcaatgctttcaccatagagacgcattctacatctacactacctgtagcaatagatggcacactaaaacgctctgttaaatagagatatccataattggtacgcgttgggtccaatagataagccatcaaggatacatcgtgaatacgggccacaccattttcatacaaacggatttgagccggtttatcgtgacaaagaacttccattaattccttgctttgcgtcgttacaaccgtctttgcaccattcaatgcattcaataatttgtcattatgagaaccatctagcttgataatgctttcaccattattaatgaaagcagccgtaatcgtacggaacggggccttgccgtctgtgatgatatgaacgccaattgttttctctgtataaaattcttcagtaagagcagatgcatctaacagatcttcgattttaatctcttcggccatactaaagagtccaccaaaatcctctgcgtcgtcaccttctgcacccatcacactagccaaacgaggtgtcaattttgtaaaacctagggtttcaaacataggtttcacttcgccaaggtggaaattctgtacaaattgatcgagcgtataggacaagtccatgtcagtcttgatggtagccaattgacgagataagaaggctaactctttattttcaacaagacgctcttttaatttcttgcccgaaatattatcgatattctcatatacagactctaaatcaccgtattcattaattaatttaagagctgttttttcaccaacccctggaacgcctggaatattatcggaagaatcgcccataagcgccttcatttcgataactttttctgggccataaccatataattcagccatattatccaaggtaacctcaagcatatccgagataccttttttcgttaagaatacatgactgtagtcggtaacaagctgtaaattatcgcggtcaccagtaataatttgcactgctaaatcagaagatccaaatttcttagacaaggaaccaagaatatcgtccccctcataaccttcctcttcaataacacaaatgccaagagccttcaacacatcttgaatcaagctaaattgaggacgtaaatcctctggtgcatcagggcgattacctttatattcactatacatttccgtacggaacgtttgacgacctttatcaaaggctacagcaatataatcaggattaatttcctcatataatttaatgagcattgtcaaaaaaccatatactgcattggttggcgtgccaagagcagacttcaacggaggaagcgcaaaaaaggcacggaataacaggctactgccatctataatcattagttttttcataagtacacctcgcttaatcatatgttccattatagcatattgaggcgtaataaaattgatttttactacctttgcttctatcaaaaatatatgcattcatctttctaagttttgcagaataggactgagggtagccccaaaacctccaccggccgggtctgactacggcctacggccttcgcagggccaaagtcggttttggagctaccctcagtccactctcataaggtattcaaaatgttatgcatatattttatgattacagcatttatcactaaaaatcaattttattactgccgggtacaaggaaaaaggacgccttttggcgtcctttgggtcttgaattgtcaagtcaaatgcaactctactgaatgataaacctcgtatggagttttccaatttaagcatttgcgcggtctaagatttatttctttcatttttgcttcaacatagctatctgattgattaatatccacagttttcgggaaatattctctaagcaatccattggtgttttcgtttgttcctctttgccaaggatgatgtggtaatggaaaataaaattctactaaattcaactcctgactaatttctgcatgtttagaaaactctttccctctatctggagttattgtttctagaggttgattttttaaaagcttaatcatcgcttgtttgactaaaaatgcattcttttttgcaatttttttacatagcagatacctactttttcgatcagttaatgttactaagcaagccttaccagtctgccccataactgtatcagcctcccaatcacctaatcgttctcgattatttgcaggagctggtctatctgtaattaaattactaatttgaatttttccacgtctttcttcataattttttgtatgacgacttttaccacgatgtcgtagtttgcgaacaactcctctatttccatgtgataattctttttcatcaaaacgaccattatatatttccctgtaaattgtattgtaactaatagtgaagcttgaattttcaaatttcaatcgagaggagatctgttccggagaccattgatgtctcaaaaataaattctttacacattcatatagacttggattatctagcttttttcttggtttacaattaaagcgtctatttttatatctgtcatgggcttcacaaggtatgtactcgccattttgactatttcttttgatttctcttgatatagacgatttatttttcccaagtaaaattgaaatttctgtttgattttttcctatatcaataaaatgttttagaatttcgcgctcttttagtgtaaaatgagtataatgattcatggctcctcctgatttttagatgtctttgcaaacactattttatcagaaagccatgaatctttttttagttgcacttagattataaattcaaggtataaaaaaagcccatcatcgatgggctttggctctataaaattataaagcgtttactttagctgcaaggttggattttttgcgagctgcagtgtttttatgaagtacacctttggaggctgctttatcaattacgctagtagcttgaacaagtgcttgttttgcttcttctactgcgcctgcttgaacagcttcaacggttttacgagctgctgtacggatttgagatttcacagcggcgtttttcgcacgacgttcagcatccgtttttacgcttctaatactggatttaatgtttggcaattgagtcacctccttaaaaatcgtttcttatacctgaatgattatatcatacaagatattgtgacgcaaggattatattacacaatacgactatttcataatatcttttaaaaatgatgtgcctactgcatatggtgaaagtccaaagttcgccaatactgtttgtcctatatcaccaaaactatggcgtaaacctaaatcgatggcccctttcatacttgggctataggcaagtaatggaacgtgttcacgcgtatgatctgtaccatgccatgtaggatcattaccatggtcggctgtgatgataagcaaatcatcatctttcaataatggcaataatccactcaattggtaatcgaaatcttcgatagcacgtttatagccttctacgttacgacgatgaccatataaactatcaaactctacaagatttaccatcatgaggccactttcaaaggaggaacctaataagtaaggcaccacattcatgccgtgagcattcgattttgttggatagctttcatcccatccgacatgagcataaatatcaccaattttaccgacggccaccgtaagaatttgagcagcttgtaattcctgttgcaccatgcgatgttcaggcatacggctatagtcatgacgattggacgtgcgcacaaaatgacctggttcacctataaacggacgagcaatgatacgtcctacataataatcacccacgcatactttgttacgcgtaatttcgcacatacgatacagatcctttaaaggaatcacatcctcgtgtgctgcaatttggaacacagaatccgcagaggtatacacaataggtttccccgtttttatgtgctctacgccaagacgctctataatttccgtaccagatgcgacctcattaccaagataaccataaccggtttctttagtgaaagtatccatcaattccttagggaatccatcgtaaaatgtagggaacggaaccgtaacaggatggcccatcatttcccaatgaccactagttgtatcctttcccgtactgacttcctccattttcccataagcacccataacaggtacttcatcggtcttaatatccgcaatatttgccaagcctagagaacgcaatgtaggacaatgaatcaaacctgcagttgcttcgatatgtcctaatgtattagccccttcatcattaaattttgccgcatctggggcatgaccaatgccaacagaatccataactaatataatgattcttttatacataataactcctcccaaaggaagcctatttaagatatggcatagcaagcataagtgctgccaatgatttactatccttaatttgttcattcttaatagcctctagcagttcaggtaatgtaaagtactcaagctctacgtattcatcaggatcccagttagtttcacccatggtaaggtctttggctaagtatagatgtaatacttcattacagaaaccaggacttgttgcaatagttcccaatggaatccattgattagcacgataccctgtttcctctgctaactcacgtttagcacaattaataggttcttcgttaaggtctagtttacctgctggaatttcaagcaaaggttgttgtaaagcataacggaattggcgttccattacgattttattatcttctgtaacaacaacgatagcggttgcccctggatggtgcaccacctcacgccacgcatcatttccatttacatcagctatatcataggtaaccttaattagtttaccatcaaacttcatttcgctagatttttgtacttctttgctaattgccatacttaattcctcgtatatataaaatgattgttatagtataaaacctacaactcattatagcacaaattaattacaccaaaagaaggttcctactagtcatattgtgaccaataggaacctattttaatgagattatataaatgttacgctacctttacatagccttgtaatgctgtatctacaatactacatttagcatctaattcagctttaagtgccgtttcaggatcgagttctctagataccaccatatctacgatggatttagagaatccagatacgagaatgacaccacttggatgcatttgtacaggaattgtattatgtgcatagacagatacattccagaaaatgagccgtggcatagtatacccaagggcttcaaatttctgacgacatgattcaataacagtcgtgttatcctcatgctttgtagcctgatcaaactgcatatcagaaataatgaggcatgctgaaggtaactcctcttgacgcagatgatttttaacagctgtgtcgagaattaagtcaaatgttgcctctatatccgtattgctgtaatcgtcaaagcgatgcaatcgtctaagcttatctcgcaatgtttcacacatcgaaacatccaccatttgagggcgattactaaaggtaatgaatcgatttttaaaggattcattcttgttatgctgtgcacaatacaatgcaatcgaatctgctacgctaagtgcggtaacggaactattaccagatagttgttgccccatagatccagacccgtcgcgtataactaagatatcgtcataatccttaggagattcttgggcgttccataattgctctaatgtttcgtcatatggatttaggctactatcccagcaactatccgcctttacataggcttgcacgatatcatacaagaacatagagttcgcattaatcttaactgagtcgtctcccctttctaatgatgtaagatacgcctggcggcgttcttcatcatgttttaaaaaggcattacgatatttaagattcgccttagatggcacatgattataattaatatcgttccattggttgagagaagccatgcgatctaccaccgctagatgttcgcgcaatctagacagagttttacggtactctcgtgcacttagatgtaataaggattgtaaaataaccgcctcagaacgtttttgcttagaagatgtattattggacggcatccattttgctaacaaactaatagagtcgcccagtccacaccccattacatcacgtctaaactgattggcaattaattcacctagtccatcatgtaagataccacttgtagtatcaaagaagatgcgtagcacatcatcccaacgaccatagttccataactcggtgccgatgatgaagtgcaatgccatctctggatgcaagtcaccgattttagtgagcatcatgcggaatacatcgcgctcgccaagacctagcttaatatggcgggcatacataagccatttcatggtatacagagggtcttcctcataggatgtaatgaataagcgcaatgcatccactgcatccatggagcaatgtgcaccatagaaatatcgatcatgtttacttttaccataaaaattaactgcgacctgacgcaatgcaggcacagagaaattaaggtccacaagaggactgccactcgtacgatacgcagtaccatcattagcggtataggatttttcattgtttgttaaagcgttcataaatgcattcatagttcatatctccttggcatataaaaaaccgctgcggattatcacaacgtaaattttgaaagcaaaataaacaagacaaccgtgagcggttacaatacaaagttcaagacaattactaacctcactgaggctaaggataactagacacgatactcaagaccaaagggtctccataactactttttctggttatttaatcaaatgattgctgctagtgtctaaccttatgaatcgtttatgaacgataactatgaaattatactagattctatactcatcttaatcaagttatgtatgtgacaggattgctgttagaatctaagtctttctgttctacatgttggtgatttgtttcacctgatgatgtaattataatacacgtatccgtgtgtgtcaataattatttttaaaatatttcgcttttttgaaagttagaactagcaacacatgttttattgcattgctagtcccttataattactactaatactctgcctcaacgcgccaaatttcatcaaccaaccatttcattggtccccacgaaggtttaaatactcttgctaccataccttctatactaagttgtgtggactctagttgacctgttttacaccaaagagcaaagtgctcacagttatggtcaaacaaattataatcgccttttccaatcatagattttgcacgttgtacagttttacggggcccataaaatctagcagttacatcagagtcctggaaaatagataataaactatcgtcctctgcaatatataaggtatcgccatcacaaaactcttcaatgctagtctcagcaatacgtccgtctagtggagaatccccttttatatagtggataattttatgatatccagcgtacacaccataatgctgatacacatcaccaaagaaaaaattgcttcgttggcaaaatacaatatcacctaattttaactttcttgaacccattactactctcccttacaacacatcatttatgattattcatatacgtgataatatcatctaaggaaatattttgattcttacctcgtaataatcgccatacctttctaactaatttatagaatagatataaacctgccaatggccagaatacaccaaatgggttttgttcaaatggattccgtggatgtggaaatggtccaggcatgggtcctataatattaggccaactatgttcatgatacaccccatcaggatgaacaccggttttatttctattggtagaaatatattccactacatcgtcgtataatttaggatcttctttttttacactttcaagagtttctttaataacatctgttttcataccatacacctctatactacaaagaatataatgttctaaataatttatcttagagcttatacatatagtgtaatacatgatatgtgtaataaatga
